United States Patent Application Publication US 2026/0240958 A1 - sequence listing, part 20

SEQ ID NO: 16613 - RNA, 9485 nt, synthetic construct
  source 1..9485: mol_type = other RNA
aggaaataagagagaaaagaagagtaagaagaaatataagagccaccatggcccctaagaagaagcgtaaagtgagccggatggaacgcctcgtctacgaggtgcggcagaagtgcagaaacatcgaggacatctgcatctcctgcggatctctgaacgtgaccctggagcacccactgttcatcggcggcatgtgccagaactgtaaaaactgttttctggagtgtgcctatcaatacgacgatgacggctaccagagctactgcaccatctgttgcggcggaagagaggtgctgatgtgtggaaataacaactgctgccggtgcttctgcgtggaatgcgtggacctgctggtgggccccggcgccgcccaggccgctattaaggaagatccttggaactgctacatgtgcggccacaagggcacatacggcctgctgagacggagagaggactggcctagcagactgcagatgttcttcgccaataaccacgaccaggagttcgacccccctaaggtgtaccctcccgtccccgccgagaagagaaagcccatccgggtcctgagcctgttcgatggcatcgccaccggtctgctggtgctgaaggacctgggcatccaggtggataggtacattgcctccgaggtgtgcgaggactccatcaccgtgggaatggtgcgtcatcagggcaagatcatgtacgtgggcgacgtgcggagcgtgacacagaagcatatccaggagtggggccctttcgacctggtgatcggcggcagcccttgcaatgacctgagcatcgtgaacccagcccggaagggcctgtacgagggaaccggcagactgttcttcgagttttacagactgctgcacgacgcccggcctaaggaaggcgacgaccggcccttcttttggctgttcgagaatgtggtggccatgggagtcagcgacaagcgggatattagccggttcctggagagcaaccccgtgatgatcgatgccaaggaagtgagcgccgcccaccgggccagatacttctggggcaatctgcctggcatgaacagacccctggccagcaccgtgaacgacaagctggagctgcaggagtgcctggagcacggccggatcgccaagttcagcaaggtgagaaccatcaccacccgaagcaacagcatcaaacaaggcaaggaccagcactttcctgtgttcatgaacgagaaggaggacatcctgtggtgtaccgagatggagagagtgttcgggttcccagtccactacacagatgtcagcaacatgtctagactggccagacagagactgctgggaagaagctggtccgtccctgtgatcagacacctgttcgcccctctgaaggagtacttcgcctgcgtgagcagcggcaacagcaacgccaacagccggggccccagcttctctagcggcctggtgccactgtccctgagagggagccacatgggccccatggagatctacaaaaccgtgagcgcctggaagcggcagcctgtgcgcgtgctgagcctgtttcggaatatcgataaagtcctgaaaagcctgggattcctggagagcggctctggctccggcggtggcaccctgaagtacgtggaggatgtgacaaacgtggtcagacgggatgtggagaagtggggccccttcgatctggtgtacggcagcacccaacccctgggcagctcttgtgaccggtgccctggctggtacatgtttcagttccaccggatcctgcagtacgccctgccgagacaggagtcccagcggccattcttttggattttcatggacaacttgctgctgaccgaggatgaccaggaaactaccactcggttcctgcagaccgaagccgtgaccctgcaggacgtgagaggccgggactaccagaacgccatgcgggtgtggtccaacatccctggactgaaaagcaagcacgcacctctgacccctaaagaagaggagtacctgcaggcccaggtgcggagcagaagcaagctggacgcccctaaggtggatctgctggtgaagaattgcctcctgcccctgagagagtacttcaagtatttcagccagaatagtctgcccctgggaggcagcggcggcggcgccctggtgacatttgaggacgtcgccgtgcggttcacccaggaggaatgggctctgctggatccttctcagaaaatcctgtaccgggacgtgatgagagagacataccggaatctgacctccgtgggcatcaactgggaatgttgggaccttgaagcctgcttcagaagcctgggaagaaacctgagagtgcaggtggtgaagagaaagtgcgagctgaccaacagcggcccctgcgccgagggcggcccaagcagcggcgcccctcctcccagcggcggcagcccagccggctccccaacctctaccgaggagggcacctctgagtccgccacccccgagagcggccctggcacctccaccgagcccagcgagggcagcgcacccggcagccctgccggcagccccacctccacagaggagggaaccagcaccgagcccagcgaaggcagcgccccaggcaccagcaccgagcctagtgagcaggagattaaacggatcaacaagatcagaagaagacttgtgaaagacagcaacaccaagaaggccggcaagacaggccccatgaaaaccctgctggttagagtgatgacacccgatctgagagagcggctggaaaacctgagaaagaagcctgaaaatatcccccagcccatcagcaatacatctagagccaacctgaataagctgctgaccgattacaccgaaatgaagaaggcgatcctgcatgtgtactgggaagagttccagaaggaccctgtgggcctgatgagccgggtggcccagcctgccagcaagaagatcgatcagaacaagctgaaacctgagatggacgagaagggcaacctgaccaccgccggctttgcctgctctcagtgtggccagcccctgttcgtgtacaagctggagcaggtgtctgagaagggcaaggcttacaccaactacttcggacggtgcaatgtggccgagcacgaaaagctgatcctgctggcccagctgaagcccgagaaggatagcgacgaagccgtgacatatagcctgggaaagtttgggcagagggccctggatttctacagcattcatgtgaccaaggagtccacccaccccgtgaagcccctggcccagatcgccggaaacagatacgcctccggacctgtgggaaaggccctgagcgacgcatgtatgggcacaatcgcctccttcctgtctaagtaccaggacatcatcatcgaacaccagaaggtggtgaagggcaaccagaagagactggagagcctgcgggagctggccggcaaggaaaacctggaataccctagcgtgaccctgccacctcagcctcacaccaaggagggcgttgatgcctacaacgaagtgatcgcccgggtgcgaatgtgggtgaacctgaacctgtggcagaagctgaagctaagcagagatgatgccaagcctctgctgagactgaagggattcccttcctttcctctggtcgagagacaggccaacgaagtggactggtgggacatggtgtgtaacgtgaagaagctgatcaacgagaaaaaggaggatggcaaggtgttttggcagaatctggctggctacaagagacaggaagccctgagaccatacctgagcagcgaggaagatcggaagaagggaaagaaattcgctcggtaccagctgggcgacctgctgctgcacctggaaaagaagcacggcgaggactggggaaaggtgtacgacgaggcctgggagcggattgacaagaaagtggaaggcctgagcaagcacatcaagctggaagaggaacggagaagcgaggacgcccagagcaaggccgccctgaccgactggctgcgggctaaggccagcttcgtgatcgagggcctgaaggaggccgacaaggacgagttctgcagatgcgagctgaagctgcagaagtggtacggggacctgcggggaaagcccttcgccatcgaagccgagaacagcatcctggacatcagcggcttcagcaagcagtacaactgtgccttcatctggcagaaggacggcgtgaagaagctgaacctgtacctgatcatcaactacttcaagggcggcaagctgcggttcaagaagatcaaacctgaagccttcgaagccaacagattctacaccgtgatcaacaaaaagagcggcgagatcgtgcccatggaggtgaacttcaacttcgacgaccccaacctgatcatcctgcctctggcctttggcaagagacagggcagagaattcatctggaacgacctgctgtccctggaaaccggcagcctgaagctggccaacggaagagtgatcgagaagacactgtacaacagaagaacccggcaggatgagcctgccctgttcgtggccctgaccttcgagcggcgggaggtcctggactcctccaatatcaaaccaatgaacctgatcggcgtggcaagaggcgaaaacatccccgccgtgatcgccctgaccgaccccgagggctgcccactgagccggtttaaggatagcctgggaaacccaacccacatcctgagaatcggcgagagctataaggagaagcagcggaccatccaggccaagaaggaggtggagcagcggagagccggcggctacagccggaagtacgccagcaaagccaagaatctggcagacgatatggtgagaaacaccgctagagatctgctgtactacgccgtgacccaggatgccatgctgatcttcgccaacctgagccggggcttcggccggcagggcaagcggaccttcatggccgagagacagtacacacggatggaggactggctgaccgccaagctggcctacgagggcctgagcaagacctacctgtccaagacactggcccagtacacctccaagacatgcagcaactgtgggtttaccatcaccagcgccgactacgacagggtgctggagaagctgaagaagacagcaacaggctggatgaccacaattaacggcaaggagctgaaggtggagggccagattacctactacaacagatacaagagacagaacgtagtcaaggacctgtccgtcgagctggatagactgagcgaagaatctgtgaacaacgacatctcctcctggacaaagggcagaagcggagaagctctgagcctcctgaagaaaagattctcccatagacccgtgcaggagaagttcgtgtgcctgaactgcggcttcgagacacacgcagccgagcaagccgccctgaacatcgccagatcctggctgttcctgcggagccaggagtacaagaaataccagacaaacaagacaaccggcaacaccgataagagagccttcgtcgagacctggcagtccttttaccggaagaagcttaaggaggtgtggaaacctgccgtgcggtctggcggatctggcggaggctccgtggccggccccgtgaccttcgaggaggtggccgtgtacttcagcgaggaggagtgggccctgctggaccccggccagagggccctgtacagggacgtgatgcaggagaactacgaggccgtgagctggctgggcttccccgtgagcaagcccggcgagaccagctggctggagagggccggcaagctgcaggagtgggagagcaggagccacgccaacaccgccaggcccaggggcaaccagggcggcccaagcagcggcgcccctcctcccagcggcggcagcccagccggctccccaacctctaccgaggagggcacctctgagtccgccacccccgagagcggccctggcacctccaccgagcccagcgagggcagcgcacccggcagccctgccggcagccccacctccacagaggagggaaccagcaccgagcccagcgaaggcagcgccccaggcaccagcaccgagcctagtgagcaggagattaaacggatcaacaagatcagaagaagacttgtgaaagacagcaacaccaagaaggccggcaagacaggccccatgaaaaccctgctggttagagtgatgacacccgatctgagagagcggctggaaaacctgagaaagaagcctgaaaatatcccccagcccatcagcaatacatctagagccaacctgaataagctgctgaccgattacaccgaaatgaagaaggcgatcctgcatgtgtactgggaagagttccagaaggaccctgtgggcctgatgagccgggtggcccagcctgccagcaagaagatcgatcagaacaagctgaaacctgagatggacgagaagggcaacctgaccaccgccggctttgcctgctctcagtgtggccagcccctgttcgtgtacaagctggagcaggtgtctgagaagggcaaggcttacaccaactacttcggacggtgcaatgtggccgagcacgaaaagctgatcctgctggcccagctgaagcccgagaaggatagcgacgaagccgtgacatatagcctgggaaagtttgggcagagggccctggatttctacagcattcatgtgaccaaggagtccacccaccccgtgaagcccctggcccagatcgccggaaacagatacgcctccggacctgtgggaaaggccctgagcgacgcatgtatgggcacaatcgcctccttcctgtctaagtaccaggacatcatcatcgaacaccagaaggtggtgaagggcaaccagaagagactggagagcctgcgggagctggccggcaaggaaaacctggaataccctagcgtgaccctgccacctcagcctcacaccaaggagggcgttgatgcctacaacgaagtgatcgcccgggtgcgaatgtgggtgaacctgaacctgtggcagaagctgaagctaagcagagatgatgccaagcctctgctgagactgaagggattcccttcctttcctctggtcgagagacaggccaacgaagtggactggtgggacatggtgtgtaacgtgaagaagctgatcaacgagaaaaaggaggatggcaaggtgttttggcagaatctggctggctacaagagacaggaagccctgagaccatacctgagcagcgaggaagatcggaagaagggaaagaaattcgctcggtaccagctgggcgacctgctgctgcacctggaaaagaagcacggcgaggactggggaaaggtgtacgacgaggcctgggagcggattgacaagaaagtggaaggcctgagcaagcacatcaagctggaagaggaacggagaagcgaggacgcccagagcaaggccgccctgaccgactggctgcgggctaaggccagcttcgtgatcgagggcctgaaggaggccgacaaggacgagttctgcagatgcgagctgaagctgcagaagtggtacggggacctgcggggaaagcccttcgccatcgaagccgagaacagcatcctggacatcagcggcttcagcaagcagtacaactgtgccttcatctggcagaaggacggcgtgaagaagctgaacctgtacctgatcatcaactacttcaagggcggcaagctgcggttcaagaagatcaaacctgaagccttcgaagccaacagattctacaccgtgatcaacaaaaagagcggcgagatcgtgcccatggaggtgaacttcaacttcgacgaccccaacctgatcatcctgcctctggcctttggcaagagacagggcagagaattcatctggaacgacctgctgtccctggaaaccggcagcctgaagctggccaacggaagagtgatcgagaagacactgtacaacagaagaacccggcaggatgagcctgccctgttcgtggccctgaccttcgagcggcgggaggtcctggactcctccaatatcaaaccaatgaacctgatcggcgtggcaagaggcgaaaacatccccgccgtgatcgccctgaccgaccccgagggctgcccactgagccggtttaaggatagcctgggaaacccaacccacatcctgagaatcggcgagagctataaggagaagcagcggaccatccaggccaagaaggaggtggagcagcggagagccggcggctacagccggaagtacgccagcaaagccaagaatctggcagacgatatggtgagaaacaccgctagagatctgctgtactacgccgtgacccaggatgccatgctgatcttcgccaacctgagccggggcttcggccggcagggcaagcggaccttcatggccgagagacagtacacacggatggaggactggctgaccgccaagctggcctacgagggcctgagcaagacctacctgtccaagacactggcccagtacacctccaagacatgcagcaactgtgggtttaccatcaccagcgccgactacgacagggtgctggagaagctgaagaagacagcaacaggctggatgaccacaattaacggcaaggagctgaaggtggagggccagattacctactacaacagatacaagagacagaacgtagtcaaggacctgtccgtcgagctggatagactgagcgaagaatctgtgaacaacgacatctcctcctggacaaagggcagaagcggagaagctctgagcctcctgaagaaaagattctcccatagacccgtgcaggagaagttcgtgtgcctgaactgcggcttcgagacacacgcagccgagcaagccgccctgaacatcgccagatcctggctgttcctgcggagccaggagtacaagaaataccagacaaacaagacaaccggcaacaccgataagagagccttcgtcgagacctggcagtccttttaccggaagaagcttaaggaggtgtggaaacctgccgtgcggtctggcggatctggcggaggctcctgtggccggccccgtgaccttcgaggaggtggccgtgtacttcagcgaggaggagtgggccctgctggaccccggccagagggccctgtacagggacgtgatgcaggagaactacgaggccgtgagctggctgggcttccccgtgagcaagcccggcgagaccagctggctggagagggccggcaagctgcaggagtgggagagcaggagccacgccaacaccgccaggcccaggggcaaccagggatctggctccggcagcggccccaagaaaaagagaaaagtctaagctgccttctgcggggcttgccttctggccatgcccttcttctctcccttgcacctgtacctcttggtctttgaataaagcctgagtaggaaggctagcaaaaaaaaaaaaaaaaaaaaaaaaaaaaaaaaaaaaaaaaaaaaaaaaaaaaaaaaaaaaaaaaaaaaaaaaaaaaaaaa

SEQ ID NO: 16614 - RNA, 9497 nt, synthetic construct
  source 1..9497: mol_type = other RNA
aggaaataagagagaaaagaagagtaagaagaaatataagagccaccatggcccctaagaagaagcgtaaagtgagccggatggaacgcctcgtctacgaggtgcggcagaagtgcagaaacatcgaggacatctgcatctcctgcggatctctgaacgtgaccctggagcacccactgttcatcggcggcatgtgccagaactgtaaaaactgttttctggagtgtgcctatcaatacgacgatgacggctaccagagctactgcaccatctgttgcggcggaagagaggtgctgatgtgtggaaataacaactgctgccggtgcttctgcgtggaatgcgtggacctgctggtgggccccggcgccgcccaggccgctattaaggaagatccttggaactgctacatgtgcggccacaagggcacatacggcctgctgagacggagagaggactggcctagcagactgcagatgttcttcgccaataaccacgaccaggagttcgacccccctaaggtgtaccctcccgtccccgccgagaagagaaagcccatccgggtcctgagcctgttcgatggcatcgccaccggtctgctggtgctgaaggacctgggcatccaggtggataggtacattgcctccgaggtgtgcgaggactccatcaccgtgggaatggtgcgtcatcagggcaagatcatgtacgtgggcgacgtgcggagcgtgacacagaagcatatccaggagtggggccctttcgacctggtgatcggcggcagcccttgcaatgacctgagcatcgtgaacccagcccggaagggcctgtacgagggaaccggcagactgttcttcgagttttacagactgctgcacgacgcccggcctaaggaaggcgacgaccggcccttcttttggctgttcgagaatgtggtggccatgggagtcagcgacaagcgggatattagccggttcctggagagcaaccccgtgatgatcgatgccaaggaagtgagcgccgcccaccgggccagatacttctggggcaatctgcctggcatgaacagacccctggccagcaccgtgaacgacaagctggagctgcaggagtgcctggagcacggccggatcgccaagttcagcaaggtgagaaccatcaccacccgaagcaacagcatcaaacaaggcaaggaccagcactttcctgtgttcatgaacgagaaggaggacatcctgtggtgtaccgagatggagagagtgttcgggttcccagtccactacacagatgtcagcaacatgtctagactggccagacagagactgctgggaagaagctggtccgtccctgtgatcagacacctgttcgcccctctgaaggagtacttcgcctgcgtgagcagcggcaacagcaacgccaacagccggggccccagcttctctagcggcctggtgccactgtccctgagagggagccacatgggccccatggagatctacaaaaccgtgagcgcctggaagcggcagcctgtgcgcgtgctgagcctgtttcggaatatcgataaagtcctgaaaagcctgggattcctggagagcggctctggctccggcggtggcaccctgaagtacgtggaggatgtgacaaacgtggtcagacgggatgtggagaagtggggccccttcgatctggtgtacggcagcacccaacccctgggcagctcttgtgaccggtgccctggctggtacatgtttcagttccaccggatcctgcagtacgccctgccgagacaggagtcccagcggccattcttttggattttcatggacaacttgctgctgaccgaggatgaccaggaaactaccactcggttcctgcagaccgaagccgtgaccctgcaggacgtgagaggccgggactaccagaacgccatgcgggtgtggtccaacatccctggactgaaaagcaagcacgcacctctgacccctaaagaagaggagtacctgcaggcccaggtgcggagcagaagcaagctggacgcccctaaggtggatctgctggtgaagaattgcctcctgcccctgagagagtacttcaagtatttcagccagaatagtctgcccctgggaggcagcggcggcggcgccctggtgacatttgaggacgtcgccgtgcggttcacccaggaggaatgggctctgctggatccttctcagaaaatcctgtaccgggacgtgatgagagagacataccggaatctgacctccgtgggcatcaactgggaatgttgggaccttgaagcctgcttcagaagcctgggaagaaacctgagagtgcaggtggtgaagagaaagtgcgagctgaccaacagcggcccctgcgccgagggcggcccaagcagcggcgcccctcctcccagcggcggcagcccagccggctccccaacctctaccgaggagggcacctctgagtccgccacccccgagagcggccctggcacctccaccgagcccagcgagggcagcgcacccggcagccctgccggcagccccacctccacagaggagggaaccagcaccgagcccagcgaaggcagcgccccaggcaccagcaccgagcctagtgagcaggagattaaacggatcaacaagatcagaagaagacttgtgaaagacagcaacaccaagaaggccggcaagacaggccccatgaaaaccctgctggttagagtgatgacacccgatctgagagagcggctggaaaacctgagaaagaagcctgaaaatatcccccagcccatcagcaatacatctagagccaacctgaataagctgctgaccgattacaccgaaatgaagaaggcgatcctgcatgtgtactgggaagagttccagaaggaccctgtgggcctgatgagccgggtggcccagcctgccagcaagaagatcgatcagaacaagctgaaacctgagatggacgagaagggcaacctgaccaccgccggctttgcctgctctcagtgtggccagcccctgttcgtgtacaagctggagcaggtgtctgagaagggcaaggcttacaccaactacttcggacggtgcaatgtggccgagcacgaaaagctgatcctgctggcccagctgaagcccgagaaggatagcgacgaagccgtgacatatagcctgggaaagtttgggcagagggccctggatttctacagcattcatgtgaccaaggagtccacccaccccgtgaagcccctggcccagatcgccggaaacagatacgcctccggacctgtgggaaaggccctgagcgacgcatgtatgggcacaatcgcctccttcctgtctaagtaccaggacatcatcatcgaacaccagaaggtggtgaagggcaaccagaagagactggagagcctgcgggagctggccggcaaggaaaacctggaataccctagcgtgaccctgccacctcagcctcacaccaaggagggcgttgatgcctacaacgaagtgatcgcccgggtgcgaatgtgggtgaacctgaacctgtggcagaagctgaagctaagcagagatgatgccaagcctctgctgagactgaagggattcccttcctttcctctggtcgagagacaggccaacgaagtggactggtgggacatggtgtgtaacgtgaagaagctgatcaacgagaaaaaggaggatggcaaggtgttttggcagaatctggctggctacaagagacaggaagccctgagaccatacctgagcagcgaggaagatcggaagaagggaaagaaattcgctcggtaccagctgggcgacctgctgctgcacctggaaaagaagcacggcgaggactggggaaaggtgtacgacgaggcctgggagcggattgacaagaaagtggaaggcctgagcaagcacatcaagctggaagaggaacggagaagcgaggacgcccagagcaaggccgccctgaccgactggctgcgggctaaggccagcttcgtgatcgagggcctgaaggaggccgacaaggacgagttctgcagatgcgagctgaagctgcagaagtggtacggggacctgcggggaaagcccttcgccatcgaagccgagaacagcatcctggacatcagcggcttcagcaagcagtacaactgtgccttcatctggcagaaggacggcgtgaagaagctgaacctgtacctgatcatcaactacttcaagggcggcaagctgcggttcaagaagatcaaacctgaagccttcgaagccaacagattctacaccgtgatcaacaaaaagagcggcgagatcgtgcccatggaggtgaacttcaacttcgacgaccccaacctgatcatcctgcctctggcctttggcaagagacagggcagagaattcatctggaacgacctgctgtccctggaaaccggcagcctgaagctggccaacggaagagtgatcgagaagacactgtacaacagaagaacccggcaggatgagcctgccctgttcgtggccctgaccttcgagcggcgggaggtcctggactcctccaatatcaaaccaatgaacctgatcggcgtggcaagaggcgaaaacatccccgccgtgatcgccctgaccgaccccgagggctgcccactgagccggtttaaggatagcctgggaaacccaacccacatcctgagaatcggcgagagctataaggagaagcagcggaccatccaggccaagaaggaggtggagcagcggagagccggcggctacagccggaagtacgccagcaaagccaagaatctggcagacgatatggtgagaaacaccgctagagatctgctgtactacgccgtgacccaggatgccatgctgatcttcgccaacctgagccggggcttcggccggcagggcaagcggaccttcatggccgagagacagtacacacggatggaggactggctgaccgccaagctggcctacgagggcctgagcaagacctacctgtccaagacactggcccagtacacctccaagacatgcagcaactgtgggtttaccatcaccagcgccgactacgacagggtgctggagaagctgaagaagacagcaacaggctggatgaccacaattaacggcaaggagctgaaggtggagggccagattacctactacaacagatacaagagacagaacgtagtcaaggacctgtccgtcgagctggatagactgagcgaagaatctgtgaacaacgacatctcctcctggacaaagggcagaagcggagaagctctgagcctcctgaagaaaagattctcccatagacccgtgcaggagaagttcgtgtgcctgaactgcggcttcgagacacacgcagccgagcaagccgccctgaacatcgccagatcctggctgttcctgcggagccaggagtacaagaaataccagacaaacaagacaaccggcaacaccgataagagagccttcgtcgagacctggcagtccttttaccggaagaagcttaaggaggtgtggaaacctgccgtgcggtctggcggatctggcggaggctccatgacctacgacgacgtgcacgtgaacttcaccggcgaggagtgggccctgctgagccccagccagaagaggctgtacaaggacgtgatgctggagacctacaggaacctgaccgccatcggctacaactgggaggaccacaacagcgagcacttccagcacagcaggaggcacggcaggcacgagaggaggcacaccggcgagaagcccagcgtgtacacccagtgcggcaaggtgttcgcctaccacggcggcccaagcagcggcgcccctcctcccagcggcggcagcccagccggctccccaacctctaccgaggagggcacctctgagtccgccacccccgagagcggccctggcacctccaccgagcccagcgagggcagcgcacccggcagccctgccggcagccccacctccacagaggagggaaccagcaccgagcccagcgaaggcagcgccccaggcaccagcaccgagcctagtgagcaggagattaaacggatcaacaagatcagaagaagacttgtgaaagacagcaacaccaagaaggccggcaagacaggccccatgaaaaccctgctggttagagtgatgacacccgatctgagagagcggctggaaaacctgagaaagaagcctgaaaatatcccccagcccatcagcaatacatctagagccaacctgaataagctgctgaccgattacaccgaaatgaagaaggcgatcctgcatgtgtactgggaagagttccagaaggaccctgtgggcctgatgagccgggtggcccagcctgccagcaagaagatcgatcagaacaagctgaaacctgagatggacgagaagggcaacctgaccaccgccggctttgcctgctctcagtgtggccagcccctgttcgtgtacaagctggagcaggtgtctgagaagggcaaggcttacaccaactacttcggacggtgcaatgtggccgagcacgaaaagctgatcctgctggcccagctgaagcccgagaaggatagcgacgaagccgtgacatatagcctgggaaagtttgggcagagggccctggatttctacagcattcatgtgaccaaggagtccacccaccccgtgaagcccctggcccagatcgccggaaacagatacgcctccggacctgtgggaaaggccctgagcgacgcatgtatgggcacaatcgcctccttcctgtctaagtaccaggacatcatcatcgaacaccagaaggtggtgaagggcaaccagaagagactggagagcctgcgggagctggccggcaaggaaaacctggaataccctagcgtgaccctgccacctcagcctcacaccaaggagggcgttgatgcctacaacgaagtgatcgcccgggtgcgaatgtgggtgaacctgaacctgtggcagaagctgaagctaagcagagatgatgccaagcctctgctgagactgaagggattcccttcctttcctctggtcgagagacaggccaacgaagtggactggtgggacatggtgtgtaacgtgaagaagctgatcaacgagaaaaaggaggatggcaaggtgttttggcagaatctggctggctacaagagacaggaagccctgagaccatacctgagcagcgaggaagatcggaagaagggaaagaaattcgctcggtaccagctgggcgacctgctgctgcacctggaaaagaagcacggcgaggactggggaaaggtgtacgacgaggcctgggagcggattgacaagaaagtggaaggcctgagcaagcacatcaagctggaagaggaacggagaagcgaggacgcccagagcaaggccgccctgaccgactggctgcgggctaaggccagcttcgtgatcgagggcctgaaggaggccgacaaggacgagttctgcagatgcgagctgaagctgcagaagtggtacggggacctgcggggaaagcccttcgccatcgaagccgagaacagcatcctggacatcagcggcttcagcaagcagtacaactgtgccttcatctggcagaaggacggcgtgaagaagctgaacctgtacctgatcatcaactacttcaagggcggcaagctgcggttcaagaagatcaaacctgaagccttcgaagccaacagattctacaccgtgatcaacaaaaagagcggcgagatcgtgcccatggaggtgaacttcaacttcgacgaccccaacctgatcatcctgcctctggcctttggcaagagacagggcagagaattcatctggaacgacctgctgtccctggaaaccggcagcctgaagctggccaacggaagagtgatcgagaagacactgtacaacagaagaacccggcaggatgagcctgccctgttcgtggccctgaccttcgagcggcgggaggtcctggactcctccaatatcaaaccaatgaacctgatcggcgtggcaagaggcgaaaacatccccgccgtgatcgccctgaccgaccccgagggctgcccactgagccggtttaaggatagcctgggaaacccaacccacatcctgagaatcggcgagagctataaggagaagcagcggaccatccaggccaagaaggaggtggagcagcggagagccggcggctacagccggaagtacgccagcaaagccaagaatctggcagacgatatggtgagaaacaccgctagagatctgctgtactacgccgtgacccaggatgccatgctgatcttcgccaacctgagccggggcttcggccggcagggcaagcggaccttcatggccgagagacagtacacacggatggaggactggctgaccgccaagctggcctacgagggcctgagcaagacctacctgtccaagacactggcccagtacacctccaagacatgcagcaactgtgggtttaccatcaccagcgccgactacgacagggtgctggagaagctgaagaagacagcaacaggctggatgaccacaattaacggcaaggagctgaaggtggagggccagattacctactacaacagatacaagagacagaacgtagtcaaggacctgtccgtcgagctggatagactgagcgaagaatctgtgaacaacgacatctcctcctggacaaagggcagaagcggagaagctctgagcctcctgaagaaaagattctcccatagacccgtgcaggagaagttcgtgtgcctgaactgcggcttcgagacacacgcagccgagcaagccgccctgaacatcgccagatcctggctgttcctgcggagccaggagtacaagaaataccagacaaacaagacaaccggcaacaccgataagagagccttcgtcgagacctggcagtccttttaccggaagaagcttaaggaggtgtggaaacctgccgtgcggtctggcggatctggcggaggctcctatgacctacgacgacgtgcacgtgaacttcaccggcgaggagtgggccctgctgagccccagccagaagaggctgtacaaggacgtgatgctggagacctacaggaacctgaccgccatcggctacaactgggaggaccacaacagcgagcacttccagcacagcaggaggcacggcaggcacgagaggaggcacaccggcgagaagcccagcgtgtacacccagtgcggcaaggtgttcgcctaccacggatctggctccggcagcggccccaagaaaaagagaaaagtctaagctgccttctgcggggcttgccttctggccatgcccttcttctctcccttgcacctgtacctcttggtctttgaataaagcctgagtaggaaggctagcaaaaaaaaaaaaaaaaaaaaaaaaaaaaaaaaaaaaaaaaaaaaaaaaaaaaaaaaaaaaaaaaaaaaaaaaaaaaaaaa

SEQ ID NO: 16615 - RNA, 9485 nt, synthetic construct
  source 1..9485: mol_type = other RNA
aggaaataagagagaaaagaagagtaagaagaaatataagagccaccatggcccctaagaagaagcgtaaagtgagccggatggaacgcctcgtctacgaggtgcggcagaagtgcagaaacatcgaggacatctgcatctcctgcggatctctgaacgtgaccctggagcacccactgttcatcggcggcatgtgccagaactgtaaaaactgttttctggagtgtgcctatcaatacgacgatgacggctaccagagctactgcaccatctgttgcggcggaagagaggtgctgatgtgtggaaataacaactgctgccggtgcttctgcgtggaatgcgtggacctgctggtgggccccggcgccgcccaggccgctattaaggaagatccttggaactgctacatgtgcggccacaagggcacatacggcctgctgagacggagagaggactggcctagcagactgcagatgttcttcgccaataaccacgaccaggagttcgacccccctaaggtgtaccctcccgtccccgccgagaagagaaagcccatccgggtcctgagcctgttcgatggcatcgccaccggtctgctggtgctgaaggacctgggcatccaggtggataggtacattgcctccgaggtgtgcgaggactccatcaccgtgggaatggtgcgtcatcagggcaagatcatgtacgtgggcgacgtgcggagcgtgacacagaagcatatccaggagtggggccctttcgacctggtgatcggcggcagcccttgcaatgacctgagcatcgtgaacccagcccggaagggcctgtacgagggaaccggcagactgttcttcgagttttacagactgctgcacgacgcccggcctaaggaaggcgacgaccggcccttcttttggctgttcgagaatgtggtggccatgggagtcagcgacaagcgggatattagccggttcctggagagcaaccccgtgatgatcgatgccaaggaagtgagcgccgcccaccgggccagatacttctggggcaatctgcctggcatgaacagacccctggccagcaccgtgaacgacaagctggagctgcaggagtgcctggagcacggccggatcgccaagttcagcaaggtgagaaccatcaccacccgaagcaacagcatcaaacaaggcaaggaccagcactttcctgtgttcatgaacgagaaggaggacatcctgtggtgtaccgagatggagagagtgttcgggttcccagtccactacacagatgtcagcaacatgtctagactggccagacagagactgctgggaagaagctggtccgtccctgtgatcagacacctgttcgcccctctgaaggagtacttcgcctgcgtgagcagcggcaacagcaacgccaacagccggggccccagcttctctagcggcctggtgccactgtccctgagagggagccacatgggccccatggagatctacaaaaccgtgagcgcctggaagcggcagcctgtgcgcgtgctgagcctgtttcggaatatcgataaagtcctgaaaagcctgggattcctggagagcggctctggctccggcggtggcaccctgaagtacgtggaggatgtgacaaacgtggtcagacgggatgtggagaagtggggccccttcgatctggtgtacggcagcacccaacccctgggcagctcttgtgaccggtgccctggctggtacatgtttcagttccaccggatcctgcagtacgccctgccgagacaggagtcccagcggccattcttttggattttcatggacaacttgctgctgaccgaggatgaccaggaaactaccactcggttcctgcagaccgaagccgtgaccctgcaggacgtgagaggccgggactaccagaacgccatgcgggtgtggtccaacatccctggactgaaaagcaagcacgcacctctgacccctaaagaagaggagtacctgcaggcccaggtgcggagcagaagcaagctggacgcccctaaggtggatctgctggtgaagaattgcctcctgcccctgagagagtacttcaagtatttcagccagaatagtctgcccctgggaggcagcggcggcggcgccctggtgacatttgaggacgtcgccgtgcggttcacccaggaggaatgggctctgctggatccttctcagaaaatcctgtaccgggacgtgatgagagagacataccggaatctgacctccgtgggcatcaactgggaatgttgggaccttgaagcctgcttcagaagcctgggaagaaacctgagagtgcaggtggtgaagagaaagtgcgagctgaccaacagcggcccctgcgccgagggcggcccaagcagcggcgcccctcctcccagcggcggcagcccagccggctccccaacctctaccgaggagggcacctctgagtccgccacccccgagagcggccctggcacctccaccgagcccagcgagggcagcgcacccggcagccctgccggcagccccacctccacagaggagggaaccagcaccgagcccagcgaaggcagcgccccaggcaccagcaccgagcctagtgagcaggagattaaacggatcaacaagatcagaagaagacttgtgaaagacagcaacaccaagaaggccggcaagacaggccccatgaaaaccctgctggttagagtgatgacacccgatctgagagagcggctggaaaacctgagaaagaagcctgaaaatatcccccagcccatcagcaatacatctagagccaacctgaataagctgctgaccgattacaccgaaatgaagaaggcgatcctgcatgtgtactgggaagagttccagaaggaccctgtgggcctgatgagccgggtggcccagcctgccagcaagaagatcgatcagaacaagctgaaacctgagatggacgagaagggcaacctgaccaccgccggctttgcctgctctcagtgtggccagcccctgttcgtgtacaagctggagcaggtgtctgagaagggcaaggcttacaccaactacttcggacggtgcaatgtggccgagcacgaaaagctgatcctgctggcccagctgaagcccgagaaggatagcgacgaagccgtgacatatagcctgggaaagtttgggcagagggccctggatttctacagcattcatgtgaccaaggagtccacccaccccgtgaagcccctggcccagatcgccggaaacagatacgcctccggacctgtgggaaaggccctgagcgacgcatgtatgggcacaatcgcctccttcctgtctaagtaccaggacatcatcatcgaacaccagaaggtggtgaagggcaaccagaagagactggagagcctgcgggagctggccggcaaggaaaacctggaataccctagcgtgaccctgccacctcagcctcacaccaaggagggcgttgatgcctacaacgaagtgatcgcccgggtgcgaatgtgggtgaacctgaacctgtggcagaagctgaagctaagcagagatgatgccaagcctctgctgagactgaagggattcccttcctttcctctggtcgagagacaggccaacgaagtggactggtgggacatggtgtgtaacgtgaagaagctgatcaacgagaaaaaggaggatggcaaggtgttttggcagaatctggctggctacaagagacaggaagccctgagaccatacctgagcagcgaggaagatcggaagaagggaaagaaattcgctcggtaccagctgggcgacctgctgctgcacctggaaaagaagcacggcgaggactggggaaaggtgtacgacgaggcctgggagcggattgacaagaaagtggaaggcctgagcaagcacatcaagctggaagaggaacggagaagcgaggacgcccagagcaaggccgccctgaccgactggctgcgggctaaggccagcttcgtgatcgagggcctgaaggaggccgacaaggacgagttctgcagatgcgagctgaagctgcagaagtggtacggggacctgcggggaaagcccttcgccatcgaagccgagaacagcatcctggacatcagcggcttcagcaagcagtacaactgtgccttcatctggcagaaggacggcgtgaagaagctgaacctgtacctgatcatcaactacttcaagggcggcaagctgcggttcaagaagatcaaacctgaagccttcgaagccaacagattctacaccgtgatcaacaaaaagagcggcgagatcgtgcccatggaggtgaacttcaacttcgacgaccccaacctgatcatcctgcctctggcctttggcaagagacagggcagagaattcatctggaacgacctgctgtccctggaaaccggcagcctgaagctggccaacggaagagtgatcgagaagacactgtacaacagaagaacccggcaggatgagcctgccctgttcgtggccctgaccttcgagcggcgggaggtcctggactcctccaatatcaaaccaatgaacctgatcggcgtggcaagaggcgaaaacatccccgccgtgatcgccctgaccgaccccgagggctgcccactgagccggtttaaggatagcctgggaaacccaacccacatcctgagaatcggcgagagctataaggagaagcagcggaccatccaggccaagaaggaggtggagcagcggagagccggcggctacagccggaagtacgccagcaaagccaagaatctggcagacgatatggtgagaaacaccgctagagatctgctgtactacgccgtgacccaggatgccatgctgatcttcgccaacctgagccggggcttcggccggcagggcaagcggaccttcatggccgagagacagtacacacggatggaggactggctgaccgccaagctggcctacgagggcctgagcaagacctacctgtccaagacactggcccagtacacctccaagacatgcagcaactgtgggtttaccatcaccagcgccgactacgacagggtgctggagaagctgaagaagacagcaacaggctggatgaccacaattaacggcaaggagctgaaggtggagggccagattacctactacaacagatacaagagacagaacgtagtcaaggacctgtccgtcgagctggatagactgagcgaagaatctgtgaacaacgacatctcctcctggacaaagggcagaagcggagaagctctgagcctcctgaagaaaagattctcccatagacccgtgcaggagaagttcgtgtgcctgaactgcggcttcgagacacacgcagccgagcaagccgccctgaacatcgccagatcctggctgttcctgcggagccaggagtacaagaaataccagacaaacaagacaaccggcaacaccgataagagagccttcgtcgagacctggcagtccttttaccggaagaagcttaaggaggtgtggaaacctgccgtgcggtctggcggatctggcggaggctccctgcaggagcccctggagttcatggacgtggccatcgagttcagcctggaggagtggcactgcctggacaccgcccagaggaacctgtacagggacgtgatgctggagaactacaggaacctggtgttcctgggcatcgtggtgagcaagcccgacctgatcacctggctggagcagggcaagaagcccctgaccgtgaagaggaggggcatgatcgccgccccccccggcatgagcagccacggcggcccaagcagcggcgcccctcctcccagcggcggcagcccagccggctccccaacctctaccgaggagggcacctctgagtccgccacccccgagagcggccctggcacctccaccgagcccagcgagggcagcgcacccggcagccctgccggcagccccacctccacagaggagggaaccagcaccgagcccagcgaaggcagcgccccaggcaccagcaccgagcctagtgagcaggagattaaacggatcaacaagatcagaagaagacttgtgaaagacagcaacaccaagaaggccggcaagacaggccccatgaaaaccctgctggttagagtgatgacacccgatctgagagagcggctggaaaacctgagaaagaagcctgaaaatatcccccagcccatcagcaatacatctagagccaacctgaataagctgctgaccgattacaccgaaatgaagaaggcgatcctgcatgtgtactgggaagagttccagaaggaccctgtgggcctgatgagccgggtggcccagcctgccagcaagaagatcgatcagaacaagctgaaacctgagatggacgagaagggcaacctgaccaccgccggctttgcctgctctcagtgtggccagcccctgttcgtgtacaagctggagcaggtgtctgagaagggcaaggcttacaccaactacttcggacggtgcaatgtggccgagcacgaaaagctgatcctgctggcccagctgaagcccgagaaggatagcgacgaagccgtgacatatagcctgggaaagtttgggcagagggccctggatttctacagcattcatgtgaccaaggagtccacccaccccgtgaagcccctggcccagatcgccggaaacagatacgcctccggacctgtgggaaaggccctgagcgacgcatgtatgggcacaatcgcctccttcctgtctaagtaccaggacatcatcatcgaacaccagaaggtggtgaagggcaaccagaagagactggagagcctgcgggagctggccggcaaggaaaacctggaataccctagcgtgaccctgccacctcagcctcacaccaaggagggcgttgatgcctacaacgaagtgatcgcccgggtgcgaatgtgggtgaacctgaacctgtggcagaagctgaagctaagcagagatgatgccaagcctctgctgagactgaagggattcccttcctttcctctggtcgagagacaggccaacgaagtggactggtgggacatggtgtgtaacgtgaagaagctgatcaacgagaaaaaggaggatggcaaggtgttttggcagaatctggctggctacaagagacaggaagccctgagaccatacctgagcagcgaggaagatcggaagaagggaaagaaattcgctcggtaccagctgggcgacctgctgctgcacctggaaaagaagcacggcgaggactggggaaaggtgtacgacgaggcctgggagcggattgacaagaaagtggaaggcctgagcaagcacatcaagctggaagaggaacggagaagcgaggacgcccagagcaaggccgccctgaccgactggctgcgggctaaggccagcttcgtgatcgagggcctgaaggaggccgacaaggacgagttctgcagatgcgagctgaagctgcagaagtggtacggggacctgcggggaaagcccttcgccatcgaagccgagaacagcatcctggacatcagcggcttcagcaagcagtacaactgtgccttcatctggcagaaggacggcgtgaagaagctgaacctgtacctgatcatcaactacttcaagggcggcaagctgcggttcaagaagatcaaacctgaagccttcgaagccaacagattctacaccgtgatcaacaaaaagagcggcgagatcgtgcccatggaggtgaacttcaacttcgacgaccccaacctgatcatcctgcctctggcctttggcaagagacagggcagagaattcatctggaacgacctgctgtccctggaaaccggcagcctgaagctggccaacggaagagtgatcgagaagacactgtacaacagaagaacccggcaggatgagcctgccctgttcgtggccctgaccttcgagcggcgggaggtcctggactcctccaatatcaaaccaatgaacctgatcggcgtggcaagaggcgaaaacatccccgccgtgatcgccctgaccgaccccgagggctgcccactgagccggtttaaggatagcctgggaaacccaacccacatcctgagaatcggcgagagctataaggagaagcagcggaccatccaggccaagaaggaggtggagcagcggagagccggcggctacagccggaagtacgccagcaaagccaagaatctggcagacgatatggtgagaaacaccgctagagatctgctgtactacgccgtgacccaggatgccatgctgatcttcgccaacctgagccggggcttcggccggcagggcaagcggaccttcatggccgagagacagtacacacggatggaggactggctgaccgccaagctggcctacgagggcctgagcaagacctacctgtccaagacactggcccagtacacctccaagacatgcagcaactgtgggtttaccatcaccagcgccgactacgacagggtgctggagaagctgaagaagacagcaacaggctggatgaccacaattaacggcaaggagctgaaggtggagggccagattacctactacaacagatacaagagacagaacgtagtcaaggacctgtccgtcgagctggatagactgagcgaagaatctgtgaacaacgacatctcctcctggacaaagggcagaagcggagaagctctgagcctcctgaagaaaagattctcccatagacccgtgcaggagaagttcgtgtgcctgaactgcggcttcgagacacacgcagccgagcaagccgccctgaacatcgccagatcctggctgttcctgcggagccaggagtacaagaaataccagacaaacaagacaaccggcaacaccgataagagagccttcgtcgagacctggcagtccttttaccggaagaagcttaaggaggtgtggaaacctgccgtgcggtctggcggatctggcggaggctcctctgcaggagcccctggagttcatggacgtggccatcgagttcagcctggaggagtggcactgcctggacaccgcccagaggaacctgtacagggacgtgatgctggagaactacaggaacctggtgttcctgggcatcgtggtgagcaagcccgacctgatcacctggctggagcagggcaagaagcccctgaccgtgaagaggaggggcatgatcgccgccccccccggcatgagcagccacggatctggctccggcagcggccccaagaaaaagagaaaagtctaagctgccttctgcggggcttgccttctggccatgcccttcttctctcccttgcacctgtacctcttggtctttgaataaagcctgagtaggaaggctagcaaaaaaaaaaaaaaaaaaaaaaaaaaaaaaaaaaaaaaaaaaaaaaaaaaaaaaaaaaaaaaaaaaaaaaaaaaaaaaaa

SEQ ID NO: 16616 - RNA, 9485 nt, synthetic construct
  source 1..9485: mol_type = other RNA
aggaaataagagagaaaagaagagtaagaagaaatataagagccaccatggcccctaagaagaagcgtaaagtgagccggatggaacgcctcgtctacgaggtgcggcagaagtgcagaaacatcgaggacatctgcatctcctgcggatctctgaacgtgaccctggagcacccactgttcatcggcggcatgtgccagaactgtaaaaactgttttctggagtgtgcctatcaatacgacgatgacggctaccagagctactgcaccatctgttgcggcggaagagaggtgctgatgtgtggaaataacaactgctgccggtgcttctgcgtggaatgcgtggacctgctggtgggccccggcgccgcccaggccgctattaaggaagatccttggaactgctacatgtgcggccacaagggcacatacggcctgctgagacggagagaggactggcctagcagactgcagatgttcttcgccaataaccacgaccaggagttcgacccccctaaggtgtaccctcccgtccccgccgagaagagaaagcccatccgggtcctgagcctgttcgatggcatcgccaccggtctgctggtgctgaaggacctgggcatccaggtggataggtacattgcctccgaggtgtgcgaggactccatcaccgtgggaatggtgcgtcatcagggcaagatcatgtacgtgggcgacgtgcggagcgtgacacagaagcatatccaggagtggggccctttcgacctggtgatcggcggcagcccttgcaatgacctgagcatcgtgaacccagcccggaagggcctgtacgagggaaccggcagactgttcttcgagttttacagactgctgcacgacgcccggcctaaggaaggcgacgaccggcccttcttttggctgttcgagaatgtggtggccatgggagtcagcgacaagcgggatattagccggttcctggagagcaaccccgtgatgatcgatgccaaggaagtgagcgccgcccaccgggccagatacttctggggcaatctgcctggcatgaacagacccctggccagcaccgtgaacgacaagctggagctgcaggagtgcctggagcacggccggatcgccaagttcagcaaggtgagaaccatcaccacccgaagcaacagcatcaaacaaggcaaggaccagcactttcctgtgttcatgaacgagaaggaggacatcctgtggtgtaccgagatggagagagtgttcgggttcccagtccactacacagatgtcagcaacatgtctagactggccagacagagactgctgggaagaagctggtccgtccctgtgatcagacacctgttcgcccctctgaaggagtacttcgcctgcgtgagcagcggcaacagcaacgccaacagccggggccccagcttctctagcggcctggtgccactgtccctgagagggagccacatgggccccatggagatctacaaaaccgtgagcgcctggaagcggcagcctgtgcgcgtgctgagcctgtttcggaatatcgataaagtcctgaaaagcctgggattcctggagagcggctctggctccggcggtggcaccctgaagtacgtggaggatgtgacaaacgtggtcagacgggatgtggagaagtggggccccttcgatctggtgtacggcagcacccaacccctgggcagctcttgtgaccggtgccctggctggtacatgtttcagttccaccggatcctgcagtacgccctgccgagacaggagtcccagcggccattcttttggattttcatggacaacttgctgctgaccgaggatgaccaggaaactaccactcggttcctgcagaccgaagccgtgaccctgcaggacgtgagaggccgggactaccagaacgccatgcgggtgtggtccaacatccctggactgaaaagcaagcacgcacctctgacccctaaagaagaggagtacctgcaggcccaggtgcggagcagaagcaagctggacgcccctaaggtggatctgctggtgaagaattgcctcctgcccctgagagagtacttcaagtatttcagccagaatagtctgcccctgggaggcagcggcggcggcgccctggtgacatttgaggacgtcgccgtgcggttcacccaggaggaatgggctctgctggatccttctcagaaaatcctgtaccgggacgtgatgagagagacataccggaatctgacctccgtgggcatcaactgggaatgttgggaccttgaagcctgcttcagaagcctgggaagaaacctgagagtgcaggtggtgaagagaaagtgcgagctgaccaacagcggcccctgcgccgagggcggcccaagcagcggcgcccctcctcccagcggcggcagcccagccggctccccaacctctaccgaggagggcacctctgagtccgccacccccgagagcggccctggcacctccaccgagcccagcgagggcagcgcacccggcagccctgccggcagccccacctccacagaggagggaaccagcaccgagcccagcgaaggcagcgccccaggcaccagcaccgagcctagtgagcaggagattaaacggatcaacaagatcagaagaagacttgtgaaagacagcaacaccaagaaggccggcaagacaggccccatgaaaaccctgctggttagagtgatgacacccgatctgagagagcggctggaaaacctgagaaagaagcctgaaaatatcccccagcccatcagcaatacatctagagccaacctgaataagctgctgaccgattacaccgaaatgaagaaggcgatcctgcatgtgtactgggaagagttccagaaggaccctgtgggcctgatgagccgggtggcccagcctgccagcaagaagatcgatcagaacaagctgaaacctgagatggacgagaagggcaacctgaccaccgccggctttgcctgctctcagtgtggccagcccctgttcgtgtacaagctggagcaggtgtctgagaagggcaaggcttacaccaactacttcggacggtgcaatgtggccgagcacgaaaagctgatcctgctggcccagctgaagcccgagaaggatagcgacgaagccgtgacatatagcctgggaaagtttgggcagagggccctggatttctacagcattcatgtgaccaaggagtccacccaccccgtgaagcccctggcccagatcgccggaaacagatacgcctccggacctgtgggaaaggccctgagcgacgcatgtatgggcacaatcgcctccttcctgtctaagtaccaggacatcatcatcgaacaccagaaggtggtgaagggcaaccagaagagactggagagcctgcgggagctggccggcaaggaaaacctggaataccctagcgtgaccctgccacctcagcctcacaccaaggagggcgttgatgcctacaacgaagtgatcgcccgggtgcgaatgtgggtgaacctgaacctgtggcagaagctgaagctaagcagagatgatgccaagcctctgctgagactgaagggattcccttcctttcctctggtcgagagacaggccaacgaagtggactggtgggacatggtgtgtaacgtgaagaagctgatcaacgagaaaaaggaggatggcaaggtgttttggcagaatctggctggctacaagagacaggaagccctgagaccatacctgagcagcgaggaagatcggaagaagggaaagaaattcgctcggtaccagctgggcgacctgctgctgcacctggaaaagaagcacggcgaggactggggaaaggtgtacgacgaggcctgggagcggattgacaagaaagtggaaggcctgagcaagcacatcaagctggaagaggaacggagaagcgaggacgcccagagcaaggccgccctgaccgactggctgcgggctaaggccagcttcgtgatcgagggcctgaaggaggccgacaaggacgagttctgcagatgcgagctgaagctgcagaagtggtacggggacctgcggggaaagcccttcgccatcgaagccgagaacagcatcctggacatcagcggcttcagcaagcagtacaactgtgccttcatctggcagaaggacggcgtgaagaagctgaacctgtacctgatcatcaactacttcaagggcggcaagctgcggttcaagaagatcaaacctgaagccttcgaagccaacagattctacaccgtgatcaacaaaaagagcggcgagatcgtgcccatggaggtgaacttcaacttcgacgaccccaacctgatcatcctgcctctggcctttggcaagagacagggcagagaattcatctggaacgacctgctgtccctggaaaccggcagcctgaagctggccaacggaagagtgatcgagaagacactgtacaacagaagaacccggcaggatgagcctgccctgttcgtggccctgaccttcgagcggcgggaggtcctggactcctccaatatcaaaccaatgaacctgatcggcgtggcaagaggcgaaaacatccccgccgtgatcgccctgaccgaccccgagggctgcccactgagccggtttaaggatagcctgggaaacccaacccacatcctgagaatcggcgagagctataaggagaagcagcggaccatccaggccaagaaggaggtggagcagcggagagccggcggctacagccggaagtacgccagcaaagccaagaatctggcagacgatatggtgagaaacaccgctagagatctgctgtactacgccgtgacccaggatgccatgctgatcttcgccaacctgagccggggcttcggccggcagggcaagcggaccttcatggccgagagacagtacacacggatggaggactggctgaccgccaagctggcctacgagggcctgagcaagacctacctgtccaagacactggcccagtacacctccaagacatgcagcaactgtgggtttaccatcaccagcgccgactacgacagggtgctggagaagctgaagaagacagcaacaggctggatgaccacaattaacggcaaggagctgaaggtggagggccagattacctactacaacagatacaagagacagaacgtagtcaaggacctgtccgtcgagctggatagactgagcgaagaatctgtgaacaacgacatctcctcctggacaaagggcagaagcggagaagctctgagcctcctgaagaaaagattctcccatagacccgtgcaggagaagttcgtgtgcctgaactgcggcttcgagacacacgcagccgagcaagccgccctgaacatcgccagatcctggctgttcctgcggagccaggagtacaagaaataccagacaaacaagacaaccggcaacaccgataagagagccttcgtcgagacctggcagtccttttaccggaagaagcttaaggaggtgtggaaacctgccgtgcggtctggcggatctggcggaggctcccagatgcccatcaagttcgaggacatcgccgtgagcttcagccaggaggagtgggagtacctgaacgaggagcagaaggagctgtacagggaggtgatgaaggagaactaccagaccctgatcagcctgggcaccggcagcccccccgtgacccccgacatcatcagccacatcgagaggggcgaggagccctacatcagggaggagcccggcagcgaggagagggagcccggcaggagcagcggcggcccaagcagcggcgcccctcctcccagcggcggcagcccagccggctccccaacctctaccgaggagggcacctctgagtccgccacccccgagagcggccctggcacctccaccgagcccagcgagggcagcgcacccggcagccctgccggcagccccacctccacagaggagggaaccagcaccgagcccagcgaaggcagcgccccaggcaccagcaccgagcctagtgagcaggagattaaacggatcaacaagatcagaagaagacttgtgaaagacagcaacaccaagaaggccggcaagacaggccccatgaaaaccctgctggttagagtgatgacacccgatctgagagagcggctggaaaacctgagaaagaagcctgaaaatatcccccagcccatcagcaatacatctagagccaacctgaataagctgctgaccgattacaccgaaatgaagaaggcgatcctgcatgtgtactgggaagagttccagaaggaccctgtgggcctgatgagccgggtggcccagcctgccagcaagaagatcgatcagaacaagctgaaacctgagatggacgagaagggcaacctgaccaccgccggctttgcctgctctcagtgtggccagcccctgttcgtgtacaagctggagcaggtgtctgagaagggcaaggcttacaccaactacttcggacggtgcaatgtggccgagcacgaaaagctgatcctgctggcccagctgaagcccgagaaggatagcgacgaagccgtgacatatagcctgggaaagtttgggcagagggccctggatttctacagcattcatgtgaccaaggagtccacccaccccgtgaagcccctggcccagatcgccggaaacagatacgcctccggacctgtgggaaaggccctgagcgacgcatgtatgggcacaatcgcctccttcctgtctaagtaccaggacatcatcatcgaacaccagaaggtggtgaagggcaaccagaagagactggagagcctgcgggagctggccggcaaggaaaacctggaataccctagcgtgaccctgccacctcagcctcacaccaaggagggcgttgatgcctacaacgaagtgatcgcccgggtgcgaatgtgggtgaacctgaacctgtggcagaagctgaagctaagcagagatgatgccaagcctctgctgagactgaagggattcccttcctttcctctggtcgagagacaggccaacgaagtggactggtgggacatggtgtgtaacgtgaagaagctgatcaacgagaaaaaggaggatggcaaggtgttttggcagaatctggctggctacaagagacaggaagccctgagaccatacctgagcagcgaggaagatcggaagaagggaaagaaattcgctcggtaccagctgggcgacctgctgctgcacctggaaaagaagcacggcgaggactggggaaaggtgtacgacgaggcctgggagcggattgacaagaaagtggaaggcctgagcaagcacatcaagctggaagaggaacggagaagcgaggacgcccagagcaaggccgccctgaccgactggctgcgggctaaggccagcttcgtgatcgagggcctgaaggaggccgacaaggacgagttctgcagatgcgagctgaagctgcagaagtggtacggggacctgcggggaaagcccttcgccatcgaagccgagaacagcatcctggacatcagcggcttcagcaagcagtacaactgtgccttcatctggcagaaggacggcgtgaagaagctgaacctgtacctgatcatcaactacttcaagggcggcaagctgcggttcaagaagatcaaacctgaagccttcgaagccaacagattctacaccgtgatcaacaaaaagagcggcgagatcgtgcccatggaggtgaacttcaacttcgacgaccccaacctgatcatcctgcctctggcctttggcaagagacagggcagagaattcatctggaacgacctgctgtccctggaaaccggcagcctgaagctggccaacggaagagtgatcgagaagacactgtacaacagaagaacccggcaggatgagcctgccctgttcgtggccctgaccttcgagcggcgggaggtcctggactcctccaatatcaaaccaatgaacctgatcggcgtggcaagaggcgaaaacatccccgccgtgatcgccctgaccgaccccgagggctgcccactgagccggtttaaggatagcctgggaaacccaacccacatcctgagaatcggcgagagctataaggagaagcagcggaccatccaggccaagaaggaggtggagcagcggagagccggcggctacagccggaagtacgccagcaaagccaagaatctggcagacgatatggtgagaaacaccgctagagatctgctgtactacgccgtgacccaggatgccatgctgatcttcgccaacctgagccggggcttcggccggcagggcaagcggaccttcatggccgagagacagtacacacggatggaggactggctgaccgccaagctggcctacgagggcctgagcaagacctacctgtccaagacactggcccagtacacctccaagacatgcagcaactgtgggtttaccatcaccagcgccgactacgacagggtgctggagaagctgaagaagacagcaacaggctggatgaccacaattaacggcaaggagctgaaggtggagggccagattacctactacaacagatacaagagacagaacgtagtcaaggacctgtccgtcgagctggatagactgagcgaagaatctgtgaacaacgacatctcctcctggacaaagggcagaagcggagaagctctgagcctcctgaagaaaagattctcccatagacccgtgcaggagaagttcgtgtgcctgaactgcggcttcgagacacacgcagccgagcaagccgccctgaacatcgccagatcctggctgttcctgcggagccaggagtacaagaaataccagacaaacaagacaaccggcaacaccgataagagagccttcgtcgagacctggcagtccttttaccggaagaagcttaaggaggtgtggaaacctgccgtgcggtctggcggatctggcggaggctcctcagatgcccatcaagttcgaggacatcgccgtgagcttcagccaggaggagtgggagtacctgaacgaggagcagaaggagctgtacagggaggtgatgaaggagaactaccagaccctgatcagcctgggcaccggcagcccccccgtgacccccgacatcatcagccacatcgagaggggcgaggagccctacatcagggaggagcccggcagcgaggagagggagcccggcaggagcagcggatctggctccggcagcggccccaagaaaaagagaaaagtctaagctgccttctgcggggcttgccttctggccatgcccttcttctctcccttgcacctgtacctcttggtctttgaataaagcctgagtaggaaggctagcaaaaaaaaaaaaaaaaaaaaaaaaaaaaaaaaaaaaaaaaaaaaaaaaaaaaaaaaaaaaaaaaaaaaaaaaaaaaaaaa

SEQ ID NO: 16617 - RNA, 9485 nt, synthetic construct
  source 1..9485: mol_type = other RNA
aggaaataagagagaaaagaagagtaagaagaaatataagagccaccatggcccctaagaagaagcgtaaagtgagccggatggaacgcctcgtctacgaggtgcggcagaagtgcagaaacatcgaggacatctgcatctcctgcggatctctgaacgtgaccctggagcacccactgttcatcggcggcatgtgccagaactgtaaaaactgttttctggagtgtgcctatcaatacgacgatgacggctaccagagctactgcaccatctgttgcggcggaagagaggtgctgatgtgtggaaataacaactgctgccggtgcttctgcgtggaatgcgtggacctgctggtgggccccggcgccgcccaggccgctattaaggaagatccttggaactgctacatgtgcggccacaagggcacatacggcctgctgagacggagagaggactggcctagcagactgcagatgttcttcgccaataaccacgaccaggagttcgacccccctaaggtgtaccctcccgtccccgccgagaagagaaagcccatccgggtcctgagcctgttcgatggcatcgccaccggtctgctggtgctgaaggacctgggcatccaggtggataggtacattgcctccgaggtgtgcgaggactccatcaccgtgggaatggtgcgtcatcagggcaagatcatgtacgtgggcgacgtgcggagcgtgacacagaagcatatccaggagtggggccctttcgacctggtgatcggcggcagcccttgcaatgacctgagcatcgtgaacccagcccggaagggcctgtacgagggaaccggcagactgttcttcgagttttacagactgctgcacgacgcccggcctaaggaaggcgacgaccggcccttcttttggctgttcgagaatgtggtggccatgggagtcagcgacaagcgggatattagccggttcctggagagcaaccccgtgatgatcgatgccaaggaagtgagcgccgcccaccgggccagatacttctggggcaatctgcctggcatgaacagacccctggccagcaccgtgaacgacaagctggagctgcaggagtgcctggagcacggccggatcgccaagttcagcaaggtgagaaccatcaccacccgaagcaacagcatcaaacaaggcaaggaccagcactttcctgtgttcatgaacgagaaggaggacatcctgtggtgtaccgagatggagagagtgttcgggttcccagtccactacacagatgtcagcaacatgtctagactggccagacagagactgctgggaagaagctggtccgtccctgtgatcagacacctgttcgcccctctgaaggagtacttcgcctgcgtgagcagcggcaacagcaacgccaacagccggggccccagcttctctagcggcctggtgccactgtccctgagagggagccacatgggccccatggagatctacaaaaccgtgagcgcctggaagcggcagcctgtgcgcgtgctgagcctgtttcggaatatcgataaagtcctgaaaagcctgggattcctggagagcggctctggctccggcggtggcaccctgaagtacgtggaggatgtgacaaacgtggtcagacgggatgtggagaagtggggccccttcgatctggtgtacggcagcacccaacccctgggcagctcttgtgaccggtgccctggctggtacatgtttcagttccaccggatcctgcagtacgccctgccgagacaggagtcccagcggccattcttttggattttcatggacaacttgctgctgaccgaggatgaccaggaaactaccactcggttcctgcagaccgaagccgtgaccctgcaggacgtgagaggccgggactaccagaacgccatgcgggtgtggtccaacatccctggactgaaaagcaagcacgcacctctgacccctaaagaagaggagtacctgcaggcccaggtgcggagcagaagcaagctggacgcccctaaggtggatctgctggtgaagaattgcctcctgcccctgagagagtacttcaagtatttcagccagaatagtctgcccctgggaggcagcggcggcggcgccctggtgacatttgaggacgtcgccgtgcggttcacccaggaggaatgggctctgctggatccttctcagaaaatcctgtaccgggacgtgatgagagagacataccggaatctgacctccgtgggcatcaactgggaatgttgggaccttgaagcctgcttcagaagcctgggaagaaacctgagagtgcaggtggtgaagagaaagtgcgagctgaccaacagcggcccctgcgccgagggcggcccaagcagcggcgcccctcctcccagcggcggcagcccagccggctccccaacctctaccgaggagggcacctctgagtccgccacccccgagagcggccctggcacctccaccgagcccagcgagggcagcgcacccggcagccctgccggcagccccacctccacagaggagggaaccagcaccgagcccagcgaaggcagcgccccaggcaccagcaccgagcctagtgagcaggagattaaacggatcaacaagatcagaagaagacttgtgaaagacagcaacaccaagaaggccggcaagacaggccccatgaaaaccctgctggttagagtgatgacacccgatctgagagagcggctggaaaacctgagaaagaagcctgaaaatatcccccagcccatcagcaatacatctagagccaacctgaataagctgctgaccgattacaccgaaatgaagaaggcgatcctgcatgtgtactgggaagagttccagaaggaccctgtgggcctgatgagccgggtggcccagcctgccagcaagaagatcgatcagaacaagctgaaacctgagatggacgagaagggcaacctgaccaccgccggctttgcctgctctcagtgtggccagcccctgttcgtgtacaagctggagcaggtgtctgagaagggcaaggcttacaccaactacttcggacggtgcaatgtggccgagcacgaaaagctgatcctgctggcccagctgaagcccgagaaggatagcgacgaagccgtgacatatagcctgggaaagtttgggcagagggccctggatttctacagcattcatgtgaccaaggagtccacccaccccgtgaagcccctggcccagatcgccggaaacagatacgcctccggacctgtgggaaaggccctgagcgacgcatgtatgggcacaatcgcctccttcctgtctaagtaccaggacatcatcatcgaacaccagaaggtggtgaagggcaaccagaagagactggagagcctgcgggagctggccggcaaggaaaacctggaataccctagcgtgaccctgccacctcagcctcacaccaaggagggcgttgatgcctacaacgaagtgatcgcccgggtgcgaatgtgggtgaacctgaacctgtggcagaagctgaagctaagcagagatgatgccaagcctctgctgagactgaagggattcccttcctttcctctggtcgagagacaggccaacgaagtggactggtgggacatggtgtgtaacgtgaagaagctgatcaacgagaaaaaggaggatggcaaggtgttttggcagaatctggctggctacaagagacaggaagccctgagaccatacctgagcagcgaggaagatcggaagaagggaaagaaattcgctcggtaccagctgggcgacctgctgctgcacctggaaaagaagcacggcgaggactggggaaaggtgtacgacgaggcctgggagcggattgacaagaaagtggaaggcctgagcaagcacatcaagctggaagaggaacggagaagcgaggacgcccagagcaaggccgccctgaccgactggctgcgggctaaggccagcttcgtgatcgagggcctgaaggaggccgacaaggacgagttctgcagatgcgagctgaagctgcagaagtggtacggggacctgcggggaaagcccttcgccatcgaagccgagaacagcatcctggacatcagcggcttcagcaagcagtacaactgtgccttcatctggcagaaggacggcgtgaagaagctgaacctgtacctgatcatcaactacttcaagggcggcaagctgcggttcaagaagatcaaacctgaagccttcgaagccaacagattctacaccgtgatcaacaaaaagagcggcgagatcgtgcccatggaggtgaacttcaacttcgacgaccccaacctgatcatcctgcctctggcctttggcaagagacagggcagagaattcatctggaacgacctgctgtccctggaaaccggcagcctgaagctggccaacggaagagtgatcgagaagacactgtacaacagaagaacccggcaggatgagcctgccctgttcgtggccctgaccttcgagcggcgggaggtcctggactcctccaatatcaaaccaatgaacctgatcggcgtggcaagaggcgaaaacatccccgccgtgatcgccctgaccgaccccgagggctgcccactgagccggtttaaggatagcctgggaaacccaacccacatcctgagaatcggcgagagctataaggagaagcagcggaccatccaggccaagaaggaggtggagcagcggagagccggcggctacagccggaagtacgccagcaaagccaagaatctggcagacgatatggtgagaaacaccgctagagatctgctgtactacgccgtgacccaggatgccatgctgatcttcgccaacctgagccggggcttcggccggcagggcaagcggaccttcatggccgagagacagtacacacggatggaggactggctgaccgccaagctggcctacgagggcctgagcaagacctacctgtccaagacactggcccagtacacctccaagacatgcagcaactgtgggtttaccatcaccagcgccgactacgacagggtgctggagaagctgaagaagacagcaacaggctggatgaccacaattaacggcaaggagctgaaggtggagggccagattacctactacaacagatacaagagacagaacgtagtcaaggacctgtccgtcgagctggatagactgagcgaagaatctgtgaacaacgacatctcctcctggacaaagggcagaagcggagaagctctgagcctcctgaagaaaagattctcccatagacccgtgcaggagaagttcgtgtgcctgaactgcggcttcgagacacacgcagccgagcaagccgccctgaacatcgccagatcctggctgttcctgcggagccaggagtacaagaaataccagacaaacaagacaaccggcaacaccgataagagagccttcgtcgagacctggcagtccttttaccggaagaagcttaaggaggtgtggaaacctgccgtgcggtctggcggatctggcggaggctccgtgtgcggcagcgtgaccttcaaggacgtggccgtggacttcagccaggaggagtgggcctgcctggacgccacccagaaggtgctgtacagggacatgatgctggagacctacagcaacctggtggccgtggtgggcaggtgcatcagcaagcccgacctgatcgtgctgctggagcaggagaaggagccctggatggccgtgaaggaggagaccgacaggcccagccccgacctggagagcggcggcccaagcagcggcgcccctcctcccagcggcggcagcccagccggctccccaacctctaccgaggagggcacctctgagtccgccacccccgagagcggccctggcacctccaccgagcccagcgagggcagcgcacccggcagccctgccggcagccccacctccacagaggagggaaccagcaccgagcccagcgaaggcagcgccccaggcaccagcaccgagcctagtgagcaggagattaaacggatcaacaagatcagaagaagacttgtgaaagacagcaacaccaagaaggccggcaagacaggccccatgaaaaccctgctggttagagtgatgacacccgatctgagagagcggctggaaaacctgagaaagaagcctgaaaatatcccccagcccatcagcaatacatctagagccaacctgaataagctgctgaccgattacaccgaaatgaagaaggcgatcctgcatgtgtactgggaagagttccagaaggaccctgtgggcctgatgagccgggtggcccagcctgccagcaagaagatcgatcagaacaagctgaaacctgagatggacgagaagggcaacctgaccaccgccggctttgcctgctctcagtgtggccagcccctgttcgtgtacaagctggagcaggtgtctgagaagggcaaggcttacaccaactacttcggacggtgcaatgtggccgagcacgaaaagctgatcctgctggcccagctgaagcccgagaaggatagcgacgaagccgtgacatatagcctgggaaagtttgggcagagggccctggatttctacagcattcatgtgaccaaggagtccacccaccccgtgaagcccctggcccagatcgccggaaacagatacgcctccggacctgtgggaaaggccctgagcgacgcatgtatgggcacaatcgcctccttcctgtctaagtaccaggacatcatcatcgaacaccagaaggtggtgaagggcaaccagaagagactggagagcctgcgggagctggccggcaaggaaaacctggaataccctagcgtgaccctgccacctcagcctcacaccaaggagggcgttgatgcctacaacgaagtgatcgcccgggtgcgaatgtgggtgaacctgaacctgtggcagaagctgaagctaagcagagatgatgccaagcctctgctgagactgaagggattcccttcctttcctctggtcgagagacaggccaacgaagtggactggtgggacatggtgtgtaacgtgaagaagctgatcaacgagaaaaaggaggatggcaaggtgttttggcagaatctggctggctacaagagacaggaagccctgagaccatacctgagcagcgaggaagatcggaagaagggaaagaaattcgctcggtaccagctgggcgacctgctgctgcacctggaaaagaagcacggcgaggactggggaaaggtgtacgacgaggcctgggagcggattgacaagaaagtggaaggcctgagcaagcacatcaagctggaagaggaacggagaagcgaggacgcccagagcaaggccgccctgaccgactggctgcgggctaaggccagcttcgtgatcgagggcctgaaggaggccgacaaggacgagttctgcagatgcgagctgaagctgcagaagtggtacggggacctgcggggaaagcccttcgccatcgaagccgagaacagcatcctggacatcagcggcttcagcaagcagtacaactgtgccttcatctggcagaaggacggcgtgaagaagctgaacctgtacctgatcatcaactacttcaagggcggcaagctgcggttcaagaagatcaaacctgaagccttcgaagccaacagattctacaccgtgatcaacaaaaagagcggcgagatcgtgcccatggaggtgaacttcaacttcgacgaccccaacctgatcatcctgcctctggcctttggcaagagacagggcagagaattcatctggaacgacctgctgtccctggaaaccggcagcctgaagctggccaacggaagagtgatcgagaagacactgtacaacagaagaacccggcaggatgagcctgccctgttcgtggccctgaccttcgagcggcgggaggtcctggactcctccaatatcaaaccaatgaacctgatcggcgtggcaagaggcgaaaacatccccgccgtgatcgccctgaccgaccccgagggctgcccactgagccggtttaaggatagcctgggaaacccaacccacatcctgagaatcggcgagagctataaggagaagcagcggaccatccaggccaagaaggaggtggagcagcggagagccggcggctacagccggaagtacgccagcaaagccaagaatctggcagacgatatggtgagaaacaccgctagagatctgctgtactacgccgtgacccaggatgccatgctgatcttcgccaacctgagccggggcttcggccggcagggcaagcggaccttcatggccgagagacagtacacacggatggaggactggctgaccgccaagctggcctacgagggcctgagcaagacctacctgtccaagacactggcccagtacacctccaagacatgcagcaactgtgggtttaccatcaccagcgccgactacgacagggtgctggagaagctgaagaagacagcaacaggctggatgaccacaattaacggcaaggagctgaaggtggagggccagattacctactacaacagatacaagagacagaacgtagtcaaggacctgtccgtcgagctggatagactgagcgaagaatctgtgaacaacgacatctcctcctggacaaagggcagaagcggagaagctctgagcctcctgaagaaaagattctcccatagacccgtgcaggagaagttcgtgtgcctgaactgcggcttcgagacacacgcagccgagcaagccgccctgaacatcgccagatcctggctgttcctgcggagccaggagtacaagaaataccagacaaacaagacaaccggcaacaccgataagagagccttcgtcgagacctggcagtccttttaccggaagaagcttaaggaggtgtggaaacctgccgtgcggtctggcggatctggcggaggctcctgtgtgcggcagcgtgaccttcaaggacgtggccgtggacttcagccaggaggagtgggcctgcctggacgccacccagaaggtgctgtacagggacatgatgctggagacctacagcaacctggtggccgtggtgggcaggtgcatcagcaagcccgacctgatcgtgctgctggagcaggagaaggagccctggatggccgtgaaggaggagaccgacaggcccagccccgacctggagagcggatctggctccggcagcggccccaagaaaaagagaaaagtctaagctgccttctgcggggcttgccttctggccatgcccttcttctctcccttgcacctgtacctcttggtctttgaataaagcctgagtaggaaggctagcaaaaaaaaaaaaaaaaaaaaaaaaaaaaaaaaaaaaaaaaaaaaaaaaaaaaaaaaaaaaaaaaaaaaaaaaaaaaaaaa

SEQ ID NO: 16618 - RNA, 9485 nt, synthetic construct
  source 1..9485: mol_type = other RNA
aggaaataagagagaaaagaagagtaagaagaaatataagagccaccatggcccctaagaagaagcgtaaagtgagccggatggaacgcctcgtctacgaggtgcggcagaagtgcagaaacatcgaggacatctgcatctcctgcggatctctgaacgtgaccctggagcacccactgttcatcggcggcatgtgccagaactgtaaaaactgttttctggagtgtgcctatcaatacgacgatgacggctaccagagctactgcaccatctgttgcggcggaagagaggtgctgatgtgtggaaataacaactgctgccggtgcttctgcgtggaatgcgtggacctgctggtgggccccggcgccgcccaggccgctattaaggaagatccttggaactgctacatgtgcggccacaagggcacatacggcctgctgagacggagagaggactggcctagcagactgcagatgttcttcgccaataaccacgaccaggagttcgacccccctaaggtgtaccctcccgtccccgccgagaagagaaagcccatccgggtcctgagcctgttcgatggcatcgccaccggtctgctggtgctgaaggacctgggcatccaggtggataggtacattgcctccgaggtgtgcgaggactccatcaccgtgggaatggtgcgtcatcagggcaagatcatgtacgtgggcgacgtgcggagcgtgacacagaagcatatccaggagtggggccctttcgacctggtgatcggcggcagcccttgcaatgacctgagcatcgtgaacccagcccggaagggcctgtacgagggaaccggcagactgttcttcgagttttacagactgctgcacgacgcccggcctaaggaaggcgacgaccggcccttcttttggctgttcgagaatgtggtggccatgggagtcagcgacaagcgggatattagccggttcctggagagcaaccccgtgatgatcgatgccaaggaagtgagcgccgcccaccgggccagatacttctggggcaatctgcctggcatgaacagacccctggccagcaccgtgaacgacaagctggagctgcaggagtgcctggagcacggccggatcgccaagttcagcaaggtgagaaccatcaccacccgaagcaacagcatcaaacaaggcaaggaccagcactttcctgtgttcatgaacgagaaggaggacatcctgtggtgtaccgagatggagagagtgttcgggttcccagtccactacacagatgtcagcaacatgtctagactggccagacagagactgctgggaagaagctggtccgtccctgtgatcagacacctgttcgcccctctgaaggagtacttcgcctgcgtgagcagcggcaacagcaacgccaacagccggggccccagcttctctagcggcctggtgccactgtccctgagagggagccacatgggccccatggagatctacaaaaccgtgagcgcctggaagcggcagcctgtgcgcgtgctgagcctgtttcggaatatcgataaagtcctgaaaagcctgggattcctggagagcggctctggctccggcggtggcaccctgaagtacgtggaggatgtgacaaacgtggtcagacgggatgtggagaagtggggccccttcgatctggtgtacggcagcacccaacccctgggcagctcttgtgaccggtgccctggctggtacatgtttcagttccaccggatcctgcagtacgccctgccgagacaggagtcccagcggccattcttttggattttcatggacaacttgctgctgaccgaggatgaccaggaaactaccactcggttcctgcagaccgaagccgtgaccctgcaggacgtgagaggccgggactaccagaacgccatgcgggtgtggtccaacatccctggactgaaaagcaagcacgcacctctgacccctaaagaagaggagtacctgcaggcccaggtgcggagcagaagcaagctggacgcccctaaggtggatctgctggtgaagaattgcctcctgcccctgagagagtacttcaagtatttcagccagaatagtctgcccctgggaggcagcggcggcggcgccctggtgacatttgaggacgtcgccgtgcggttcacccaggaggaatgggctctgctggatccttctcagaaaatcctgtaccgggacgtgatgagagagacataccggaatctgacctccgtgggcatcaactgggaatgttgggaccttgaagcctgcttcagaagcctgggaagaaacctgagagtgcaggtggtgaagagaaagtgcgagctgaccaacagcggcccctgcgccgagggcggcccaagcagcggcgcccctcctcccagcggcggcagcccagccggctccccaacctctaccgaggagggcacctctgagtccgccacccccgagagcggccctggcacctccaccgagcccagcgagggcagcgcacccggcagccctgccggcagccccacctccacagaggagggaaccagcaccgagcccagcgaaggcagcgccccaggcaccagcaccgagcctagtgagcaggagattaaacggatcaacaagatcagaagaagacttgtgaaagacagcaacaccaagaaggccggcaagacaggccccatgaaaaccctgctggttagagtgatgacacccgatctgagagagcggctggaaaacctgagaaagaagcctgaaaatatcccccagcccatcagcaatacatctagagccaacctgaataagctgctgaccgattacaccgaaatgaagaaggcgatcctgcatgtgtactgggaagagttccagaaggaccctgtgggcctgatgagccgggtggcccagcctgccagcaagaagatcgatcagaacaagctgaaacctgagatggacgagaagggcaacctgaccaccgccggctttgcctgctctcagtgtggccagcccctgttcgtgtacaagctggagcaggtgtctgagaagggcaaggcttacaccaactacttcggacggtgcaatgtggccgagcacgaaaagctgatcctgctggcccagctgaagcccgagaaggatagcgacgaagccgtgacatatagcctgggaaagtttgggcagagggccctggatttctacagcattcatgtgaccaaggagtccacccaccccgtgaagcccctggcccagatcgccggaaacagatacgcctccggacctgtgggaaaggccctgagcgacgcatgtatgggcacaatcgcctccttcctgtctaagtaccaggacatcatcatcgaacaccagaaggtggtgaagggcaaccagaagagactggagagcctgcgggagctggccggcaaggaaaacctggaataccctagcgtgaccctgccacctcagcctcacaccaaggagggcgttgatgcctacaacgaagtgatcgcccgggtgcgaatgtgggtgaacctgaacctgtggcagaagctgaagctaagcagagatgatgccaagcctctgctgagactgaagggattcccttcctttcctctggtcgagagacaggccaacgaagtggactggtgggacatggtgtgtaacgtgaagaagctgatcaacgagaaaaaggaggatggcaaggtgttttggcagaatctggctggctacaagagacaggaagccctgagaccatacctgagcagcgaggaagatcggaagaagggaaagaaattcgctcggtaccagctgggcgacctgctgctgcacctggaaaagaagcacggcgaggactggggaaaggtgtacgacgaggcctgggagcggattgacaagaaagtggaaggcctgagcaagcacatcaagctggaagaggaacggagaagcgaggacgcccagagcaaggccgccctgaccgactggctgcgggctaaggccagcttcgtgatcgagggcctgaaggaggccgacaaggacgagttctgcagatgcgagctgaagctgcagaagtggtacggggacctgcggggaaagcccttcgccatcgaagccgagaacagcatcctggacatcagcggcttcagcaagcagtacaactgtgccttcatctggcagaaggacggcgtgaagaagctgaacctgtacctgatcatcaactacttcaagggcggcaagctgcggttcaagaagatcaaacctgaagccttcgaagccaacagattctacaccgtgatcaacaaaaagagcggcgagatcgtgcccatggaggtgaacttcaacttcgacgaccccaacctgatcatcctgcctctggcctttggcaagagacagggcagagaattcatctggaacgacctgctgtccctggaaaccggcagcctgaagctggccaacggaagagtgatcgagaagacactgtacaacagaagaacccggcaggatgagcctgccctgttcgtggccctgaccttcgagcggcgggaggtcctggactcctccaatatcaaaccaatgaacctgatcggcgtggcaagaggcgaaaacatccccgccgtgatcgccctgaccgaccccgagggctgcccactgagccggtttaaggatagcctgggaaacccaacccacatcctgagaatcggcgagagctataaggagaagcagcggaccatccaggccaagaaggaggtggagcagcggagagccggcggctacagccggaagtacgccagcaaagccaagaatctggcagacgatatggtgagaaacaccgctagagatctgctgtactacgccgtgacccaggatgccatgctgatcttcgccaacctgagccggggcttcggccggcagggcaagcggaccttcatggccgagagacagtacacacggatggaggactggctgaccgccaagctggcctacgagggcctgagcaagacctacctgtccaagacactggcccagtacacctccaagacatgcagcaactgtgggtttaccatcaccagcgccgactacgacagggtgctggagaagctgaagaagacagcaacaggctggatgaccacaattaacggcaaggagctgaaggtggagggccagattacctactacaacagatacaagagacagaacgtagtcaaggacctgtccgtcgagctggatagactgagcgaagaatctgtgaacaacgacatctcctcctggacaaagggcagaagcggagaagctctgagcctcctgaagaaaagattctcccatagacccgtgcaggagaagttcgtgtgcctgaactgcggcttcgagacacacgcagccgagcaagccgccctgaacatcgccagatcctggctgttcctgcggagccaggagtacaagaaataccagacaaacaagacaaccggcaacaccgataagagagccttcgtcgagacctggcagtccttttaccggaagaagcttaaggaggtgtggaaacctgccgtgcggtctggcggatctggcggaggctccttccaggagagcctgaccttcaaggacgtggccgtggacttcacctacgaggagtggcagcagctgaaccccgaccagaggtacctgtacagggacgtgatgctggagaactacaagaacctggtgttcctgggccaccagatcagcaagcccgacgtgatcagccagctggagcagggcaaggagccctggcccatcgagagggagatcttcacctacagctgcagggactgggagaccaagggcggcccaagcagcggcgcccctcctcccagcggcggcagcccagccggctccccaacctctaccgaggagggcacctctgagtccgccacccccgagagcggccctggcacctccaccgagcccagcgagggcagcgcacccggcagccctgccggcagccccacctccacagaggagggaaccagcaccgagcccagcgaaggcagcgccccaggcaccagcaccgagcctagtgagcaggagattaaacggatcaacaagatcagaagaagacttgtgaaagacagcaacaccaagaaggccggcaagacaggccccatgaaaaccctgctggttagagtgatgacacccgatctgagagagcggctggaaaacctgagaaagaagcctgaaaatatcccccagcccatcagcaatacatctagagccaacctgaataagctgctgaccgattacaccgaaatgaagaaggcgatcctgcatgtgtactgggaagagttccagaaggaccctgtgggcctgatgagccgggtggcccagcctgccagcaagaagatcgatcagaacaagctgaaacctgagatggacgagaagggcaacctgaccaccgccggctttgcctgctctcagtgtggccagcccctgttcgtgtacaagctggagcaggtgtctgagaagggcaaggcttacaccaactacttcggacggtgcaatgtggccgagcacgaaaagctgatcctgctggcccagctgaagcccgagaaggatagcgacgaagccgtgacatatagcctgggaaagtttgggcagagggccctggatttctacagcattcatgtgaccaaggagtccacccaccccgtgaagcccctggcccagatcgccggaaacagatacgcctccggacctgtgggaaaggccctgagcgacgcatgtatgggcacaatcgcctccttcctgtctaagtaccaggacatcatcatcgaacaccagaaggtggtgaagggcaaccagaagagactggagagcctgcgggagctggccggcaaggaaaacctggaataccctagcgtgaccctgccacctcagcctcacaccaaggagggcgttgatgcctacaacgaagtgatcgcccgggtgcgaatgtgggtgaacctgaacctgtggcagaagctgaagctaagcagagatgatgccaagcctctgctgagactgaagggattcccttcctttcctctggtcgagagacaggccaacgaagtggactggtgggacatggtgtgtaacgtgaagaagctgatcaacgagaaaaaggaggatggcaaggtgttttggcagaatctggctggctacaagagacaggaagccctgagaccatacctgagcagcgaggaagatcggaagaagggaaagaaattcgctcggtaccagctgggcgacctgctgctgcacctggaaaagaagcacggcgaggactggggaaaggtgtacgacgaggcctgggagcggattgacaagaaagtggaaggcctgagcaagcacatcaagctggaagaggaacggagaagcgaggacgcccagagcaaggccgccctgaccgactggctgcgggctaaggccagcttcgtgatcgagggcctgaaggaggccgacaaggacgagttctgcagatgcgagctgaagctgcagaagtggtacggggacctgcggggaaagcccttcgccatcgaagccgagaacagcatcctggacatcagcggcttcagcaagcagtacaactgtgccttcatctggcagaaggacggcgtgaagaagctgaacctgtacctgatcatcaactacttcaagggcggcaagctgcggttcaagaagatcaaacctgaagccttcgaagccaacagattctacaccgtgatcaacaaaaagagcggcgagatcgtgcccatggaggtgaacttcaacttcgacgaccccaacctgatcatcctgcctctggcctttggcaagagacagggcagagaattcatctggaacgacctgctgtccctggaaaccggcagcctgaagctggccaacggaagagtgatcgagaagacactgtacaacagaagaacccggcaggatgagcctgccctgttcgtggccctgaccttcgagcggcgggaggtcctggactcctccaatatcaaaccaatgaacctgatcggcgtggcaagaggcgaaaacatccccgccgtgatcgccctgaccgaccccgagggctgcccactgagccggtttaaggatagcctgggaaacccaacccacatcctgagaatcggcgagagctataaggagaagcagcggaccatccaggccaagaaggaggtggagcagcggagagccggcggctacagccggaagtacgccagcaaagccaagaatctggcagacgatatggtgagaaacaccgctagagatctgctgtactacgccgtgacccaggatgccatgctgatcttcgccaacctgagccggggcttcggccggcagggcaagcggaccttcatggccgagagacagtacacacggatggaggactggctgaccgccaagctggcctacgagggcctgagcaagacctacctgtccaagacactggcccagtacacctccaagacatgcagcaactgtgggtttaccatcaccagcgccgactacgacagggtgctggagaagctgaagaagacagcaacaggctggatgaccacaattaacggcaaggagctgaaggtggagggccagattacctactacaacagatacaagagacagaacgtagtcaaggacctgtccgtcgagctggatagactgagcgaagaatctgtgaacaacgacatctcctcctggacaaagggcagaagcggagaagctctgagcctcctgaagaaaagattctcccatagacccgtgcaggagaagttcgtgtgcctgaactgcggcttcgagacacacgcagccgagcaagccgccctgaacatcgccagatcctggctgttcctgcggagccaggagtacaagaaataccagacaaacaagacaaccggcaacaccgataagagagccttcgtcgagacctggcagtccttttaccggaagaagcttaaggaggtgtggaaacctgccgtgcggtctggcggatctggcggaggctcctttccaggagagcctgaccttcaaggacgtggccgtggacttcacctacgaggagtggcagcagctgaaccccgaccagaggtacctgtacagggacgtgatgctggagaactacaagaacctggtgttcctgggccaccagatcagcaagcccgacgtgatcagccagctggagcagggcaaggagccctggcccatcgagagggagatcttcacctacagctgcagggactgggagaccaagggatctggctccggcagcggccccaagaaaaagagaaaagtctaagctgccttctgcggggcttgccttctggccatgcccttcttctctcccttgcacctgtacctcttggtctttgaataaagcctgagtaggaaggctagcaaaaaaaaaaaaaaaaaaaaaaaaaaaaaaaaaaaaaaaaaaaaaaaaaaaaaaaaaaaaaaaaaaaaaaaaaaaaaaaa

SEQ ID NO: 16619 - RNA, 9485 nt, synthetic construct
  source 1..9485: mol_type = other RNA
aggaaataagagagaaaagaagagtaagaagaaatataagagccaccatggcccctaagaagaagcgtaaagtgagccggatggaacgcctcgtctacgaggtgcggcagaagtgcagaaacatcgaggacatctgcatctcctgcggatctctgaacgtgaccctggagcacccactgttcatcggcggcatgtgccagaactgtaaaaactgttttctggagtgtgcctatcaatacgacgatgacggctaccagagctactgcaccatctgttgcggcggaagagaggtgctgatgtgtggaaataacaactgctgccggtgcttctgcgtggaatgcgtggacctgctggtgggccccggcgccgcccaggccgctattaaggaagatccttggaactgctacatgtgcggccacaagggcacatacggcctgctgagacggagagaggactggcctagcagactgcagatgttcttcgccaataaccacgaccaggagttcgacccccctaaggtgtaccctcccgtccccgccgagaagagaaagcccatccgggtcctgagcctgttcgatggcatcgccaccggtctgctggtgctgaaggacctgggcatccaggtggataggtacattgcctccgaggtgtgcgaggactccatcaccgtgggaatggtgcgtcatcagggcaagatcatgtacgtgggcgacgtgcggagcgtgacacagaagcatatccaggagtggggccctttcgacctggtgatcggcggcagcccttgcaatgacctgagcatcgtgaacccagcccggaagggcctgtacgagggaaccggcagactgttcttcgagttttacagactgctgcacgacgcccggcctaaggaaggcgacgaccggcccttcttttggctgttcgagaatgtggtggccatgggagtcagcgacaagcgggatattagccggttcctggagagcaaccccgtgatgatcgatgccaaggaagtgagcgccgcccaccgggccagatacttctggggcaatctgcctggcatgaacagacccctggccagcaccgtgaacgacaagctggagctgcaggagtgcctggagcacggccggatcgccaagttcagcaaggtgagaaccatcaccacccgaagcaacagcatcaaacaaggcaaggaccagcactttcctgtgttcatgaacgagaaggaggacatcctgtggtgtaccgagatggagagagtgttcgggttcccagtccactacacagatgtcagcaacatgtctagactggccagacagagactgctgggaagaagctggtccgtccctgtgatcagacacctgttcgcccctctgaaggagtacttcgcctgcgtgagcagcggcaacagcaacgccaacagccggggccccagcttctctagcggcctggtgccactgtccctgagagggagccacatgggccccatggagatctacaaaaccgtgagcgcctggaagcggcagcctgtgcgcgtgctgagcctgtttcggaatatcgataaagtcctgaaaagcctgggattcctggagagcggctctggctccggcggtggcaccctgaagtacgtggaggatgtgacaaacgtggtcagacgggatgtggagaagtggggccccttcgatctggtgtacggcagcacccaacccctgggcagctcttgtgaccggtgccctggctggtacatgtttcagttccaccggatcctgcagtacgccctgccgagacaggagtcccagcggccattcttttggattttcatggacaacttgctgctgaccgaggatgaccaggaaactaccactcggttcctgcagaccgaagccgtgaccctgcaggacgtgagaggccgggactaccagaacgccatgcgggtgtggtccaacatccctggactgaaaagcaagcacgcacctctgacccctaaagaagaggagtacctgcaggcccaggtgcggagcagaagcaagctggacgcccctaaggtggatctgctggtgaagaattgcctcctgcccctgagagagtacttcaagtatttcagccagaatagtctgcccctgggaggcagcggcggcggcgccctggtgacatttgaggacgtcgccgtgcggttcacccaggaggaatgggctctgctggatccttctcagaaaatcctgtaccgggacgtgatgagagagacataccggaatctgacctccgtgggcatcaactgggaatgttgggaccttgaagcctgcttcagaagcctgggaagaaacctgagagtgcaggtggtgaagagaaagtgcgagctgaccaacagcggcccctgcgccgagggcggcccaagcagcggcgcccctcctcccagcggcggcagcccagccggctccccaacctctaccgaggagggcacctctgagtccgccacccccgagagcggccctggcacctccaccgagcccagcgagggcagcgcacccggcagccctgccggcagccccacctccacagaggagggaaccagcaccgagcccagcgaaggcagcgccccaggcaccagcaccgagcctagtgagcaggagattaaacggatcaacaagatcagaagaagacttgtgaaagacagcaacaccaagaaggccggcaagacaggccccatgaaaaccctgctggttagagtgatgacacccgatctgagagagcggctggaaaacctgagaaagaagcctgaaaatatcccccagcccatcagcaatacatctagagccaacctgaataagctgctgaccgattacaccgaaatgaagaaggcgatcctgcatgtgtactgggaagagttccagaaggaccctgtgggcctgatgagccgggtggcccagcctgccagcaagaagatcgatcagaacaagctgaaacctgagatggacgagaagggcaacctgaccaccgccggctttgcctgctctcagtgtggccagcccctgttcgtgtacaagctggagcaggtgtctgagaagggcaaggcttacaccaactacttcggacggtgcaatgtggccgagcacgaaaagctgatcctgctggcccagctgaagcccgagaaggatagcgacgaagccgtgacatatagcctgggaaagtttgggcagagggccctggatttctacagcattcatgtgaccaaggagtccacccaccccgtgaagcccctggcccagatcgccggaaacagatacgcctccggacctgtgggaaaggccctgagcgacgcatgtatgggcacaatcgcctccttcctgtctaagtaccaggacatcatcatcgaacaccagaaggtggtgaagggcaaccagaagagactggagagcctgcgggagctggccggcaaggaaaacctggaataccctagcgtgaccctgccacctcagcctcacaccaaggagggcgttgatgcctacaacgaagtgatcgcccgggtgcgaatgtgggtgaacctgaacctgtggcagaagctgaagctaagcagagatgatgccaagcctctgctgagactgaagggattcccttcctttcctctggtcgagagacaggccaacgaagtggactggtgggacatggtgtgtaacgtgaagaagctgatcaacgagaaaaaggaggatggcaaggtgttttggcagaatctggctggctacaagagacaggaagccctgagaccatacctgagcagcgaggaagatcggaagaagggaaagaaattcgctcggtaccagctgggcgacctgctgctgcacctggaaaagaagcacggcgaggactggggaaaggtgtacgacgaggcctgggagcggattgacaagaaagtggaaggcctgagcaagcacatcaagctggaagaggaacggagaagcgaggacgcccagagcaaggccgccctgaccgactggctgcgggctaaggccagcttcgtgatcgagggcctgaaggaggccgacaaggacgagttctgcagatgcgagctgaagctgcagaagtggtacggggacctgcggggaaagcccttcgccatcgaagccgagaacagcatcctggacatcagcggcttcagcaagcagtacaactgtgccttcatctggcagaaggacggcgtgaagaagctgaacctgtacctgatcatcaactacttcaagggcggcaagctgcggttcaagaagatcaaacctgaagccttcgaagccaacagattctacaccgtgatcaacaaaaagagcggcgagatcgtgcccatggaggtgaacttcaacttcgacgaccccaacctgatcatcctgcctctggcctttggcaagagacagggcagagaattcatctggaacgacctgctgtccctggaaaccggcagcctgaagctggccaacggaagagtgatcgagaagacactgtacaacagaagaacccggcaggatgagcctgccctgttcgtggccctgaccttcgagcggcgggaggtcctggactcctccaatatcaaaccaatgaacctgatcggcgtggcaagaggcgaaaacatccccgccgtgatcgccctgaccgaccccgagggctgcccactgagccggtttaaggatagcctgggaaacccaacccacatcctgagaatcggcgagagctataaggagaagcagcggaccatccaggccaagaaggaggtggagcagcggagagccggcggctacagccggaagtacgccagcaaagccaagaatctggcagacgatatggtgagaaacaccgctagagatctgctgtactacgccgtgacccaggatgccatgctgatcttcgccaacctgagccggggcttcggccggcagggcaagcggaccttcatggccgagagacagtacacacggatggaggactggctgaccgccaagctggcctacgagggcctgagcaagacctacctgtccaagacactggcccagtacacctccaagacatgcagcaactgtgggtttaccatcaccagcgccgactacgacagggtgctggagaagctgaagaagacagcaacaggctggatgaccacaattaacggcaaggagctgaaggtggagggccagattacctactacaacagatacaagagacagaacgtagtcaaggacctgtccgtcgagctggatagactgagcgaagaatctgtgaacaacgacatctcctcctggacaaagggcagaagcggagaagctctgagcctcctgaagaaaagattctcccatagacccgtgcaggagaagttcgtgtgcctgaactgcggcttcgagacacacgcagccgagcaagccgccctgaacatcgccagatcctggctgttcctgcggagccaggagtacaagaaataccagacaaacaagacaaccggcaacaccgataagagagccttcgtcgagacctggcagtccttttaccggaagaagcttaaggaggtgtggaaacctgccgtgcggtctggcggatctggcggaggctccttccagaacagcctgaccttcgacgacgtggccgtggacttcacccaggaggagtgggtgctgatggaccagacccagagggacctgtacagggaggtgatgctggagaactaccagaacctgttcagcgccggctgcgagatcaccaagcccagcctgatcagctggctggaggaggacctgcagatcggccagagggaggacttccaggagtgggagatgcaggacaccctgagggagcagggcggcccaagcagcggcgcccctcctcccagcggcggcagcccagccggctccccaacctctaccgaggagggcacctctgagtccgccacccccgagagcggccctggcacctccaccgagcccagcgagggcagcgcacccggcagccctgccggcagccccacctccacagaggagggaaccagcaccgagcccagcgaaggcagcgccccaggcaccagcaccgagcctagtgagcaggagattaaacggatcaacaagatcagaagaagacttgtgaaagacagcaacaccaagaaggccggcaagacaggccccatgaaaaccctgctggttagagtgatgacacccgatctgagagagcggctggaaaacctgagaaagaagcctgaaaatatcccccagcccatcagcaatacatctagagccaacctgaataagctgctgaccgattacaccgaaatgaagaaggcgatcctgcatgtgtactgggaagagttccagaaggaccctgtgggcctgatgagccgggtggcccagcctgccagcaagaagatcgatcagaacaagctgaaacctgagatggacgagaagggcaacctgaccaccgccggctttgcctgctctcagtgtggccagcccctgttcgtgtacaagctggagcaggtgtctgagaagggcaaggcttacaccaactacttcggacggtgcaatgtggccgagcacgaaaagctgatcctgctggcccagctgaagcccgagaaggatagcgacgaagccgtgacatatagcctgggaaagtttgggcagagggccctggatttctacagcattcatgtgaccaaggagtccacccaccccgtgaagcccctggcccagatcgccggaaacagatacgcctccggacctgtgggaaaggccctgagcgacgcatgtatgggcacaatcgcctccttcctgtctaagtaccaggacatcatcatcgaacaccagaaggtggtgaagggcaaccagaagagactggagagcctgcgggagctggccggcaaggaaaacctggaataccctagcgtgaccctgccacctcagcctcacaccaaggagggcgttgatgcctacaacgaagtgatcgcccgggtgcgaatgtgggtgaacctgaacctgtggcagaagctgaagctaagcagagatgatgccaagcctctgctgagactgaagggattcccttcctttcctctggtcgagagacaggccaacgaagtggactggtgggacatggtgtgtaacgtgaagaagctgatcaacgagaaaaaggaggatggcaaggtgttttggcagaatctggctggctacaagagacaggaagccctgagaccatacctgagcagcgaggaagatcggaagaagggaaagaaattcgctcggtaccagctgggcgacctgctgctgcacctggaaaagaagcacggcgaggactggggaaaggtgtacgacgaggcctgggagcggattgacaagaaagtggaaggcctgagcaagcacatcaagctggaagaggaacggagaagcgaggacgcccagagcaaggccgccctgaccgactggctgcgggctaaggccagcttcgtgatcgagggcctgaaggaggccgacaaggacgagttctgcagatgcgagctgaagctgcagaagtggtacggggacctgcggggaaagcccttcgccatcgaagccgagaacagcatcctggacatcagcggcttcagcaagcagtacaactgtgccttcatctggcagaaggacggcgtgaagaagctgaacctgtacctgatcatcaactacttcaagggcggcaagctgcggttcaagaagatcaaacctgaagccttcgaagccaacagattctacaccgtgatcaacaaaaagagcggcgagatcgtgcccatggaggtgaacttcaacttcgacgaccccaacctgatcatcctgcctctggcctttggcaagagacagggcagagaattcatctggaacgacctgctgtccctggaaaccggcagcctgaagctggccaacggaagagtgatcgagaagacactgtacaacagaagaacccggcaggatgagcctgccctgttcgtggccctgaccttcgagcggcgggaggtcctggactcctccaatatcaaaccaatgaacctgatcggcgtggcaagaggcgaaaacatccccgccgtgatcgccctgaccgaccccgagggctgcccactgagccggtttaaggatagcctgggaaacccaacccacatcctgagaatcggcgagagctataaggagaagcagcggaccatccaggccaagaaggaggtggagcagcggagagccggcggctacagccggaagtacgccagcaaagccaagaatctggcagacgatatggtgagaaacaccgctagagatctgctgtactacgccgtgacccaggatgccatgctgatcttcgccaacctgagccggggcttcggccggcagggcaagcggaccttcatggccgagagacagtacacacggatggaggactggctgaccgccaagctggcctacgagggcctgagcaagacctacctgtccaagacactggcccagtacacctccaagacatgcagcaactgtgggtttaccatcaccagcgccgactacgacagggtgctggagaagctgaagaagacagcaacaggctggatgaccacaattaacggcaaggagctgaaggtggagggccagattacctactacaacagatacaagagacagaacgtagtcaaggacctgtccgtcgagctggatagactgagcgaagaatctgtgaacaacgacatctcctcctggacaaagggcagaagcggagaagctctgagcctcctgaagaaaagattctcccatagacccgtgcaggagaagttcgtgtgcctgaactgcggcttcgagacacacgcagccgagcaagccgccctgaacatcgccagatcctggctgttcctgcggagccaggagtacaagaaataccagacaaacaagacaaccggcaacaccgataagagagccttcgtcgagacctggcagtccttttaccggaagaagcttaaggaggtgtggaaacctgccgtgcggtctggcggatctggcggaggctcctttccagaacagcctgaccttcgacgacgtggccgtggacttcacccaggaggagtgggtgctgatggaccagacccagagggacctgtacagggaggtgatgctggagaactaccagaacctgttcagcgccggctgcgagatcaccaagcccagcctgatcagctggctggaggaggacctgcagatcggccagagggaggacttccaggagtgggagatgcaggacaccctgagggagcagggatctggctccggcagcggccccaagaaaaagagaaaagtctaagctgccttctgcggggcttgccttctggccatgcccttcttctctcccttgcacctgtacctcttggtctttgaataaagcctgagtaggaaggctagcaaaaaaaaaaaaaaaaaaaaaaaaaaaaaaaaaaaaaaaaaaaaaaaaaaaaaaaaaaaaaaaaaaaaaaaaaaaaaaaa

SEQ ID NO: 16620 - RNA, 9485 nt, synthetic construct
  source 1..9485: mol_type = other RNA
aggaaataagagagaaaagaagagtaagaagaaatataagagccaccatggcccctaagaagaagcgtaaagtgagccggatggaacgcctcgtctacgaggtgcggcagaagtgcagaaacatcgaggacatctgcatctcctgcggatctctgaacgtgaccctggagcacccactgttcatcggcggcatgtgccagaactgtaaaaactgttttctggagtgtgcctatcaatacgacgatgacggctaccagagctactgcaccatctgttgcggcggaagagaggtgctgatgtgtggaaataacaactgctgccggtgcttctgcgtggaatgcgtggacctgctggtgggccccggcgccgcccaggccgctattaaggaagatccttggaactgctacatgtgcggccacaagggcacatacggcctgctgagacggagagaggactggcctagcagactgcagatgttcttcgccaataaccacgaccaggagttcgacccccctaaggtgtaccctcccgtccccgccgagaagagaaagcccatccgggtcctgagcctgttcgatggcatcgccaccggtctgctggtgctgaaggacctgggcatccaggtggataggtacattgcctccgaggtgtgcgaggactccatcaccgtgggaatggtgcgtcatcagggcaagatcatgtacgtgggcgacgtgcggagcgtgacacagaagcatatccaggagtggggccctttcgacctggtgatcggcggcagcccttgcaatgacctgagcatcgtgaacccagcccggaagggcctgtacgagggaaccggcagactgttcttcgagttttacagactgctgcacgacgcccggcctaaggaaggcgacgaccggcccttcttttggctgttcgagaatgtggtggccatgggagtcagcgacaagcgggatattagccggttcctggagagcaaccccgtgatgatcgatgccaaggaagtgagcgccgcccaccgggccagatacttctggggcaatctgcctggcatgaacagacccctggccagcaccgtgaacgacaagctggagctgcaggagtgcctggagcacggccggatcgccaagttcagcaaggtgagaaccatcaccacccgaagcaacagcatcaaacaaggcaaggaccagcactttcctgtgttcatgaacgagaaggaggacatcctgtggtgtaccgagatggagagagtgttcgggttcccagtccactacacagatgtcagcaacatgtctagactggccagacagagactgctgggaagaagctggtccgtccctgtgatcagacacctgttcgcccctctgaaggagtacttcgcctgcgtgagcagcggcaacagcaacgccaacagccggggccccagcttctctagcggcctggtgccactgtccctgagagggagccacatgggccccatggagatctacaaaaccgtgagcgcctggaagcggcagcctgtgcgcgtgctgagcctgtttcggaatatcgataaagtcctgaaaagcctgggattcctggagagcggctctggctccggcggtggcaccctgaagtacgtggaggatgtgacaaacgtggtcagacgggatgtggagaagtggggccccttcgatctggtgtacggcagcacccaacccctgggcagctcttgtgaccggtgccctggctggtacatgtttcagttccaccggatcctgcagtacgccctgccgagacaggagtcccagcggccattcttttggattttcatggacaacttgctgctgaccgaggatgaccaggaaactaccactcggttcctgcagaccgaagccgtgaccctgcaggacgtgagaggccgggactaccagaacgccatgcgggtgtggtccaacatccctggactgaaaagcaagcacgcacctctgacccctaaagaagaggagtacctgcaggcccaggtgcggagcagaagcaagctggacgcccctaaggtggatctgctggtgaagaattgcctcctgcccctgagagagtacttcaagtatttcagccagaatagtctgcccctgggaggcagcggcggcggcgccctggtgacatttgaggacgtcgccgtgcggttcacccaggaggaatgggctctgctggatccttctcagaaaatcctgtaccgggacgtgatgagagagacataccggaatctgacctccgtgggcatcaactgggaatgttgggaccttgaagcctgcttcagaagcctgggaagaaacctgagagtgcaggtggtgaagagaaagtgcgagctgaccaacagcggcccctgcgccgagggcggcccaagcagcggcgcccctcctcccagcggcggcagcccagccggctccccaacctctaccgaggagggcacctctgagtccgccacccccgagagcggccctggcacctccaccgagcccagcgagggcagcgcacccggcagccctgccggcagccccacctccacagaggagggaaccagcaccgagcccagcgaaggcagcgccccaggcaccagcaccgagcctagtgagcaggagattaaacggatcaacaagatcagaagaagacttgtgaaagacagcaacaccaagaaggccggcaagacaggccccatgaaaaccctgctggttagagtgatgacacccgatctgagagagcggctggaaaacctgagaaagaagcctgaaaatatcccccagcccatcagcaatacatctagagccaacctgaataagctgctgaccgattacaccgaaatgaagaaggcgatcctgcatgtgtactgggaagagttccagaaggaccctgtgggcctgatgagccgggtggcccagcctgccagcaagaagatcgatcagaacaagctgaaacctgagatggacgagaagggcaacctgaccaccgccggctttgcctgctctcagtgtggccagcccctgttcgtgtacaagctggagcaggtgtctgagaagggcaaggcttacaccaactacttcggacggtgcaatgtggccgagcacgaaaagctgatcctgctggcccagctgaagcccgagaaggatagcgacgaagccgtgacatatagcctgggaaagtttgggcagagggccctggatttctacagcattcatgtgaccaaggagtccacccaccccgtgaagcccctggcccagatcgccggaaacagatacgcctccggacctgtgggaaaggccctgagcgacgcatgtatgggcacaatcgcctccttcctgtctaagtaccaggacatcatcatcgaacaccagaaggtggtgaagggcaaccagaagagactggagagcctgcgggagctggccggcaaggaaaacctggaataccctagcgtgaccctgccacctcagcctcacaccaaggagggcgttgatgcctacaacgaagtgatcgcccgggtgcgaatgtgggtgaacctgaacctgtggcagaagctgaagctaagcagagatgatgccaagcctctgctgagactgaagggattcccttcctttcctctggtcgagagacaggccaacgaagtggactggtgggacatggtgtgtaacgtgaagaagctgatcaacgagaaaaaggaggatggcaaggtgttttggcagaatctggctggctacaagagacaggaagccctgagaccatacctgagcagcgaggaagatcggaagaagggaaagaaattcgctcggtaccagctgggcgacctgctgctgcacctggaaaagaagcacggcgaggactggggaaaggtgtacgacgaggcctgggagcggattgacaagaaagtggaaggcctgagcaagcacatcaagctggaagaggaacggagaagcgaggacgcccagagcaaggccgccctgaccgactggctgcgggctaaggccagcttcgtgatcgagggcctgaaggaggccgacaaggacgagttctgcagatgcgagctgaagctgcagaagtggtacggggacctgcggggaaagcccttcgccatcgaagccgagaacagcatcctggacatcagcggcttcagcaagcagtacaactgtgccttcatctggcagaaggacggcgtgaagaagctgaacctgtacctgatcatcaactacttcaagggcggcaagctgcggttcaagaagatcaaacctgaagccttcgaagccaacagattctacaccgtgatcaacaaaaagagcggcgagatcgtgcccatggaggtgaacttcaacttcgacgaccccaacctgatcatcctgcctctggcctttggcaagagacagggcagagaattcatctggaacgacctgctgtccctggaaaccggcagcctgaagctggccaacggaagagtgatcgagaagacactgtacaacagaagaacccggcaggatgagcctgccctgttcgtggccctgaccttcgagcggcgggaggtcctggactcctccaatatcaaaccaatgaacctgatcggcgtggcaagaggcgaaaacatccccgccgtgatcgccctgaccgaccccgagggctgcccactgagccggtttaaggatagcctgggaaacccaacccacatcctgagaatcggcgagagctataaggagaagcagcggaccatccaggccaagaaggaggtggagcagcggagagccggcggctacagccggaagtacgccagcaaagccaagaatctggcagacgatatggtgagaaacaccgctagagatctgctgtactacgccgtgacccaggatgccatgctgatcttcgccaacctgagccggggcttcggccggcagggcaagcggaccttcatggccgagagacagtacacacggatggaggactggctgaccgccaagctggcctacgagggcctgagcaagacctacctgtccaagacactggcccagtacacctccaagacatgcagcaactgtgggtttaccatcaccagcgccgactacgacagggtgctggagaagctgaagaagacagcaacaggctggatgaccacaattaacggcaaggagctgaaggtggagggccagattacctactacaacagatacaagagacagaacgtagtcaaggacctgtccgtcgagctggatagactgagcgaagaatctgtgaacaacgacatctcctcctggacaaagggcagaagcggagaagctctgagcctcctgaagaaaagattctcccatagacccgtgcaggagaagttcgtgtgcctgaactgcggcttcgagacacacgcagccgagcaagccgccctgaacatcgccagatcctggctgttcctgcggagccaggagtacaagaaataccagacaaacaagacaaccggcaacaccgataagagagccttcgtcgagacctggcagtccttttaccggaagaagcttaaggaggtgtggaaacctgccgtgcggtctggcggatctggcggaggctccccccaggagagcgtgaccttcagggacgtggccgtggacttcacctgggaggagtggggccagctggaccccagccagaaggagctgtacagggaggtgatgctggagaactacggcaacctggcctgcctgggcctggccgtgagcaagcccgacgtgatcctgcagctggagaggggcgagatcccctggatgagcgagaggaaggtgcccgagggcatctgccccgactgggaggccaggggcggcccaagcagcggcgcccctcctcccagcggcggcagcccagccggctccccaacctctaccgaggagggcacctctgagtccgccacccccgagagcggccctggcacctccaccgagcccagcgagggcagcgcacccggcagccctgccggcagccccacctccacagaggagggaaccagcaccgagcccagcgaaggcagcgccccaggcaccagcaccgagcctagtgagcaggagattaaacggatcaacaagatcagaagaagacttgtgaaagacagcaacaccaagaaggccggcaagacaggccccatgaaaaccctgctggttagagtgatgacacccgatctgagagagcggctggaaaacctgagaaagaagcctgaaaatatcccccagcccatcagcaatacatctagagccaacctgaataagctgctgaccgattacaccgaaatgaagaaggcgatcctgcatgtgtactgggaagagttccagaaggaccctgtgggcctgatgagccgggtggcccagcctgccagcaagaagatcgatcagaacaagctgaaacctgagatggacgagaagggcaacctgaccaccgccggctttgcctgctctcagtgtggccagcccctgttcgtgtacaagctggagcaggtgtctgagaagggcaaggcttacaccaactacttcggacggtgcaatgtggccgagcacgaaaagctgatcctgctggcccagctgaagcccgagaaggatagcgacgaagccgtgacatatagcctgggaaagtttgggcagagggccctggatttctacagcattcatgtgaccaaggagtccacccaccccgtgaagcccctggcccagatcgccggaaacagatacgcctccggacctgtgggaaaggccctgagcgacgcatgtatgggcacaatcgcctccttcctgtctaagtaccaggacatcatcatcgaacaccagaaggtggtgaagggcaaccagaagagactggagagcctgcgggagctggccggcaaggaaaacctggaataccctagcgtgaccctgccacctcagcctcacaccaaggagggcgttgatgcctacaacgaagtgatcgcccgggtgcgaatgtgggtgaacctgaacctgtggcagaagctgaagctaagcagagatgatgccaagcctctgctgagactgaagggattcccttcctttcctctggtcgagagacaggccaacgaagtggactggtgggacatggtgtgtaacgtgaagaagctgatcaacgagaaaaaggaggatggcaaggtgttttggcagaatctggctggctacaagagacaggaagccctgagaccatacctgagcagcgaggaagatcggaagaagggaaagaaattcgctcggtaccagctgggcgacctgctgctgcacctggaaaagaagcacggcgaggactggggaaaggtgtacgacgaggcctgggagcggattgacaagaaagtggaaggcctgagcaagcacatcaagctggaagaggaacggagaagcgaggacgcccagagcaaggccgccctgaccgactggctgcgggctaaggccagcttcgtgatcgagggcctgaaggaggccgacaaggacgagttctgcagatgcgagctgaagctgcagaagtggtacggggacctgcggggaaagcccttcgccatcgaagccgagaacagcatcctggacatcagcggcttcagcaagcagtacaactgtgccttcatctggcagaaggacggcgtgaagaagctgaacctgtacctgatcatcaactacttcaagggcggcaagctgcggttcaagaagatcaaacctgaagccttcgaagccaacagattctacaccgtgatcaacaaaaagagcggcgagatcgtgcccatggaggtgaacttcaacttcgacgaccccaacctgatcatcctgcctctggcctttggcaagagacagggcagagaattcatctggaacgacctgctgtccctggaaaccggcagcctgaagctggccaacggaagagtgatcgagaagacactgtacaacagaagaacccggcaggatgagcctgccctgttcgtggccctgaccttcgagcggcgggaggtcctggactcctccaatatcaaaccaatgaacctgatcggcgtggcaagaggcgaaaacatccccgccgtgatcgccctgaccgaccccgagggctgcccactgagccggtttaaggatagcctgggaaacccaacccacatcctgagaatcggcgagagctataaggagaagcagcggaccatccaggccaagaaggaggtggagcagcggagagccggcggctacagccggaagtacgccagcaaagccaagaatctggcagacgatatggtgagaaacaccgctagagatctgctgtactacgccgtgacccaggatgccatgctgatcttcgccaacctgagccggggcttcggccggcagggcaagcggaccttcatggccgagagacagtacacacggatggaggactggctgaccgccaagctggcctacgagggcctgagcaagacctacctgtccaagacactggcccagtacacctccaagacatgcagcaactgtgggtttaccatcaccagcgccgactacgacagggtgctggagaagctgaagaagacagcaacaggctggatgaccacaattaacggcaaggagctgaaggtggagggccagattacctactacaacagatacaagagacagaacgtagtcaaggacctgtccgtcgagctggatagactgagcgaagaatctgtgaacaacgacatctcctcctggacaaagggcagaagcggagaagctctgagcctcctgaagaaaagattctcccatagacccgtgcaggagaagttcgtgtgcctgaactgcggcttcgagacacacgcagccgagcaagccgccctgaacatcgccagatcctggctgttcctgcggagccaggagtacaagaaataccagacaaacaagacaaccggcaacaccgataagagagccttcgtcgagacctggcagtccttttaccggaagaagcttaaggaggtgtggaaacctgccgtgcggtctggcggatctggcggaggctcctccccaggagagcgtgaccttcagggacgtggccgtggacttcacctgggaggagtggggccagctggaccccagccagaaggagctgtacagggaggtgatgctggagaactacggcaacctggcctgcctgggcctggccgtgagcaagcccgacgtgatcctgcagctggagaggggcgagatcccctggatgagcgagaggaaggtgcccgagggcatctgccccgactgggaggccaggggatctggctccggcagcggccccaagaaaaagagaaaagtctaagctgccttctgcggggcttgccttctggccatgcccttcttctctcccttgcacctgtacctcttggtctttgaataaagcctgagtaggaaggctagcaaaaaaaaaaaaaaaaaaaaaaaaaaaaaaaaaaaaaaaaaaaaaaaaaaaaaaaaaaaaaaaaaaaaaaaaaaaaaaaa

SEQ ID NO: 16621 - RNA, 9485 nt, synthetic construct
  source 1..9485: mol_type = other RNA
aggaaataagagagaaaagaagagtaagaagaaatataagagccaccatggcccctaagaagaagcgtaaagtgagccggatggaacgcctcgtctacgaggtgcggcagaagtgcagaaacatcgaggacatctgcatctcctgcggatctctgaacgtgaccctggagcacccactgttcatcggcggcatgtgccagaactgtaaaaactgttttctggagtgtgcctatcaatacgacgatgacggctaccagagctactgcaccatctgttgcggcggaagagaggtgctgatgtgtggaaataacaactgctgccggtgcttctgcgtggaatgcgtggacctgctggtgggccccggcgccgcccaggccgctattaaggaagatccttggaactgctacatgtgcggccacaagggcacatacggcctgctgagacggagagaggactggcctagcagactgcagatgttcttcgccaataaccacgaccaggagttcgacccccctaaggtgtaccctcccgtccccgccgagaagagaaagcccatccgggtcctgagcctgttcgatggcatcgccaccggtctgctggtgctgaaggacctgggcatccaggtggataggtacattgcctccgaggtgtgcgaggactccatcaccgtgggaatggtgcgtcatcagggcaagatcatgtacgtgggcgacgtgcggagcgtgacacagaagcatatccaggagtggggccctttcgacctggtgatcggcggcagcccttgcaatgacctgagcatcgtgaacccagcccggaagggcctgtacgagggaaccggcagactgttcttcgagttttacagactgctgcacgacgcccggcctaaggaaggcgacgaccggcccttcttttggctgttcgagaatgtggtggccatgggagtcagcgacaagcgggatattagccggttcctggagagcaaccccgtgatgatcgatgccaaggaagtgagcgccgcccaccgggccagatacttctggggcaatctgcctggcatgaacagacccctggccagcaccgtgaacgacaagctggagctgcaggagtgcctggagcacggccggatcgccaagttcagcaaggtgagaaccatcaccacccgaagcaacagcatcaaacaaggcaaggaccagcactttcctgtgttcatgaacgagaaggaggacatcctgtggtgtaccgagatggagagagtgttcgggttcccagtccactacacagatgtcagcaacatgtctagactggccagacagagactgctgggaagaagctggtccgtccctgtgatcagacacctgttcgcccctctgaaggagtacttcgcctgcgtgagcagcggcaacagcaacgccaacagccggggccccagcttctctagcggcctggtgccactgtccctgagagggagccacatgggccccatggagatctacaaaaccgtgagcgcctggaagcggcagcctgtgcgcgtgctgagcctgtttcggaatatcgataaagtcctgaaaagcctgggattcctggagagcggctctggctccggcggtggcaccctgaagtacgtggaggatgtgacaaacgtggtcagacgggatgtggagaagtggggccccttcgatctggtgtacggcagcacccaacccctgggcagctcttgtgaccggtgccctggctggtacatgtttcagttccaccggatcctgcagtacgccctgccgagacaggagtcccagcggccattcttttggattttcatggacaacttgctgctgaccgaggatgaccaggaaactaccactcggttcctgcagaccgaagccgtgaccctgcaggacgtgagaggccgggactaccagaacgccatgcgggtgtggtccaacatccctggactgaaaagcaagcacgcacctctgacccctaaagaagaggagtacctgcaggcccaggtgcggagcagaagcaagctggacgcccctaaggtggatctgctggtgaagaattgcctcctgcccctgagagagtacttcaagtatttcagccagaatagtctgcccctgggaggcagcggcggcggcgccctggtgacatttgaggacgtcgccgtgcggttcacccaggaggaatgggctctgctggatccttctcagaaaatcctgtaccgggacgtgatgagagagacataccggaatctgacctccgtgggcatcaactgggaatgttgggaccttgaagcctgcttcagaagcctgggaagaaacctgagagtgcaggtggtgaagagaaagtgcgagctgaccaacagcggcccctgcgccgagggcggcccaagcagcggcgcccctcctcccagcggcggcagcccagccggctccccaacctctaccgaggagggcacctctgagtccgccacccccgagagcggccctggcacctccaccgagcccagcgagggcagcgcacccggcagccctgccggcagccccacctccacagaggagggaaccagcaccgagcccagcgaaggcagcgccccaggcaccagcaccgagcctagtgagcaggagattaaacggatcaacaagatcagaagaagacttgtgaaagacagcaacaccaagaaggccggcaagacaggccccatgaaaaccctgctggttagagtgatgacacccgatctgagagagcggctggaaaacctgagaaagaagcctgaaaatatcccccagcccatcagcaatacatctagagccaacctgaataagctgctgaccgattacaccgaaatgaagaaggcgatcctgcatgtgtactgggaagagttccagaaggaccctgtgggcctgatgagccgggtggcccagcctgccagcaagaagatcgatcagaacaagctgaaacctgagatggacgagaagggcaacctgaccaccgccggctttgcctgctctcagtgtggccagcccctgttcgtgtacaagctggagcaggtgtctgagaagggcaaggcttacaccaactacttcggacggtgcaatgtggccgagcacgaaaagctgatcctgctggcccagctgaagcccgagaaggatagcgacgaagccgtgacatatagcctgggaaagtttgggcagagggccctggatttctacagcattcatgtgaccaaggagtccacccaccccgtgaagcccctggcccagatcgccggaaacagatacgcctccggacctgtgggaaaggccctgagcgacgcatgtatgggcacaatcgcctccttcctgtctaagtaccaggacatcatcatcgaacaccagaaggtggtgaagggcaaccagaagagactggagagcctgcgggagctggccggcaaggaaaacctggaataccctagcgtgaccctgccacctcagcctcacaccaaggagggcgttgatgcctacaacgaagtgatcgcccgggtgcgaatgtgggtgaacctgaacctgtggcagaagctgaagctaagcagagatgatgccaagcctctgctgagactgaagggattcccttcctttcctctggtcgagagacaggccaacgaagtggactggtgggacatggtgtgtaacgtgaagaagctgatcaacgagaaaaaggaggatggcaaggtgttttggcagaatctggctggctacaagagacaggaagccctgagaccatacctgagcagcgaggaagatcggaagaagggaaagaaattcgctcggtaccagctgggcgacctgctgctgcacctggaaaagaagcacggcgaggactggggaaaggtgtacgacgaggcctgggagcggattgacaagaaagtggaaggcctgagcaagcacatcaagctggaagaggaacggagaagcgaggacgcccagagcaaggccgccctgaccgactggctgcgggctaaggccagcttcgtgatcgagggcctgaaggaggccgacaaggacgagttctgcagatgcgagctgaagctgcagaagtggtacggggacctgcggggaaagcccttcgccatcgaagccgagaacagcatcctggacatcagcggcttcagcaagcagtacaactgtgccttcatctggcagaaggacggcgtgaagaagctgaacctgtacctgatcatcaactacttcaagggcggcaagctgcggttcaagaagatcaaacctgaagccttcgaagccaacagattctacaccgtgatcaacaaaaagagcggcgagatcgtgcccatggaggtgaacttcaacttcgacgaccccaacctgatcatcctgcctctggcctttggcaagagacagggcagagaattcatctggaacgacctgctgtccctggaaaccggcagcctgaagctggccaacggaagagtgatcgagaagacactgtacaacagaagaacccggcaggatgagcctgccctgttcgtggccctgaccttcgagcggcgggaggtcctggactcctccaatatcaaaccaatgaacctgatcggcgtggcaagaggcgaaaacatccccgccgtgatcgccctgaccgaccccgagggctgcccactgagccggtttaaggatagcctgggaaacccaacccacatcctgagaatcggcgagagctataaggagaagcagcggaccatccaggccaagaaggaggtggagcagcggagagccggcggctacagccggaagtacgccagcaaagccaagaatctggcagacgatatggtgagaaacaccgctagagatctgctgtactacgccgtgacccaggatgccatgctgatcttcgccaacctgagccggggcttcggccggcagggcaagcggaccttcatggccgagagacagtacacacggatggaggactggctgaccgccaagctggcctacgagggcctgagcaagacctacctgtccaagacactggcccagtacacctccaagacatgcagcaactgtgggtttaccatcaccagcgccgactacgacagggtgctggagaagctgaagaagacagcaacaggctggatgaccacaattaacggcaaggagctgaaggtggagggccagattacctactacaacagatacaagagacagaacgtagtcaaggacctgtccgtcgagctggatagactgagcgaagaatctgtgaacaacgacatctcctcctggacaaagggcagaagcggagaagctctgagcctcctgaagaaaagattctcccatagacccgtgcaggagaagttcgtgtgcctgaactgcggcttcgagacacacgcagccgagcaagccgccctgaacatcgccagatcctggctgttcctgcggagccaggagtacaagaaataccagacaaacaagacaaccggcaacaccgataagagagccttcgtcgagacctggcagtccttttaccggaagaagcttaaggaggtgtggaaacctgccgtgcggtctggcggatctggcggaggctccgtggtgctgctggaggccttcgaggacgtggccgtgtacttcacccagaaggagtgggccctgctggacgacggcgacaaggccctgtacagggaccagatgctgaggaactaccaggccctgatcagcctgggctacaggggccccacccccgccctgatcaacaggatccagaggggcgagatggagctgtgggtgtgcgacaaggactacggcgagaagagcagcctggagggcctgttcggcggcccaagcagcggcgcccctcctcccagcggcggcagcccagccggctccccaacctctaccgaggagggcacctctgagtccgccacccccgagagcggccctggcacctccaccgagcccagcgagggcagcgcacccggcagccctgccggcagccccacctccacagaggagggaaccagcaccgagcccagcgaaggcagcgccccaggcaccagcaccgagcctagtgagcaggagattaaacggatcaacaagatcagaagaagacttgtgaaagacagcaacaccaagaaggccggcaagacaggccccatgaaaaccctgctggttagagtgatgacacccgatctgagagagcggctggaaaacctgagaaagaagcctgaaaatatcccccagcccatcagcaatacatctagagccaacctgaataagctgctgaccgattacaccgaaatgaagaaggcgatcctgcatgtgtactgggaagagttccagaaggaccctgtgggcctgatgagccgggtggcccagcctgccagcaagaagatcgatcagaacaagctgaaacctgagatggacgagaagggcaacctgaccaccgccggctttgcctgctctcagtgtggccagcccctgttcgtgtacaagctggagcaggtgtctgagaagggcaaggcttacaccaactacttcggacggtgcaatgtggccgagcacgaaaagctgatcctgctggcccagctgaagcccgagaaggatagcgacgaagccgtgacatatagcctgggaaagtttgggcagagggccctggatttctacagcattcatgtgaccaaggagtccacccaccccgtgaagcccctggcccagatcgccggaaacagatacgcctccggacctgtgggaaaggccctgagcgacgcatgtatgggcacaatcgcctccttcctgtctaagtaccaggacatcatcatcgaacaccagaaggtggtgaagggcaaccagaagagactggagagcctgcgggagctggccggcaaggaaaacctggaataccctagcgtgaccctgccacctcagcctcacaccaaggagggcgttgatgcctacaacgaagtgatcgcccgggtgcgaatgtgggtgaacctgaacctgtggcagaagctgaagctaagcagagatgatgccaagcctctgctgagactgaagggattcccttcctttcctctggtcgagagacaggccaacgaagtggactggtgggacatggtgtgtaacgtgaagaagctgatcaacgagaaaaaggaggatggcaaggtgttttggcagaatctggctggctacaagagacaggaagccctgagaccatacctgagcagcgaggaagatcggaagaagggaaagaaattcgctcggtaccagctgggcgacctgctgctgcacctggaaaagaagcacggcgaggactggggaaaggtgtacgacgaggcctgggagcggattgacaagaaagtggaaggcctgagcaagcacatcaagctggaagaggaacggagaagcgaggacgcccagagcaaggccgccctgaccgactggctgcgggctaaggccagcttcgtgatcgagggcctgaaggaggccgacaaggacgagttctgcagatgcgagctgaagctgcagaagtggtacggggacctgcggggaaagcccttcgccatcgaagccgagaacagcatcctggacatcagcggcttcagcaagcagtacaactgtgccttcatctggcagaaggacggcgtgaagaagctgaacctgtacctgatcatcaactacttcaagggcggcaagctgcggttcaagaagatcaaacctgaagccttcgaagccaacagattctacaccgtgatcaacaaaaagagcggcgagatcgtgcccatggaggtgaacttcaacttcgacgaccccaacctgatcatcctgcctctggcctttggcaagagacagggcagagaattcatctggaacgacctgctgtccctggaaaccggcagcctgaagctggccaacggaagagtgatcgagaagacactgtacaacagaagaacccggcaggatgagcctgccctgttcgtggccctgaccttcgagcggcgggaggtcctggactcctccaatatcaaaccaatgaacctgatcggcgtggcaagaggcgaaaacatccccgccgtgatcgccctgaccgaccccgagggctgcccactgagccggtttaaggatagcctgggaaacccaacccacatcctgagaatcggcgagagctataaggagaagcagcggaccatccaggccaagaaggaggtggagcagcggagagccggcggctacagccggaagtacgccagcaaagccaagaatctggcagacgatatggtgagaaacaccgctagagatctgctgtactacgccgtgacccaggatgccatgctgatcttcgccaacctgagccggggcttcggccggcagggcaagcggaccttcatggccgagagacagtacacacggatggaggactggctgaccgccaagctggcctacgagggcctgagcaagacctacctgtccaagacactggcccagtacacctccaagacatgcagcaactgtgggtttaccatcaccagcgccgactacgacagggtgctggagaagctgaagaagacagcaacaggctggatgaccacaattaacggcaaggagctgaaggtggagggccagattacctactacaacagatacaagagacagaacgtagtcaaggacctgtccgtcgagctggatagactgagcgaagaatctgtgaacaacgacatctcctcctggacaaagggcagaagcggagaagctctgagcctcctgaagaaaagattctcccatagacccgtgcaggagaagttcgtgtgcctgaactgcggcttcgagacacacgcagccgagcaagccgccctgaacatcgccagatcctggctgttcctgcggagccaggagtacaagaaataccagacaaacaagacaaccggcaacaccgataagagagccttcgtcgagacctggcagtccttttaccggaagaagcttaaggaggtgtggaaacctgccgtgcggtctggcggatctggcggaggctcctgtggtgctgctggaggccttcgaggacgtggccgtgtacttcacccagaaggagtgggccctgctggacgacggcgacaaggccctgtacagggaccagatgctgaggaactaccaggccctgatcagcctgggctacaggggccccacccccgccctgatcaacaggatccagaggggcgagatggagctgtgggtgtgcgacaaggactacggcgagaagagcagcctggagggcctgttcggatctggctccggcagcggccccaagaaaaagagaaaagtctaagctgccttctgcggggcttgccttctggccatgcccttcttctctcccttgcacctgtacctcttggtctttgaataaagcctgagtaggaaggctagcaaaaaaaaaaaaaaaaaaaaaaaaaaaaaaaaaaaaaaaaaaaaaaaaaaaaaaaaaaaaaaaaaaaaaaaaaaaaaaaa

SEQ ID NO: 16622 - RNA, 9485 nt, synthetic construct
  source 1..9485: mol_type = other RNA
aggaaataagagagaaaagaagagtaagaagaaatataagagccaccatggcccctaagaagaagcgtaaagtgagccggatggaacgcctcgtctacgaggtgcggcagaagtgcagaaacatcgaggacatctgcatctcctgcggatctctgaacgtgaccctggagcacccactgttcatcggcggcatgtgccagaactgtaaaaactgttttctggagtgtgcctatcaatacgacgatgacggctaccagagctactgcaccatctgttgcggcggaagagaggtgctgatgtgtggaaataacaactgctgccggtgcttctgcgtggaatgcgtggacctgctggtgggccccggcgccgcccaggccgctattaaggaagatccttggaactgctacatgtgcggccacaagggcacatacggcctgctgagacggagagaggactggcctagcagactgcagatgttcttcgccaataaccacgaccaggagttcgacccccctaaggtgtaccctcccgtccccgccgagaagagaaagcccatccgggtcctgagcctgttcgatggcatcgccaccggtctgctggtgctgaaggacctgggcatccaggtggataggtacattgcctccgaggtgtgcgaggactccatcaccgtgggaatggtgcgtcatcagggcaagatcatgtacgtgggcgacgtgcggagcgtgacacagaagcatatccaggagtggggccctttcgacctggtgatcggcggcagcccttgcaatgacctgagcatcgtgaacccagcccggaagggcctgtacgagggaaccggcagactgttcttcgagttttacagactgctgcacgacgcccggcctaaggaaggcgacgaccggcccttcttttggctgttcgagaatgtggtggccatgggagtcagcgacaagcgggatattagccggttcctggagagcaaccccgtgatgatcgatgccaaggaagtgagcgccgcccaccgggccagatacttctggggcaatctgcctggcatgaacagacccctggccagcaccgtgaacgacaagctggagctgcaggagtgcctggagcacggccggatcgccaagttcagcaaggtgagaaccatcaccacccgaagcaacagcatcaaacaaggcaaggaccagcactttcctgtgttcatgaacgagaaggaggacatcctgtggtgtaccgagatggagagagtgttcgggttcccagtccactacacagatgtcagcaacatgtctagactggccagacagagactgctgggaagaagctggtccgtccctgtgatcagacacctgttcgcccctctgaaggagtacttcgcctgcgtgagcagcggcaacagcaacgccaacagccggggccccagcttctctagcggcctggtgccactgtccctgagagggagccacatgggccccatggagatctacaaaaccgtgagcgcctggaagcggcagcctgtgcgcgtgctgagcctgtttcggaatatcgataaagtcctgaaaagcctgggattcctggagagcggctctggctccggcggtggcaccctgaagtacgtggaggatgtgacaaacgtggtcagacgggatgtggagaagtggggccccttcgatctggtgtacggcagcacccaacccctgggcagctcttgtgaccggtgccctggctggtacatgtttcagttccaccggatcctgcagtacgccctgccgagacaggagtcccagcggccattcttttggattttcatggacaacttgctgctgaccgaggatgaccaggaaactaccactcggttcctgcagaccgaagccgtgaccctgcaggacgtgagaggccgggactaccagaacgccatgcgggtgtggtccaacatccctggactgaaaagcaagcacgcacctctgacccctaaagaagaggagtacctgcaggcccaggtgcggagcagaagcaagctggacgcccctaaggtggatctgctggtgaagaattgcctcctgcccctgagagagtacttcaagtatttcagccagaatagtctgcccctgggaggcagcggcggcggcgccctggtgacatttgaggacgtcgccgtgcggttcacccaggaggaatgggctctgctggatccttctcagaaaatcctgtaccgggacgtgatgagagagacataccggaatctgacctccgtgggcatcaactgggaatgttgggaccttgaagcctgcttcagaagcctgggaagaaacctgagagtgcaggtggtgaagagaaagtgcgagctgaccaacagcggcccctgcgccgagggcggcccaagcagcggcgcccctcctcccagcggcggcagcccagccggctccccaacctctaccgaggagggcacctctgagtccgccacccccgagagcggccctggcacctccaccgagcccagcgagggcagcgcacccggcagccctgccggcagccccacctccacagaggagggaaccagcaccgagcccagcgaaggcagcgccccaggcaccagcaccgagcctagtgagcaggagattaaacggatcaacaagatcagaagaagacttgtgaaagacagcaacaccaagaaggccggcaagacaggccccatgaaaaccctgctggttagagtgatgacacccgatctgagagagcggctggaaaacctgagaaagaagcctgaaaatatcccccagcccatcagcaatacatctagagccaacctgaataagctgctgaccgattacaccgaaatgaagaaggcgatcctgcatgtgtactgggaagagttccagaaggaccctgtgggcctgatgagccgggtggcccagcctgccagcaagaagatcgatcagaacaagctgaaacctgagatggacgagaagggcaacctgaccaccgccggctttgcctgctctcagtgtggccagcccctgttcgtgtacaagctggagcaggtgtctgagaagggcaaggcttacaccaactacttcggacggtgcaatgtggccgagcacgaaaagctgatcctgctggcccagctgaagcccgagaaggatagcgacgaagccgtgacatatagcctgggaaagtttgggcagagggccctggatttctacagcattcatgtgaccaaggagtccacccaccccgtgaagcccctggcccagatcgccggaaacagatacgcctccggacctgtgggaaaggccctgagcgacgcatgtatgggcacaatcgcctccttcctgtctaagtaccaggacatcatcatcgaacaccagaaggtggtgaagggcaaccagaagagactggagagcctgcgggagctggccggcaaggaaaacctggaataccctagcgtgaccctgccacctcagcctcacaccaaggagggcgttgatgcctacaacgaagtgatcgcccgggtgcgaatgtgggtgaacctgaacctgtggcagaagctgaagctaagcagagatgatgccaagcctctgctgagactgaagggattcccttcctttcctctggtcgagagacaggccaacgaagtggactggtgggacatggtgtgtaacgtgaagaagctgatcaacgagaaaaaggaggatggcaaggtgttttggcagaatctggctggctacaagagacaggaagccctgagaccatacctgagcagcgaggaagatcggaagaagggaaagaaattcgctcggtaccagctgggcgacctgctgctgcacctggaaaagaagcacggcgaggactggggaaaggtgtacgacgaggcctgggagcggattgacaagaaagtggaaggcctgagcaagcacatcaagctggaagaggaacggagaagcgaggacgcccagagcaaggccgccctgaccgactggctgcgggctaaggccagcttcgtgatcgagggcctgaaggaggccgacaaggacgagttctgcagatgcgagctgaagctgcagaagtggtacggggacctgcggggaaagcccttcgccatcgaagccgagaacagcatcctggacatcagcggcttcagcaagcagtacaactgtgccttcatctggcagaaggacggcgtgaagaagctgaacctgtacctgatcatcaactacttcaagggcggcaagctgcggttcaagaagatcaaacctgaagccttcgaagccaacagattctacaccgtgatcaacaaaaagagcggcgagatcgtgcccatggaggtgaacttcaacttcgacgaccccaacctgatcatcctgcctctggcctttggcaagagacagggcagagaattcatctggaacgacctgctgtccctggaaaccggcagcctgaagctggccaacggaagagtgatcgagaagacactgtacaacagaagaacccggcaggatgagcctgccctgttcgtggccctgaccttcgagcggcgggaggtcctggactcctccaatatcaaaccaatgaacctgatcggcgtggcaagaggcgaaaacatccccgccgtgatcgccctgaccgaccccgagggctgcccactgagccggtttaaggatagcctgggaaacccaacccacatcctgagaatcggcgagagctataaggagaagcagcggaccatccaggccaagaaggaggtggagcagcggagagccggcggctacagccggaagtacgccagcaaagccaagaatctggcagacgatatggtgagaaacaccgctagagatctgctgtactacgccgtgacccaggatgccatgctgatcttcgccaacctgagccggggcttcggccggcagggcaagcggaccttcatggccgagagacagtacacacggatggaggactggctgaccgccaagctggcctacgagggcctgagcaagacctacctgtccaagacactggcccagtacacctccaagacatgcagcaactgtgggtttaccatcaccagcgccgactacgacagggtgctggagaagctgaagaagacagcaacaggctggatgaccacaattaacggcaaggagctgaaggtggagggccagattacctactacaacagatacaagagacagaacgtagtcaaggacctgtccgtcgagctggatagactgagcgaagaatctgtgaacaacgacatctcctcctggacaaagggcagaagcggagaagctctgagcctcctgaagaaaagattctcccatagacccgtgcaggagaagttcgtgtgcctgaactgcggcttcgagacacacgcagccgagcaagccgccctgaacatcgccagatcctggctgttcctgcggagccaggagtacaagaaataccagacaaacaagacaaccggcaacaccgataagagagccttcgtcgagacctggcagtccttttaccggaagaagcttaaggaggtgtggaaacctgccgtgcggtctggcggatctggcggaggctcccaggccgaggtgaccttcgaggacgtggccgtgctgctgagccaggaggagtggggcctgctgggccccagccagaagggcctgtacagggaggtgatgctggagacctacaggaacctgctgagcctgggcgtgggcctggccgaccccaagcccgaggtgatcgtgcagctggagaggggcgacgagctgtgggtgctggacatgcacggcgccgagcagcccagcgtggacggcagcgccggcggcccaagcagcggcgcccctcctcccagcggcggcagcccagccggctccccaacctctaccgaggagggcacctctgagtccgccacccccgagagcggccctggcacctccaccgagcccagcgagggcagcgcacccggcagccctgccggcagccccacctccacagaggagggaaccagcaccgagcccagcgaaggcagcgccccaggcaccagcaccgagcctagtgagcaggagattaaacggatcaacaagatcagaagaagacttgtgaaagacagcaacaccaagaaggccggcaagacaggccccatgaaaaccctgctggttagagtgatgacacccgatctgagagagcggctggaaaacctgagaaagaagcctgaaaatatcccccagcccatcagcaatacatctagagccaacctgaataagctgctgaccgattacaccgaaatgaagaaggcgatcctgcatgtgtactgggaagagttccagaaggaccctgtgggcctgatgagccgggtggcccagcctgccagcaagaagatcgatcagaacaagctgaaacctgagatggacgagaagggcaacctgaccaccgccggctttgcctgctctcagtgtggccagcccctgttcgtgtacaagctggagcaggtgtctgagaagggcaaggcttacaccaactacttcggacggtgcaatgtggccgagcacgaaaagctgatcctgctggcccagctgaagcccgagaaggatagcgacgaagccgtgacatatagcctgggaaagtttgggcagagggccctggatttctacagcattcatgtgaccaaggagtccacccaccccgtgaagcccctggcccagatcgccggaaacagatacgcctccggacctgtgggaaaggccctgagcgacgcatgtatgggcacaatcgcctccttcctgtctaagtaccaggacatcatcatcgaacaccagaaggtggtgaagggcaaccagaagagactggagagcctgcgggagctggccggcaaggaaaacctggaataccctagcgtgaccctgccacctcagcctcacaccaaggagggcgttgatgcctacaacgaagtgatcgcccgggtgcgaatgtgggtgaacctgaacctgtggcagaagctgaagctaagcagagatgatgccaagcctctgctgagactgaagggattcccttcctttcctctggtcgagagacaggccaacgaagtggactggtgggacatggtgtgtaacgtgaagaagctgatcaacgagaaaaaggaggatggcaaggtgttttggcagaatctggctggctacaagagacaggaagccctgagaccatacctgagcagcgaggaagatcggaagaagggaaagaaattcgctcggtaccagctgggcgacctgctgctgcacctggaaaagaagcacggcgaggactggggaaaggtgtacgacgaggcctgggagcggattgacaagaaagtggaaggcctgagcaagcacatcaagctggaagaggaacggagaagcgaggacgcccagagcaaggccgccctgaccgactggctgcgggctaaggccagcttcgtgatcgagggcctgaaggaggccgacaaggacgagttctgcagatgcgagctgaagctgcagaagtggtacggggacctgcggggaaagcccttcgccatcgaagccgagaacagcatcctggacatcagcggcttcagcaagcagtacaactgtgccttcatctggcagaaggacggcgtgaagaagctgaacctgtacctgatcatcaactacttcaagggcggcaagctgcggttcaagaagatcaaacctgaagccttcgaagccaacagattctacaccgtgatcaacaaaaagagcggcgagatcgtgcccatggaggtgaacttcaacttcgacgaccccaacctgatcatcctgcctctggcctttggcaagagacagggcagagaattcatctggaacgacctgctgtccctggaaaccggcagcctgaagctggccaacggaagagtgatcgagaagacactgtacaacagaagaacccggcaggatgagcctgccctgttcgtggccctgaccttcgagcggcgggaggtcctggactcctccaatatcaaaccaatgaacctgatcggcgtggcaagaggcgaaaacatccccgccgtgatcgccctgaccgaccccgagggctgcccactgagccggtttaaggatagcctgggaaacccaacccacatcctgagaatcggcgagagctataaggagaagcagcggaccatccaggccaagaaggaggtggagcagcggagagccggcggctacagccggaagtacgccagcaaagccaagaatctggcagacgatatggtgagaaacaccgctagagatctgctgtactacgccgtgacccaggatgccatgctgatcttcgccaacctgagccggggcttcggccggcagggcaagcggaccttcatggccgagagacagtacacacggatggaggactggctgaccgccaagctggcctacgagggcctgagcaagacctacctgtccaagacactggcccagtacacctccaagacatgcagcaactgtgggtttaccatcaccagcgccgactacgacagggtgctggagaagctgaagaagacagcaacaggctggatgaccacaattaacggcaaggagctgaaggtggagggccagattacctactacaacagatacaagagacagaacgtagtcaaggacctgtccgtcgagctggatagactgagcgaagaatctgtgaacaacgacatctcctcctggacaaagggcagaagcggagaagctctgagcctcctgaagaaaagattctcccatagacccgtgcaggagaagttcgtgtgcctgaactgcggcttcgagacacacgcagccgagcaagccgccctgaacatcgccagatcctggctgttcctgcggagccaggagtacaagaaataccagacaaacaagacaaccggcaacaccgataagagagccttcgtcgagacctggcagtccttttaccggaagaagcttaaggaggtgtggaaacctgccgtgcggtctggcggatctggcggaggctcctcaggccgaggtgaccttcgaggacgtggccgtgctgctgagccaggaggagtggggcctgctgggccccagccagaagggcctgtacagggaggtgatgctggagacctacaggaacctgctgagcctgggcgtgggcctggccgaccccaagcccgaggtgatcgtgcagctggagaggggcgacgagctgtgggtgctggacatgcacggcgccgagcagcccagcgtggacggcagcgccggatctggctccggcagcggccccaagaaaaagagaaaagtctaagctgccttctgcggggcttgccttctggccatgcccttcttctctcccttgcacctgtacctcttggtctttgaataaagcctgagtaggaaggctagcaaaaaaaaaaaaaaaaaaaaaaaaaaaaaaaaaaaaaaaaaaaaaaaaaaaaaaaaaaaaaaaaaaaaaaaaaaaaaaaa

SEQ ID NO: 16623 - RNA, 9485 nt, synthetic construct
  source 1..9485: mol_type = other RNA
aggaaataagagagaaaagaagagtaagaagaaatataagagccaccatggcccctaagaagaagcgtaaagtgagccggatggaacgcctcgtctacgaggtgcggcagaagtgcagaaacatcgaggacatctgcatctcctgcggatctctgaacgtgaccctggagcacccactgttcatcggcggcatgtgccagaactgtaaaaactgttttctggagtgtgcctatcaatacgacgatgacggctaccagagctactgcaccatctgttgcggcggaagagaggtgctgatgtgtggaaataacaactgctgccggtgcttctgcgtggaatgcgtggacctgctggtgggccccggcgccgcccaggccgctattaaggaagatccttggaactgctacatgtgcggccacaagggcacatacggcctgctgagacggagagaggactggcctagcagactgcagatgttcttcgccaataaccacgaccaggagttcgacccccctaaggtgtaccctcccgtccccgccgagaagagaaagcccatccgggtcctgagcctgttcgatggcatcgccaccggtctgctggtgctgaaggacctgggcatccaggtggataggtacattgcctccgaggtgtgcgaggactccatcaccgtgggaatggtgcgtcatcagggcaagatcatgtacgtgggcgacgtgcggagcgtgacacagaagcatatccaggagtggggccctttcgacctggtgatcggcggcagcccttgcaatgacctgagcatcgtgaacccagcccggaagggcctgtacgagggaaccggcagactgttcttcgagttttacagactgctgcacgacgcccggcctaaggaaggcgacgaccggcccttcttttggctgttcgagaatgtggtggccatgggagtcagcgacaagcgggatattagccggttcctggagagcaaccccgtgatgatcgatgccaaggaagtgagcgccgcccaccgggccagatacttctggggcaatctgcctggcatgaacagacccctggccagcaccgtgaacgacaagctggagctgcaggagtgcctggagcacggccggatcgccaagttcagcaaggtgagaaccatcaccacccgaagcaacagcatcaaacaaggcaaggaccagcactttcctgtgttcatgaacgagaaggaggacatcctgtggtgtaccgagatggagagagtgttcgggttcccagtccactacacagatgtcagcaacatgtctagactggccagacagagactgctgggaagaagctggtccgtccctgtgatcagacacctgttcgcccctctgaaggagtacttcgcctgcgtgagcagcggcaacagcaacgccaacagccggggccccagcttctctagcggcctggtgccactgtccctgagagggagccacatgggccccatggagatctacaaaaccgtgagcgcctggaagcggcagcctgtgcgcgtgctgagcctgtttcggaatatcgataaagtcctgaaaagcctgggattcctggagagcggctctggctccggcggtggcaccctgaagtacgtggaggatgtgacaaacgtggtcagacgggatgtggagaagtggggccccttcgatctggtgtacggcagcacccaacccctgggcagctcttgtgaccggtgccctggctggtacatgtttcagttccaccggatcctgcagtacgccctgccgagacaggagtcccagcggccattcttttggattttcatggacaacttgctgctgaccgaggatgaccaggaaactaccactcggttcctgcagaccgaagccgtgaccctgcaggacgtgagaggccgggactaccagaacgccatgcgggtgtggtccaacatccctggactgaaaagcaagcacgcacctctgacccctaaagaagaggagtacctgcaggcccaggtgcggagcagaagcaagctggacgcccctaaggtggatctgctggtgaagaattgcctcctgcccctgagagagtacttcaagtatttcagccagaatagtctgcccctgggaggcagcggcggcggcgccctggtgacatttgaggacgtcgccgtgcggttcacccaggaggaatgggctctgctggatccttctcagaaaatcctgtaccgggacgtgatgagagagacataccggaatctgacctccgtgggcatcaactgggaatgttgggaccttgaagcctgcttcagaagcctgggaagaaacctgagagtgcaggtggtgaagagaaagtgcgagctgaccaacagcggcccctgcgccgagggcggcccaagcagcggcgcccctcctcccagcggcggcagcccagccggctccccaacctctaccgaggagggcacctctgagtccgccacccccgagagcggccctggcacctccaccgagcccagcgagggcagcgcacccggcagccctgccggcagccccacctccacagaggagggaaccagcaccgagcccagcgaaggcagcgccccaggcaccagcaccgagcctagtgagcaggagattaaacggatcaacaagatcagaagaagacttgtgaaagacagcaacaccaagaaggccggcaagacaggccccatgaaaaccctgctggttagagtgatgacacccgatctgagagagcggctggaaaacctgagaaagaagcctgaaaatatcccccagcccatcagcaatacatctagagccaacctgaataagctgctgaccgattacaccgaaatgaagaaggcgatcctgcatgtgtactgggaagagttccagaaggaccctgtgggcctgatgagccgggtggcccagcctgccagcaagaagatcgatcagaacaagctgaaacctgagatggacgagaagggcaacctgaccaccgccggctttgcctgctctcagtgtggccagcccctgttcgtgtacaagctggagcaggtgtctgagaagggcaaggcttacaccaactacttcggacggtgcaatgtggccgagcacgaaaagctgatcctgctggcccagctgaagcccgagaaggatagcgacgaagccgtgacatatagcctgggaaagtttgggcagagggccctggatttctacagcattcatgtgaccaaggagtccacccaccccgtgaagcccctggcccagatcgccggaaacagatacgcctccggacctgtgggaaaggccctgagcgacgcatgtatgggcacaatcgcctccttcctgtctaagtaccaggacatcatcatcgaacaccagaaggtggtgaagggcaaccagaagagactggagagcctgcgggagctggccggcaaggaaaacctggaataccctagcgtgaccctgccacctcagcctcacaccaaggagggcgttgatgcctacaacgaagtgatcgcccgggtgcgaatgtgggtgaacctgaacctgtggcagaagctgaagctaagcagagatgatgccaagcctctgctgagactgaagggattcccttcctttcctctggtcgagagacaggccaacgaagtggactggtgggacatggtgtgtaacgtgaagaagctgatcaacgagaaaaaggaggatggcaaggtgttttggcagaatctggctggctacaagagacaggaagccctgagaccatacctgagcagcgaggaagatcggaagaagggaaagaaattcgctcggtaccagctgggcgacctgctgctgcacctggaaaagaagcacggcgaggactggggaaaggtgtacgacgaggcctgggagcggattgacaagaaagtggaaggcctgagcaagcacatcaagctggaagaggaacggagaagcgaggacgcccagagcaaggccgccctgaccgactggctgcgggctaaggccagcttcgtgatcgagggcctgaaggaggccgacaaggacgagttctgcagatgcgagctgaagctgcagaagtggtacggggacctgcggggaaagcccttcgccatcgaagccgagaacagcatcctggacatcagcggcttcagcaagcagtacaactgtgccttcatctggcagaaggacggcgtgaagaagctgaacctgtacctgatcatcaactacttcaagggcggcaagctgcggttcaagaagatcaaacctgaagccttcgaagccaacagattctacaccgtgatcaacaaaaagagcggcgagatcgtgcccatggaggtgaacttcaacttcgacgaccccaacctgatcatcctgcctctggcctttggcaagagacagggcagagaattcatctggaacgacctgctgtccctggaaaccggcagcctgaagctggccaacggaagagtgatcgagaagacactgtacaacagaagaacccggcaggatgagcctgccctgttcgtggccctgaccttcgagcggcgggaggtcctggactcctccaatatcaaaccaatgaacctgatcggcgtggcaagaggcgaaaacatccccgccgtgatcgccctgaccgaccccgagggctgcccactgagccggtttaaggatagcctgggaaacccaacccacatcctgagaatcggcgagagctataaggagaagcagcggaccatccaggccaagaaggaggtggagcagcggagagccggcggctacagccggaagtacgccagcaaagccaagaatctggcagacgatatggtgagaaacaccgctagagatctgctgtactacgccgtgacccaggatgccatgctgatcttcgccaacctgagccggggcttcggccggcagggcaagcggaccttcatggccgagagacagtacacacggatggaggactggctgaccgccaagctggcctacgagggcctgagcaagacctacctgtccaagacactggcccagtacacctccaagacatgcagcaactgtgggtttaccatcaccagcgccgactacgacagggtgctggagaagctgaagaagacagcaacaggctggatgaccacaattaacggcaaggagctgaaggtggagggccagattacctactacaacagatacaagagacagaacgtagtcaaggacctgtccgtcgagctggatagactgagcgaagaatctgtgaacaacgacatctcctcctggacaaagggcagaagcggagaagctctgagcctcctgaagaaaagattctcccatagacccgtgcaggagaagttcgtgtgcctgaactgcggcttcgagacacacgcagccgagcaagccgccctgaacatcgccagatcctggctgttcctgcggagccaggagtacaagaaataccagacaaacaagacaaccggcaacaccgataagagagccttcgtcgagacctggcagtccttttaccggaagaagcttaaggaggtgtggaaacctgccgtgcggtctggcggatctggcggaggctccccccagagcctgctgagcttcggcgacgtggccgtggacttcagccaggaggagtgggagtacctggactacgaccagaggaccctgtacatggacgtgatgctggagaactacagcaacctggtgttcgtggagaaccacaggatctacggcaagtacgagaaggacctggaccagggcaccaagcacatcgcccacgaggacgtgatcatccaggagaagagctacaagtgcaacgagctgggcggcccaagcagcggcgcccctcctcccagcggcggcagcccagccggctccccaacctctaccgaggagggcacctctgagtccgccacccccgagagcggccctggcacctccaccgagcccagcgagggcagcgcacccggcagccctgccggcagccccacctccacagaggagggaaccagcaccgagcccagcgaaggcagcgccccaggcaccagcaccgagcctagtgagcaggagattaaacggatcaacaagatcagaagaagacttgtgaaagacagcaacaccaagaaggccggcaagacaggccccatgaaaaccctgctggttagagtgatgacacccgatctgagagagcggctggaaaacctgagaaagaagcctgaaaatatcccccagcccatcagcaatacatctagagccaacctgaataagctgctgaccgattacaccgaaatgaagaaggcgatcctgcatgtgtactgggaagagttccagaaggaccctgtgggcctgatgagccgggtggcccagcctgccagcaagaagatcgatcagaacaagctgaaacctgagatggacgagaagggcaacctgaccaccgccggctttgcctgctctcagtgtggccagcccctgttcgtgtacaagctggagcaggtgtctgagaagggcaaggcttacaccaactacttcggacggtgcaatgtggccgagcacgaaaagctgatcctgctggcccagctgaagcccgagaaggatagcgacgaagccgtgacatatagcctgggaaagtttgggcagagggccctggatttctacagcattcatgtgaccaaggagtccacccaccccgtgaagcccctggcccagatcgccggaaacagatacgcctccggacctgtgggaaaggccctgagcgacgcatgtatgggcacaatcgcctccttcctgtctaagtaccaggacatcatcatcgaacaccagaaggtggtgaagggcaaccagaagagactggagagcctgcgggagctggccggcaaggaaaacctggaataccctagcgtgaccctgccacctcagcctcacaccaaggagggcgttgatgcctacaacgaagtgatcgcccgggtgcgaatgtgggtgaacctgaacctgtggcagaagctgaagctaagcagagatgatgccaagcctctgctgagactgaagggattcccttcctttcctctggtcgagagacaggccaacgaagtggactggtgggacatggtgtgtaacgtgaagaagctgatcaacgagaaaaaggaggatggcaaggtgttttggcagaatctggctggctacaagagacaggaagccctgagaccatacctgagcagcgaggaagatcggaagaagggaaagaaattcgctcggtaccagctgggcgacctgctgctgcacctggaaaagaagcacggcgaggactggggaaaggtgtacgacgaggcctgggagcggattgacaagaaagtggaaggcctgagcaagcacatcaagctggaagaggaacggagaagcgaggacgcccagagcaaggccgccctgaccgactggctgcgggctaaggccagcttcgtgatcgagggcctgaaggaggccgacaaggacgagttctgcagatgcgagctgaagctgcagaagtggtacggggacctgcggggaaagcccttcgccatcgaagccgagaacagcatcctggacatcagcggcttcagcaagcagtacaactgtgccttcatctggcagaaggacggcgtgaagaagctgaacctgtacctgatcatcaactacttcaagggcggcaagctgcggttcaagaagatcaaacctgaagccttcgaagccaacagattctacaccgtgatcaacaaaaagagcggcgagatcgtgcccatggaggtgaacttcaacttcgacgaccccaacctgatcatcctgcctctggcctttggcaagagacagggcagagaattcatctggaacgacctgctgtccctggaaaccggcagcctgaagctggccaacggaagagtgatcgagaagacactgtacaacagaagaacccggcaggatgagcctgccctgttcgtggccctgaccttcgagcggcgggaggtcctggactcctccaatatcaaaccaatgaacctgatcggcgtggcaagaggcgaaaacatccccgccgtgatcgccctgaccgaccccgagggctgcccactgagccggtttaaggatagcctgggaaacccaacccacatcctgagaatcggcgagagctataaggagaagcagcggaccatccaggccaagaaggaggtggagcagcggagagccggcggctacagccggaagtacgccagcaaagccaagaatctggcagacgatatggtgagaaacaccgctagagatctgctgtactacgccgtgacccaggatgccatgctgatcttcgccaacctgagccggggcttcggccggcagggcaagcggaccttcatggccgagagacagtacacacggatggaggactggctgaccgccaagctggcctacgagggcctgagcaagacctacctgtccaagacactggcccagtacacctccaagacatgcagcaactgtgggtttaccatcaccagcgccgactacgacagggtgctggagaagctgaagaagacagcaacaggctggatgaccacaattaacggcaaggagctgaaggtggagggccagattacctactacaacagatacaagagacagaacgtagtcaaggacctgtccgtcgagctggatagactgagcgaagaatctgtgaacaacgacatctcctcctggacaaagggcagaagcggagaagctctgagcctcctgaagaaaagattctcccatagacccgtgcaggagaagttcgtgtgcctgaactgcggcttcgagacacacgcagccgagcaagccgccctgaacatcgccagatcctggctgttcctgcggagccaggagtacaagaaataccagacaaacaagacaaccggcaacaccgataagagagccttcgtcgagacctggcagtccttttaccggaagaagcttaaggaggtgtggaaacctgccgtgcggtctggcggatctggcggaggctcctccccagagcctgctgagcttcggcgacgtggccgtggacttcagccaggaggagtgggagtacctggactacgaccagaggaccctgtacatggacgtgatgctggagaactacagcaacctggtgttcgtggagaaccacaggatctacggcaagtacgagaaggacctggaccagggcaccaagcacatcgcccacgaggacgtgatcatccaggagaagagctacaagtgcaacgagctgggatctggctccggcagcggccccaagaaaaagagaaaagtctaagctgccttctgcggggcttgccttctggccatgcccttcttctctcccttgcacctgtacctcttggtctttgaataaagcctgagtaggaaggctagcaaaaaaaaaaaaaaaaaaaaaaaaaaaaaaaaaaaaaaaaaaaaaaaaaaaaaaaaaaaaaaaaaaaaaaaaaaaaaaaa

SEQ ID NO: 16624 - RNA, 9485 nt, synthetic construct
  source 1..9485: mol_type = other RNA
aggaaataagagagaaaagaagagtaagaagaaatataagagccaccatggcccctaagaagaagcgtaaagtgagccggatggaacgcctcgtctacgaggtgcggcagaagtgcagaaacatcgaggacatctgcatctcctgcggatctctgaacgtgaccctggagcacccactgttcatcggcggcatgtgccagaactgtaaaaactgttttctggagtgtgcctatcaatacgacgatgacggctaccagagctactgcaccatctgttgcggcggaagagaggtgctgatgtgtggaaataacaactgctgccggtgcttctgcgtggaatgcgtggacctgctggtgggccccggcgccgcccaggccgctattaaggaagatccttggaactgctacatgtgcggccacaagggcacatacggcctgctgagacggagagaggactggcctagcagactgcagatgttcttcgccaataaccacgaccaggagttcgacccccctaaggtgtaccctcccgtccccgccgagaagagaaagcccatccgggtcctgagcctgttcgatggcatcgccaccggtctgctggtgctgaaggacctgggcatccaggtggataggtacattgcctccgaggtgtgcgaggactccatcaccgtgggaatggtgcgtcatcagggcaagatcatgtacgtgggcgacgtgcggagcgtgacacagaagcatatccaggagtggggccctttcgacctggtgatcggcggcagcccttgcaatgacctgagcatcgtgaacccagcccggaagggcctgtacgagggaaccggcagactgttcttcgagttttacagactgctgcacgacgcccggcctaaggaaggcgacgaccggcccttcttttggctgttcgagaatgtggtggccatgggagtcagcgacaagcgggatattagccggttcctggagagcaaccccgtgatgatcgatgccaaggaagtgagcgccgcccaccgggccagatacttctggggcaatctgcctggcatgaacagacccctggccagcaccgtgaacgacaagctggagctgcaggagtgcctggagcacggccggatcgccaagttcagcaaggtgagaaccatcaccacccgaagcaacagcatcaaacaaggcaaggaccagcactttcctgtgttcatgaacgagaaggaggacatcctgtggtgtaccgagatggagagagtgttcgggttcccagtccactacacagatgtcagcaacatgtctagactggccagacagagactgctgggaagaagctggtccgtccctgtgatcagacacctgttcgcccctctgaaggagtacttcgcctgcgtgagcagcggcaacagcaacgccaacagccggggccccagcttctctagcggcctggtgccactgtccctgagagggagccacatgggccccatggagatctacaaaaccgtgagcgcctggaagcggcagcctgtgcgcgtgctgagcctgtttcggaatatcgataaagtcctgaaaagcctgggattcctggagagcggctctggctccggcggtggcaccctgaagtacgtggaggatgtgacaaacgtggtcagacgggatgtggagaagtggggccccttcgatctggtgtacggcagcacccaacccctgggcagctcttgtgaccggtgccctggctggtacatgtttcagttccaccggatcctgcagtacgccctgccgagacaggagtcccagcggccattcttttggattttcatggacaacttgctgctgaccgaggatgaccaggaaactaccactcggttcctgcagaccgaagccgtgaccctgcaggacgtgagaggccgggactaccagaacgccatgcgggtgtggtccaacatccctggactgaaaagcaagcacgcacctctgacccctaaagaagaggagtacctgcaggcccaggtgcggagcagaagcaagctggacgcccctaaggtggatctgctggtgaagaattgcctcctgcccctgagagagtacttcaagtatttcagccagaatagtctgcccctgggaggcagcggcggcggcgccctggtgacatttgaggacgtcgccgtgcggttcacccaggaggaatgggctctgctggatccttctcagaaaatcctgtaccgggacgtgatgagagagacataccggaatctgacctccgtgggcatcaactgggaatgttgggaccttgaagcctgcttcagaagcctgggaagaaacctgagagtgcaggtggtgaagagaaagtgcgagctgaccaacagcggcccctgcgccgagggcggcccaagcagcggcgcccctcctcccagcggcggcagcccagccggctccccaacctctaccgaggagggcacctctgagtccgccacccccgagagcggccctggcacctccaccgagcccagcgagggcagcgcacccggcagccctgccggcagccccacctccacagaggagggaaccagcaccgagcccagcgaaggcagcgccccaggcaccagcaccgagcctagtgagcaggagattaaacggatcaacaagatcagaagaagacttgtgaaagacagcaacaccaagaaggccggcaagacaggccccatgaaaaccctgctggttagagtgatgacacccgatctgagagagcggctggaaaacctgagaaagaagcctgaaaatatcccccagcccatcagcaatacatctagagccaacctgaataagctgctgaccgattacaccgaaatgaagaaggcgatcctgcatgtgtactgggaagagttccagaaggaccctgtgggcctgatgagccgggtggcccagcctgccagcaagaagatcgatcagaacaagctgaaacctgagatggacgagaagggcaacctgaccaccgccggctttgcctgctctcagtgtggccagcccctgttcgtgtacaagctggagcaggtgtctgagaagggcaaggcttacaccaactacttcggacggtgcaatgtggccgagcacgaaaagctgatcctgctggcccagctgaagcccgagaaggatagcgacgaagccgtgacatatagcctgggaaagtttgggcagagggccctggatttctacagcattcatgtgaccaaggagtccacccaccccgtgaagcccctggcccagatcgccggaaacagatacgcctccggacctgtgggaaaggccctgagcgacgcatgtatgggcacaatcgcctccttcctgtctaagtaccaggacatcatcatcgaacaccagaaggtggtgaagggcaaccagaagagactggagagcctgcgggagctggccggcaaggaaaacctggaataccctagcgtgaccctgccacctcagcctcacaccaaggagggcgttgatgcctacaacgaagtgatcgcccgggtgcgaatgtgggtgaacctgaacctgtggcagaagctgaagctaagcagagatgatgccaagcctctgctgagactgaagggattcccttcctttcctctggtcgagagacaggccaacgaagtggactggtgggacatggtgtgtaacgtgaagaagctgatcaacgagaaaaaggaggatggcaaggtgttttggcagaatctggctggctacaagagacaggaagccctgagaccatacctgagcagcgaggaagatcggaagaagggaaagaaattcgctcggtaccagctgggcgacctgctgctgcacctggaaaagaagcacggcgaggactggggaaaggtgtacgacgaggcctgggagcggattgacaagaaagtggaaggcctgagcaagcacatcaagctggaagaggaacggagaagcgaggacgcccagagcaaggccgccctgaccgactggctgcgggctaaggccagcttcgtgatcgagggcctgaaggaggccgacaaggacgagttctgcagatgcgagctgaagctgcagaagtggtacggggacctgcggggaaagcccttcgccatcgaagccgagaacagcatcctggacatcagcggcttcagcaagcagtacaactgtgccttcatctggcagaaggacggcgtgaagaagctgaacctgtacctgatcatcaactacttcaagggcggcaagctgcggttcaagaagatcaaacctgaagccttcgaagccaacagattctacaccgtgatcaacaaaaagagcggcgagatcgtgcccatggaggtgaacttcaacttcgacgaccccaacctgatcatcctgcctctggcctttggcaagagacagggcagagaattcatctggaacgacctgctgtccctggaaaccggcagcctgaagctggccaacggaagagtgatcgagaagacactgtacaacagaagaacccggcaggatgagcctgccctgttcgtggccctgaccttcgagcggcgggaggtcctggactcctccaatatcaaaccaatgaacctgatcggcgtggcaagaggcgaaaacatccccgccgtgatcgccctgaccgaccccgagggctgcccactgagccggtttaaggatagcctgggaaacccaacccacatcctgagaatcggcgagagctataaggagaagcagcggaccatccaggccaagaaggaggtggagcagcggagagccggcggctacagccggaagtacgccagcaaagccaagaatctggcagacgatatggtgagaaacaccgctagagatctgctgtactacgccgtgacccaggatgccatgctgatcttcgccaacctgagccggggcttcggccggcagggcaagcggaccttcatggccgagagacagtacacacggatggaggactggctgaccgccaagctggcctacgagggcctgagcaagacctacctgtccaagacactggcccagtacacctccaagacatgcagcaactgtgggtttaccatcaccagcgccgactacgacagggtgctggagaagctgaagaagacagcaacaggctggatgaccacaattaacggcaaggagctgaaggtggagggccagattacctactacaacagatacaagagacagaacgtagtcaaggacctgtccgtcgagctggatagactgagcgaagaatctgtgaacaacgacatctcctcctggacaaagggcagaagcggagaagctctgagcctcctgaagaaaagattctcccatagacccgtgcaggagaagttcgtgtgcctgaactgcggcttcgagacacacgcagccgagcaagccgccctgaacatcgccagatcctggctgttcctgcggagccaggagtacaagaaataccagacaaacaagacaaccggcaacaccgataagagagccttcgtcgagacctggcagtccttttaccggaagaagcttaaggaggtgtggaaacctgccgtgcggtctggcggatctggcggaggctccgccaggggcctggtgaccttcgaggacgtggccgtgtacttcagcagggaggagtggggcctgctgaacctgacccagaggagcctgtacagggacgtgatgctggagaacttcgccctgatcggcagcctgggcttcgcccccagcaggagccacgtggtggcccagctggagagcgaggaggagctgtgggtgcccagcatggtggacctgaccctgggcagcagggccgaggccaggaggggcggcccaagcagcggcgcccctcctcccagcggcggcagcccagccggctccccaacctctaccgaggagggcacctctgagtccgccacccccgagagcggccctggcacctccaccgagcccagcgagggcagcgcacccggcagccctgccggcagccccacctccacagaggagggaaccagcaccgagcccagcgaaggcagcgccccaggcaccagcaccgagcctagtgagcaggagattaaacggatcaacaagatcagaagaagacttgtgaaagacagcaacaccaagaaggccggcaagacaggccccatgaaaaccctgctggttagagtgatgacacccgatctgagagagcggctggaaaacctgagaaagaagcctgaaaatatcccccagcccatcagcaatacatctagagccaacctgaataagctgctgaccgattacaccgaaatgaagaaggcgatcctgcatgtgtactgggaagagttccagaaggaccctgtgggcctgatgagccgggtggcccagcctgccagcaagaagatcgatcagaacaagctgaaacctgagatggacgagaagggcaacctgaccaccgccggctttgcctgctctcagtgtggccagcccctgttcgtgtacaagctggagcaggtgtctgagaagggcaaggcttacaccaactacttcggacggtgcaatgtggccgagcacgaaaagctgatcctgctggcccagctgaagcccgagaaggatagcgacgaagccgtgacatatagcctgggaaagtttgggcagagggccctggatttctacagcattcatgtgaccaaggagtccacccaccccgtgaagcccctggcccagatcgccggaaacagatacgcctccggacctgtgggaaaggccctgagcgacgcatgtatgggcacaatcgcctccttcctgtctaagtaccaggacatcatcatcgaacaccagaaggtggtgaagggcaaccagaagagactggagagcctgcgggagctggccggcaaggaaaacctggaataccctagcgtgaccctgccacctcagcctcacaccaaggagggcgttgatgcctacaacgaagtgatcgcccgggtgcgaatgtgggtgaacctgaacctgtggcagaagctgaagctaagcagagatgatgccaagcctctgctgagactgaagggattcccttcctttcctctggtcgagagacaggccaacgaagtggactggtgggacatggtgtgtaacgtgaagaagctgatcaacgagaaaaaggaggatggcaaggtgttttggcagaatctggctggctacaagagacaggaagccctgagaccatacctgagcagcgaggaagatcggaagaagggaaagaaattcgctcggtaccagctgggcgacctgctgctgcacctggaaaagaagcacggcgaggactggggaaaggtgtacgacgaggcctgggagcggattgacaagaaagtggaaggcctgagcaagcacatcaagctggaagaggaacggagaagcgaggacgcccagagcaaggccgccctgaccgactggctgcgggctaaggccagcttcgtgatcgagggcctgaaggaggccgacaaggacgagttctgcagatgcgagctgaagctgcagaagtggtacggggacctgcggggaaagcccttcgccatcgaagccgagaacagcatcctggacatcagcggcttcagcaagcagtacaactgtgccttcatctggcagaaggacggcgtgaagaagctgaacctgtacctgatcatcaactacttcaagggcggcaagctgcggttcaagaagatcaaacctgaagccttcgaagccaacagattctacaccgtgatcaacaaaaagagcggcgagatcgtgcccatggaggtgaacttcaacttcgacgaccccaacctgatcatcctgcctctggcctttggcaagagacagggcagagaattcatctggaacgacctgctgtccctggaaaccggcagcctgaagctggccaacggaagagtgatcgagaagacactgtacaacagaagaacccggcaggatgagcctgccctgttcgtggccctgaccttcgagcggcgggaggtcctggactcctccaatatcaaaccaatgaacctgatcggcgtggcaagaggcgaaaacatccccgccgtgatcgccctgaccgaccccgagggctgcccactgagccggtttaaggatagcctgggaaacccaacccacatcctgagaatcggcgagagctataaggagaagcagcggaccatccaggccaagaaggaggtggagcagcggagagccggcggctacagccggaagtacgccagcaaagccaagaatctggcagacgatatggtgagaaacaccgctagagatctgctgtactacgccgtgacccaggatgccatgctgatcttcgccaacctgagccggggcttcggccggcagggcaagcggaccttcatggccgagagacagtacacacggatggaggactggctgaccgccaagctggcctacgagggcctgagcaagacctacctgtccaagacactggcccagtacacctccaagacatgcagcaactgtgggtttaccatcaccagcgccgactacgacagggtgctggagaagctgaagaagacagcaacaggctggatgaccacaattaacggcaaggagctgaaggtggagggccagattacctactacaacagatacaagagacagaacgtagtcaaggacctgtccgtcgagctggatagactgagcgaagaatctgtgaacaacgacatctcctcctggacaaagggcagaagcggagaagctctgagcctcctgaagaaaagattctcccatagacccgtgcaggagaagttcgtgtgcctgaactgcggcttcgagacacacgcagccgagcaagccgccctgaacatcgccagatcctggctgttcctgcggagccaggagtacaagaaataccagacaaacaagacaaccggcaacaccgataagagagccttcgtcgagacctggcagtccttttaccggaagaagcttaaggaggtgtggaaacctgccgtgcggtctggcggatctggcggaggctcctgccaggggcctggtgaccttcgaggacgtggccgtgtacttcagcagggaggagtggggcctgctgaacctgacccagaggagcctgtacagggacgtgatgctggagaacttcgccctgatcggcagcctgggcttcgcccccagcaggagccacgtggtggcccagctggagagcgaggaggagctgtgggtgcccagcatggtggacctgaccctgggcagcagggccgaggccaggaggggatctggctccggcagcggccccaagaaaaagagaaaagtctaagctgccttctgcggggcttgccttctggccatgcccttcttctctcccttgcacctgtacctcttggtctttgaataaagcctgagtaggaaggctagcaaaaaaaaaaaaaaaaaaaaaaaaaaaaaaaaaaaaaaaaaaaaaaaaaaaaaaaaaaaaaaaaaaaaaaaaaaaaaaaa

SEQ ID NO: 16625 - RNA, 9485 nt, synthetic construct
  source 1..9485: mol_type = other RNA
aggaaataagagagaaaagaagagtaagaagaaatataagagccaccatggcccctaagaagaagcgtaaagtgagccggatggaacgcctcgtctacgaggtgcggcagaagtgcagaaacatcgaggacatctgcatctcctgcggatctctgaacgtgaccctggagcacccactgttcatcggcggcatgtgccagaactgtaaaaactgttttctggagtgtgcctatcaatacgacgatgacggctaccagagctactgcaccatctgttgcggcggaagagaggtgctgatgtgtggaaataacaactgctgccggtgcttctgcgtggaatgcgtggacctgctggtgggccccggcgccgcccaggccgctattaaggaagatccttggaactgctacatgtgcggccacaagggcacatacggcctgctgagacggagagaggactggcctagcagactgcagatgttcttcgccaataaccacgaccaggagttcgacccccctaaggtgtaccctcccgtccccgccgagaagagaaagcccatccgggtcctgagcctgttcgatggcatcgccaccggtctgctggtgctgaaggacctgggcatccaggtggataggtacattgcctccgaggtgtgcgaggactccatcaccgtgggaatggtgcgtcatcagggcaagatcatgtacgtgggcgacgtgcggagcgtgacacagaagcatatccaggagtggggccctttcgacctggtgatcggcggcagcccttgcaatgacctgagcatcgtgaacccagcccggaagggcctgtacgagggaaccggcagactgttcttcgagttttacagactgctgcacgacgcccggcctaaggaaggcgacgaccggcccttcttttggctgttcgagaatgtggtggccatgggagtcagcgacaagcgggatattagccggttcctggagagcaaccccgtgatgatcgatgccaaggaagtgagcgccgcccaccgggccagatacttctggggcaatctgcctggcatgaacagacccctggccagcaccgtgaacgacaagctggagctgcaggagtgcctggagcacggccggatcgccaagttcagcaaggtgagaaccatcaccacccgaagcaacagcatcaaacaaggcaaggaccagcactttcctgtgttcatgaacgagaaggaggacatcctgtggtgtaccgagatggagagagtgttcgggttcccagtccactacacagatgtcagcaacatgtctagactggccagacagagactgctgggaagaagctggtccgtccctgtgatcagacacctgttcgcccctctgaaggagtacttcgcctgcgtgagcagcggcaacagcaacgccaacagccggggccccagcttctctagcggcctggtgccactgtccctgagagggagccacatgggccccatggagatctacaaaaccgtgagcgcctggaagcggcagcctgtgcgcgtgctgagcctgtttcggaatatcgataaagtcctgaaaagcctgggattcctggagagcggctctggctccggcggtggcaccctgaagtacgtggaggatgtgacaaacgtggtcagacgggatgtggagaagtggggccccttcgatctggtgtacggcagcacccaacccctgggcagctcttgtgaccggtgccctggctggtacatgtttcagttccaccggatcctgcagtacgccctgccgagacaggagtcccagcggccattcttttggattttcatggacaacttgctgctgaccgaggatgaccaggaaactaccactcggttcctgcagaccgaagccgtgaccctgcaggacgtgagaggccgggactaccagaacgccatgcgggtgtggtccaacatccctggactgaaaagcaagcacgcacctctgacccctaaagaagaggagtacctgcaggcccaggtgcggagcagaagcaagctggacgcccctaaggtggatctgctggtgaagaattgcctcctgcccctgagagagtacttcaagtatttcagccagaatagtctgcccctgggaggcagcggcggcggcgccctggtgacatttgaggacgtcgccgtgcggttcacccaggaggaatgggctctgctggatccttctcagaaaatcctgtaccgggacgtgatgagagagacataccggaatctgacctccgtgggcatcaactgggaatgttgggaccttgaagcctgcttcagaagcctgggaagaaacctgagagtgcaggtggtgaagagaaagtgcgagctgaccaacagcggcccctgcgccgagggcggcccaagcagcggcgcccctcctcccagcggcggcagcccagccggctccccaacctctaccgaggagggcacctctgagtccgccacccccgagagcggccctggcacctccaccgagcccagcgagggcagcgcacccggcagccctgccggcagccccacctccacagaggagggaaccagcaccgagcccagcgaaggcagcgccccaggcaccagcaccgagcctagtgagcaggagattaaacggatcaacaagatcagaagaagacttgtgaaagacagcaacaccaagaaggccggcaagacaggccccatgaaaaccctgctggttagagtgatgacacccgatctgagagagcggctggaaaacctgagaaagaagcctgaaaatatcccccagcccatcagcaatacatctagagccaacctgaataagctgctgaccgattacaccgaaatgaagaaggcgatcctgcatgtgtactgggaagagttccagaaggaccctgtgggcctgatgagccgggtggcccagcctgccagcaagaagatcgatcagaacaagctgaaacctgagatggacgagaagggcaacctgaccaccgccggctttgcctgctctcagtgtggccagcccctgttcgtgtacaagctggagcaggtgtctgagaagggcaaggcttacaccaactacttcggacggtgcaatgtggccgagcacgaaaagctgatcctgctggcccagctgaagcccgagaaggatagcgacgaagccgtgacatatagcctgggaaagtttgggcagagggccctggatttctacagcattcatgtgaccaaggagtccacccaccccgtgaagcccctggcccagatcgccggaaacagatacgcctccggacctgtgggaaaggccctgagcgacgcatgtatgggcacaatcgcctccttcctgtctaagtaccaggacatcatcatcgaacaccagaaggtggtgaagggcaaccagaagagactggagagcctgcgggagctggccggcaaggaaaacctggaataccctagcgtgaccctgccacctcagcctcacaccaaggagggcgttgatgcctacaacgaagtgatcgcccgggtgcgaatgtgggtgaacctgaacctgtggcagaagctgaagctaagcagagatgatgccaagcctctgctgagactgaagggattcccttcctttcctctggtcgagagacaggccaacgaagtggactggtgggacatggtgtgtaacgtgaagaagctgatcaacgagaaaaaggaggatggcaaggtgttttggcagaatctggctggctacaagagacaggaagccctgagaccatacctgagcagcgaggaagatcggaagaagggaaagaaattcgctcggtaccagctgggcgacctgctgctgcacctggaaaagaagcacggcgaggactggggaaaggtgtacgacgaggcctgggagcggattgacaagaaagtggaaggcctgagcaagcacatcaagctggaagaggaacggagaagcgaggacgcccagagcaaggccgccctgaccgactggctgcgggctaaggccagcttcgtgatcgagggcctgaaggaggccgacaaggacgagttctgcagatgcgagctgaagctgcagaagtggtacggggacctgcggggaaagcccttcgccatcgaagccgagaacagcatcctggacatcagcggcttcagcaagcagtacaactgtgccttcatctggcagaaggacggcgtgaagaagctgaacctgtacctgatcatcaactacttcaagggcggcaagctgcggttcaagaagatcaaacctgaagccttcgaagccaacagattctacaccgtgatcaacaaaaagagcggcgagatcgtgcccatggaggtgaacttcaacttcgacgaccccaacctgatcatcctgcctctggcctttggcaagagacagggcagagaattcatctggaacgacctgctgtccctggaaaccggcagcctgaagctggccaacggaagagtgatcgagaagacactgtacaacagaagaacccggcaggatgagcctgccctgttcgtggccctgaccttcgagcggcgggaggtcctggactcctccaatatcaaaccaatgaacctgatcggcgtggcaagaggcgaaaacatccccgccgtgatcgccctgaccgaccccgagggctgcccactgagccggtttaaggatagcctgggaaacccaacccacatcctgagaatcggcgagagctataaggagaagcagcggaccatccaggccaagaaggaggtggagcagcggagagccggcggctacagccggaagtacgccagcaaagccaagaatctggcagacgatatggtgagaaacaccgctagagatctgctgtactacgccgtgacccaggatgccatgctgatcttcgccaacctgagccggggcttcggccggcagggcaagcggaccttcatggccgagagacagtacacacggatggaggactggctgaccgccaagctggcctacgagggcctgagcaagacctacctgtccaagacactggcccagtacacctccaagacatgcagcaactgtgggtttaccatcaccagcgccgactacgacagggtgctggagaagctgaagaagacagcaacaggctggatgaccacaattaacggcaaggagctgaaggtggagggccagattacctactacaacagatacaagagacagaacgtagtcaaggacctgtccgtcgagctggatagactgagcgaagaatctgtgaacaacgacatctcctcctggacaaagggcagaagcggagaagctctgagcctcctgaagaaaagattctcccatagacccgtgcaggagaagttcgtgtgcctgaactgcggcttcgagacacacgcagccgagcaagccgccctgaacatcgccagatcctggctgttcctgcggagccaggagtacaagaaataccagacaaacaagacaaccggcaacaccgataagagagccttcgtcgagacctggcagtccttttaccggaagaagcttaaggaggtgtggaaacctgccgtgcggtctggcggatctggcggaggctccccccaggagagcgtgaccttcaaggacgtggccgtggacttcacctgggaggagtggggctacctggacaccagccagaaggagctgtactgggaggtgatgctggagaactacaggaacctggtgagcctgggcctggccgacagcaacgtggacatgatcagccagctggagagcggcgaggcccagggcatccccgtggacagcgtgctgaccagctgctggcccgacggcgacaggaggggcggcccaagcagcggcgcccctcctcccagcggcggcagcccagccggctccccaacctctaccgaggagggcacctctgagtccgccacccccgagagcggccctggcacctccaccgagcccagcgagggcagcgcacccggcagccctgccggcagccccacctccacagaggagggaaccagcaccgagcccagcgaaggcagcgccccaggcaccagcaccgagcctagtgagcaggagattaaacggatcaacaagatcagaagaagacttgtgaaagacagcaacaccaagaaggccggcaagacaggccccatgaaaaccctgctggttagagtgatgacacccgatctgagagagcggctggaaaacctgagaaagaagcctgaaaatatcccccagcccatcagcaatacatctagagccaacctgaataagctgctgaccgattacaccgaaatgaagaaggcgatcctgcatgtgtactgggaagagttccagaaggaccctgtgggcctgatgagccgggtggcccagcctgccagcaagaagatcgatcagaacaagctgaaacctgagatggacgagaagggcaacctgaccaccgccggctttgcctgctctcagtgtggccagcccctgttcgtgtacaagctggagcaggtgtctgagaagggcaaggcttacaccaactacttcggacggtgcaatgtggccgagcacgaaaagctgatcctgctggcccagctgaagcccgagaaggatagcgacgaagccgtgacatatagcctgggaaagtttgggcagagggccctggatttctacagcattcatgtgaccaaggagtccacccaccccgtgaagcccctggcccagatcgccggaaacagatacgcctccggacctgtgggaaaggccctgagcgacgcatgtatgggcacaatcgcctccttcctgtctaagtaccaggacatcatcatcgaacaccagaaggtggtgaagggcaaccagaagagactggagagcctgcgggagctggccggcaaggaaaacctggaataccctagcgtgaccctgccacctcagcctcacaccaaggagggcgttgatgcctacaacgaagtgatcgcccgggtgcgaatgtgggtgaacctgaacctgtggcagaagctgaagctaagcagagatgatgccaagcctctgctgagactgaagggattcccttcctttcctctggtcgagagacaggccaacgaagtggactggtgggacatggtgtgtaacgtgaagaagctgatcaacgagaaaaaggaggatggcaaggtgttttggcagaatctggctggctacaagagacaggaagccctgagaccatacctgagcagcgaggaagatcggaagaagggaaagaaattcgctcggtaccagctgggcgacctgctgctgcacctggaaaagaagcacggcgaggactggggaaaggtgtacgacgaggcctgggagcggattgacaagaaagtggaaggcctgagcaagcacatcaagctggaagaggaacggagaagcgaggacgcccagagcaaggccgccctgaccgactggctgcgggctaaggccagcttcgtgatcgagggcctgaaggaggccgacaaggacgagttctgcagatgcgagctgaagctgcagaagtggtacggggacctgcggggaaagcccttcgccatcgaagccgagaacagcatcctggacatcagcggcttcagcaagcagtacaactgtgccttcatctggcagaaggacggcgtgaagaagctgaacctgtacctgatcatcaactacttcaagggcggcaagctgcggttcaagaagatcaaacctgaagccttcgaagccaacagattctacaccgtgatcaacaaaaagagcggcgagatcgtgcccatggaggtgaacttcaacttcgacgaccccaacctgatcatcctgcctctggcctttggcaagagacagggcagagaattcatctggaacgacctgctgtccctggaaaccggcagcctgaagctggccaacggaagagtgatcgagaagacactgtacaacagaagaacccggcaggatgagcctgccctgttcgtggccctgaccttcgagcggcgggaggtcctggactcctccaatatcaaaccaatgaacctgatcggcgtggcaagaggcgaaaacatccccgccgtgatcgccctgaccgaccccgagggctgcccactgagccggtttaaggatagcctgggaaacccaacccacatcctgagaatcggcgagagctataaggagaagcagcggaccatccaggccaagaaggaggtggagcagcggagagccggcggctacagccggaagtacgccagcaaagccaagaatctggcagacgatatggtgagaaacaccgctagagatctgctgtactacgccgtgacccaggatgccatgctgatcttcgccaacctgagccggggcttcggccggcagggcaagcggaccttcatggccgagagacagtacacacggatggaggactggctgaccgccaagctggcctacgagggcctgagcaagacctacctgtccaagacactggcccagtacacctccaagacatgcagcaactgtgggtttaccatcaccagcgccgactacgacagggtgctggagaagctgaagaagacagcaacaggctggatgaccacaattaacggcaaggagctgaaggtggagggccagattacctactacaacagatacaagagacagaacgtagtcaaggacctgtccgtcgagctggatagactgagcgaagaatctgtgaacaacgacatctcctcctggacaaagggcagaagcggagaagctctgagcctcctgaagaaaagattctcccatagacccgtgcaggagaagttcgtgtgcctgaactgcggcttcgagacacacgcagccgagcaagccgccctgaacatcgccagatcctggctgttcctgcggagccaggagtacaagaaataccagacaaacaagacaaccggcaacaccgataagagagccttcgtcgagacctggcagtccttttaccggaagaagcttaaggaggtgtggaaacctgccgtgcggtctggcggatctggcggaggctcctccccaggagagcgtgaccttcaaggacgtggccgtggacttcacctgggaggagtggggctacctggacaccagccagaaggagctgtactgggaggtgatgctggagaactacaggaacctggtgagcctgggcctggccgacagcaacgtggacatgatcagccagctggagagcggcgaggcccagggcatccccgtggacagcgtgctgaccagctgctggcccgacggcgacaggaggggatctggctccggcagcggccccaagaaaaagagaaaagtctaagctgccttctgcggggcttgccttctggccatgcccttcttctctcccttgcacctgtacctcttggtctttgaataaagcctgagtaggaaggctagcaaaaaaaaaaaaaaaaaaaaaaaaaaaaaaaaaaaaaaaaaaaaaaaaaaaaaaaaaaaaaaaaaaaaaaaaaaaaaaaa

SEQ ID NO: 16626 - RNA, 9485 nt, synthetic construct
  source 1..9485: mol_type = other RNA
aggaaataagagagaaaagaagagtaagaagaaatataagagccaccatggcccctaagaagaagcgtaaagtgagccggatggaacgcctcgtctacgaggtgcggcagaagtgcagaaacatcgaggacatctgcatctcctgcggatctctgaacgtgaccctggagcacccactgttcatcggcggcatgtgccagaactgtaaaaactgttttctggagtgtgcctatcaatacgacgatgacggctaccagagctactgcaccatctgttgcggcggaagagaggtgctgatgtgtggaaataacaactgctgccggtgcttctgcgtggaatgcgtggacctgctggtgggccccggcgccgcccaggccgctattaaggaagatccttggaactgctacatgtgcggccacaagggcacatacggcctgctgagacggagagaggactggcctagcagactgcagatgttcttcgccaataaccacgaccaggagttcgacccccctaaggtgtaccctcccgtccccgccgagaagagaaagcccatccgggtcctgagcctgttcgatggcatcgccaccggtctgctggtgctgaaggacctgggcatccaggtggataggtacattgcctccgaggtgtgcgaggactccatcaccgtgggaatggtgcgtcatcagggcaagatcatgtacgtgggcgacgtgcggagcgtgacacagaagcatatccaggagtggggccctttcgacctggtgatcggcggcagcccttgcaatgacctgagcatcgtgaacccagcccggaagggcctgtacgagggaaccggcagactgttcttcgagttttacagactgctgcacgacgcccggcctaaggaaggcgacgaccggcccttcttttggctgttcgagaatgtggtggccatgggagtcagcgacaagcgggatattagccggttcctggagagcaaccccgtgatgatcgatgccaaggaagtgagcgccgcccaccgggccagatacttctggggcaatctgcctggcatgaacagacccctggccagcaccgtgaacgacaagctggagctgcaggagtgcctggagcacggccggatcgccaagttcagcaaggtgagaaccatcaccacccgaagcaacagcatcaaacaaggcaaggaccagcactttcctgtgttcatgaacgagaaggaggacatcctgtggtgtaccgagatggagagagtgttcgggttcccagtccactacacagatgtcagcaacatgtctagactggccagacagagactgctgggaagaagctggtccgtccctgtgatcagacacctgttcgcccctctgaaggagtacttcgcctgcgtgagcagcggcaacagcaacgccaacagccggggccccagcttctctagcggcctggtgccactgtccctgagagggagccacatgggccccatggagatctacaaaaccgtgagcgcctggaagcggcagcctgtgcgcgtgctgagcctgtttcggaatatcgataaagtcctgaaaagcctgggattcctggagagcggctctggctccggcggtggcaccctgaagtacgtggaggatgtgacaaacgtggtcagacgggatgtggagaagtggggccccttcgatctggtgtacggcagcacccaacccctgggcagctcttgtgaccggtgccctggctggtacatgtttcagttccaccggatcctgcagtacgccctgccgagacaggagtcccagcggccattcttttggattttcatggacaacttgctgctgaccgaggatgaccaggaaactaccactcggttcctgcagaccgaagccgtgaccctgcaggacgtgagaggccgggactaccagaacgccatgcgggtgtggtccaacatccctggactgaaaagcaagcacgcacctctgacccctaaagaagaggagtacctgcaggcccaggtgcggagcagaagcaagctggacgcccctaaggtggatctgctggtgaagaattgcctcctgcccctgagagagtacttcaagtatttcagccagaatagtctgcccctgggaggcagcggcggcggcgccctggtgacatttgaggacgtcgccgtgcggttcacccaggaggaatgggctctgctggatccttctcagaaaatcctgtaccgggacgtgatgagagagacataccggaatctgacctccgtgggcatcaactgggaatgttgggaccttgaagcctgcttcagaagcctgggaagaaacctgagagtgcaggtggtgaagagaaagtgcgagctgaccaacagcggcccctgcgccgagggcggcccaagcagcggcgcccctcctcccagcggcggcagcccagccggctccccaacctctaccgaggagggcacctctgagtccgccacccccgagagcggccctggcacctccaccgagcccagcgagggcagcgcacccggcagccctgccggcagccccacctccacagaggagggaaccagcaccgagcccagcgaaggcagcgccccaggcaccagcaccgagcctagtgagcaggagattaaacggatcaacaagatcagaagaagacttgtgaaagacagcaacaccaagaaggccggcaagacaggccccatgaaaaccctgctggttagagtgatgacacccgatctgagagagcggctggaaaacctgagaaagaagcctgaaaatatcccccagcccatcagcaatacatctagagccaacctgaataagctgctgaccgattacaccgaaatgaagaaggcgatcctgcatgtgtactgggaagagttccagaaggaccctgtgggcctgatgagccgggtggcccagcctgccagcaagaagatcgatcagaacaagctgaaacctgagatggacgagaagggcaacctgaccaccgccggctttgcctgctctcagtgtggccagcccctgttcgtgtacaagctggagcaggtgtctgagaagggcaaggcttacaccaactacttcggacggtgcaatgtggccgagcacgaaaagctgatcctgctggcccagctgaagcccgagaaggatagcgacgaagccgtgacatatagcctgggaaagtttgggcagagggccctggatttctacagcattcatgtgaccaaggagtccacccaccccgtgaagcccctggcccagatcgccggaaacagatacgcctccggacctgtgggaaaggccctgagcgacgcatgtatgggcacaatcgcctccttcctgtctaagtaccaggacatcatcatcgaacaccagaaggtggtgaagggcaaccagaagagactggagagcctgcgggagctggccggcaaggaaaacctggaataccctagcgtgaccctgccacctcagcctcacaccaaggagggcgttgatgcctacaacgaagtgatcgcccgggtgcgaatgtgggtgaacctgaacctgtggcagaagctgaagctaagcagagatgatgccaagcctctgctgagactgaagggattcccttcctttcctctggtcgagagacaggccaacgaagtggactggtgggacatggtgtgtaacgtgaagaagctgatcaacgagaaaaaggaggatggcaaggtgttttggcagaatctggctggctacaagagacaggaagccctgagaccatacctgagcagcgaggaagatcggaagaagggaaagaaattcgctcggtaccagctgggcgacctgctgctgcacctggaaaagaagcacggcgaggactggggaaaggtgtacgacgaggcctgggagcggattgacaagaaagtggaaggcctgagcaagcacatcaagctggaagaggaacggagaagcgaggacgcccagagcaaggccgccctgaccgactggctgcgggctaaggccagcttcgtgatcgagggcctgaaggaggccgacaaggacgagttctgcagatgcgagctgaagctgcagaagtggtacggggacctgcggggaaagcccttcgccatcgaagccgagaacagcatcctggacatcagcggcttcagcaagcagtacaactgtgccttcatctggcagaaggacggcgtgaagaagctgaacctgtacctgatcatcaactacttcaagggcggcaagctgcggttcaagaagatcaaacctgaagccttcgaagccaacagattctacaccgtgatcaacaaaaagagcggcgagatcgtgcccatggaggtgaacttcaacttcgacgaccccaacctgatcatcctgcctctggcctttggcaagagacagggcagagaattcatctggaacgacctgctgtccctggaaaccggcagcctgaagctggccaacggaagagtgatcgagaagacactgtacaacagaagaacccggcaggatgagcctgccctgttcgtggccctgaccttcgagcggcgggaggtcctggactcctccaatatcaaaccaatgaacctgatcggcgtggcaagaggcgaaaacatccccgccgtgatcgccctgaccgaccccgagggctgcccactgagccggtttaaggatagcctgggaaacccaacccacatcctgagaatcggcgagagctataaggagaagcagcggaccatccaggccaagaaggaggtggagcagcggagagccggcggctacagccggaagtacgccagcaaagccaagaatctggcagacgatatggtgagaaacaccgctagagatctgctgtactacgccgtgacccaggatgccatgctgatcttcgccaacctgagccggggcttcggccggcagggcaagcggaccttcatggccgagagacagtacacacggatggaggactggctgaccgccaagctggcctacgagggcctgagcaagacctacctgtccaagacactggcccagtacacctccaagacatgcagcaactgtgggtttaccatcaccagcgccgactacgacagggtgctggagaagctgaagaagacagcaacaggctggatgaccacaattaacggcaaggagctgaaggtggagggccagattacctactacaacagatacaagagacagaacgtagtcaaggacctgtccgtcgagctggatagactgagcgaagaatctgtgaacaacgacatctcctcctggacaaagggcagaagcggagaagctctgagcctcctgaagaaaagattctcccatagacccgtgcaggagaagttcgtgtgcctgaactgcggcttcgagacacacgcagccgagcaagccgccctgaacatcgccagatcctggctgttcctgcggagccaggagtacaagaaataccagacaaacaagacaaccggcaacaccgataagagagccttcgtcgagacctggcagtccttttaccggaagaagcttaaggaggtgtggaaacctgccgtgcggtctggcggatctggcggaggctccgcccaggtgctggtgaccttccaggacgtggccgtggacttcacccaggaggagtggaggctgctggacctgggccagaaggagctgtacaaggaggtgatgctggagaacgtgcagaacatgctgttcctgggcctgcccgtgcccagggaggactggatcagccacttcgaccagggcagggccccctggatgctggagggcgagggccccagcaacagcaggctggacggccagaggaggggcggcccaagcagcggcgcccctcctcccagcggcggcagcccagccggctccccaacctctaccgaggagggcacctctgagtccgccacccccgagagcggccctggcacctccaccgagcccagcgagggcagcgcacccggcagccctgccggcagccccacctccacagaggagggaaccagcaccgagcccagcgaaggcagcgccccaggcaccagcaccgagcctagtgagcaggagattaaacggatcaacaagatcagaagaagacttgtgaaagacagcaacaccaagaaggccggcaagacaggccccatgaaaaccctgctggttagagtgatgacacccgatctgagagagcggctggaaaacctgagaaagaagcctgaaaatatcccccagcccatcagcaatacatctagagccaacctgaataagctgctgaccgattacaccgaaatgaagaaggcgatcctgcatgtgtactgggaagagttccagaaggaccctgtgggcctgatgagccgggtggcccagcctgccagcaagaagatcgatcagaacaagctgaaacctgagatggacgagaagggcaacctgaccaccgccggctttgcctgctctcagtgtggccagcccctgttcgtgtacaagctggagcaggtgtctgagaagggcaaggcttacaccaactacttcggacggtgcaatgtggccgagcacgaaaagctgatcctgctggcccagctgaagcccgagaaggatagcgacgaagccgtgacatatagcctgggaaagtttgggcagagggccctggatttctacagcattcatgtgaccaaggagtccacccaccccgtgaagcccctggcccagatcgccggaaacagatacgcctccggacctgtgggaaaggccctgagcgacgcatgtatgggcacaatcgcctccttcctgtctaagtaccaggacatcatcatcgaacaccagaaggtggtgaagggcaaccagaagagactggagagcctgcgggagctggccggcaaggaaaacctggaataccctagcgtgaccctgccacctcagcctcacaccaaggagggcgttgatgcctacaacgaagtgatcgcccgggtgcgaatgtgggtgaacctgaacctgtggcagaagctgaagctaagcagagatgatgccaagcctctgctgagactgaagggattcccttcctttcctctggtcgagagacaggccaacgaagtggactggtgggacatggtgtgtaacgtgaagaagctgatcaacgagaaaaaggaggatggcaaggtgttttggcagaatctggctggctacaagagacaggaagccctgagaccatacctgagcagcgaggaagatcggaagaagggaaagaaattcgctcggtaccagctgggcgacctgctgctgcacctggaaaagaagcacggcgaggactggggaaaggtgtacgacgaggcctgggagcggattgacaagaaagtggaaggcctgagcaagcacatcaagctggaagaggaacggagaagcgaggacgcccagagcaaggccgccctgaccgactggctgcgggctaaggccagcttcgtgatcgagggcctgaaggaggccgacaaggacgagttctgcagatgcgagctgaagctgcagaagtggtacggggacctgcggggaaagcccttcgccatcgaagccgagaacagcatcctggacatcagcggcttcagcaagcagtacaactgtgccttcatctggcagaaggacggcgtgaagaagctgaacctgtacctgatcatcaactacttcaagggcggcaagctgcggttcaagaagatcaaacctgaagccttcgaagccaacagattctacaccgtgatcaacaaaaagagcggcgagatcgtgcccatggaggtgaacttcaacttcgacgaccccaacctgatcatcctgcctctggcctttggcaagagacagggcagagaattcatctggaacgacctgctgtccctggaaaccggcagcctgaagctggccaacggaagagtgatcgagaagacactgtacaacagaagaacccggcaggatgagcctgccctgttcgtggccctgaccttcgagcggcgggaggtcctggactcctccaatatcaaaccaatgaacctgatcggcgtggcaagaggcgaaaacatccccgccgtgatcgccctgaccgaccccgagggctgcccactgagccggtttaaggatagcctgggaaacccaacccacatcctgagaatcggcgagagctataaggagaagcagcggaccatccaggccaagaaggaggtggagcagcggagagccggcggctacagccggaagtacgccagcaaagccaagaatctggcagacgatatggtgagaaacaccgctagagatctgctgtactacgccgtgacccaggatgccatgctgatcttcgccaacctgagccggggcttcggccggcagggcaagcggaccttcatggccgagagacagtacacacggatggaggactggctgaccgccaagctggcctacgagggcctgagcaagacctacctgtccaagacactggcccagtacacctccaagacatgcagcaactgtgggtttaccatcaccagcgccgactacgacagggtgctggagaagctgaagaagacagcaacaggctggatgaccacaattaacggcaaggagctgaaggtggagggccagattacctactacaacagatacaagagacagaacgtagtcaaggacctgtccgtcgagctggatagactgagcgaagaatctgtgaacaacgacatctcctcctggacaaagggcagaagcggagaagctctgagcctcctgaagaaaagattctcccatagacccgtgcaggagaagttcgtgtgcctgaactgcggcttcgagacacacgcagccgagcaagccgccctgaacatcgccagatcctggctgttcctgcggagccaggagtacaagaaataccagacaaacaagacaaccggcaacaccgataagagagccttcgtcgagacctggcagtccttttaccggaagaagcttaaggaggtgtggaaacctgccgtgcggtctggcggatctggcggaggctcctgcccaggtgctggtgaccttccaggacgtggccgtggacttcacccaggaggagtggaggctgctggacctgggccagaaggagctgtacaaggaggtgatgctggagaacgtgcagaacatgctgttcctgggcctgcccgtgcccagggaggactggatcagccacttcgaccagggcagggccccctggatgctggagggcgagggccccagcaacagcaggctggacggccagaggaggggatctggctccggcagcggccccaagaaaaagagaaaagtctaagctgccttctgcggggcttgccttctggccatgcccttcttctctcccttgcacctgtacctcttggtctttgaataaagcctgagtaggaaggctagcaaaaaaaaaaaaaaaaaaaaaaaaaaaaaaaaaaaaaaaaaaaaaaaaaaaaaaaaaaaaaaaaaaaaaaaaaaaaaaaa

SEQ ID NO: 16627 - RNA, 9485 nt, synthetic construct
  source 1..9485: mol_type = other RNA
aggaaataagagagaaaagaagagtaagaagaaatataagagccaccatggcccctaagaagaagcgtaaagtgagccggatggaacgcctcgtctacgaggtgcggcagaagtgcagaaacatcgaggacatctgcatctcctgcggatctctgaacgtgaccctggagcacccactgttcatcggcggcatgtgccagaactgtaaaaactgttttctggagtgtgcctatcaatacgacgatgacggctaccagagctactgcaccatctgttgcggcggaagagaggtgctgatgtgtggaaataacaactgctgccggtgcttctgcgtggaatgcgtggacctgctggtgggccccggcgccgcccaggccgctattaaggaagatccttggaactgctacatgtgcggccacaagggcacatacggcctgctgagacggagagaggactggcctagcagactgcagatgttcttcgccaataaccacgaccaggagttcgacccccctaaggtgtaccctcccgtccccgccgagaagagaaagcccatccgggtcctgagcctgttcgatggcatcgccaccggtctgctggtgctgaaggacctgggcatccaggtggataggtacattgcctccgaggtgtgcgaggactccatcaccgtgggaatggtgcgtcatcagggcaagatcatgtacgtgggcgacgtgcggagcgtgacacagaagcatatccaggagtggggccctttcgacctggtgatcggcggcagcccttgcaatgacctgagcatcgtgaacccagcccggaagggcctgtacgagggaaccggcagactgttcttcgagttttacagactgctgcacgacgcccggcctaaggaaggcgacgaccggcccttcttttggctgttcgagaatgtggtggccatgggagtcagcgacaagcgggatattagccggttcctggagagcaaccccgtgatgatcgatgccaaggaagtgagcgccgcccaccgggccagatacttctggggcaatctgcctggcatgaacagacccctggccagcaccgtgaacgacaagctggagctgcaggagtgcctggagcacggccggatcgccaagttcagcaaggtgagaaccatcaccacccgaagcaacagcatcaaacaaggcaaggaccagcactttcctgtgttcatgaacgagaaggaggacatcctgtggtgtaccgagatggagagagtgttcgggttcccagtccactacacagatgtcagcaacatgtctagactggccagacagagactgctgggaagaagctggtccgtccctgtgatcagacacctgttcgcccctctgaaggagtacttcgcctgcgtgagcagcggcaacagcaacgccaacagccggggccccagcttctctagcggcctggtgccactgtccctgagagggagccacatgggccccatggagatctacaaaaccgtgagcgcctggaagcggcagcctgtgcgcgtgctgagcctgtttcggaatatcgataaagtcctgaaaagcctgggattcctggagagcggctctggctccggcggtggcaccctgaagtacgtggaggatgtgacaaacgtggtcagacgggatgtggagaagtggggccccttcgatctggtgtacggcagcacccaacccctgggcagctcttgtgaccggtgccctggctggtacatgtttcagttccaccggatcctgcagtacgccctgccgagacaggagtcccagcggccattcttttggattttcatggacaacttgctgctgaccgaggatgaccaggaaactaccactcggttcctgcagaccgaagccgtgaccctgcaggacgtgagaggccgggactaccagaacgccatgcgggtgtggtccaacatccctggactgaaaagcaagcacgcacctctgacccctaaagaagaggagtacctgcaggcccaggtgcggagcagaagcaagctggacgcccctaaggtggatctgctggtgaagaattgcctcctgcccctgagagagtacttcaagtatttcagccagaatagtctgcccctgggaggcagcggcggcggcgccctggtgacatttgaggacgtcgccgtgcggttcacccaggaggaatgggctctgctggatccttctcagaaaatcctgtaccgggacgtgatgagagagacataccggaatctgacctccgtgggcatcaactgggaatgttgggaccttgaagcctgcttcagaagcctgggaagaaacctgagagtgcaggtggtgaagagaaagtgcgagctgaccaacagcggcccctgcgccgagggcggcccaagcagcggcgcccctcctcccagcggcggcagcccagccggctccccaacctctaccgaggagggcacctctgagtccgccacccccgagagcggccctggcacctccaccgagcccagcgagggcagcgcacccggcagccctgccggcagccccacctccacagaggagggaaccagcaccgagcccagcgaaggcagcgccccaggcaccagcaccgagcctagtgagcaggagattaaacggatcaacaagatcagaagaagacttgtgaaagacagcaacaccaagaaggccggcaagacaggccccatgaaaaccctgctggttagagtgatgacacccgatctgagagagcggctggaaaacctgagaaagaagcctgaaaatatcccccagcccatcagcaatacatctagagccaacctgaataagctgctgaccgattacaccgaaatgaagaaggcgatcctgcatgtgtactgggaagagttccagaaggaccctgtgggcctgatgagccgggtggcccagcctgccagcaagaagatcgatcagaacaagctgaaacctgagatggacgagaagggcaacctgaccaccgccggctttgcctgctctcagtgtggccagcccctgttcgtgtacaagctggagcaggtgtctgagaagggcaaggcttacaccaactacttcggacggtgcaatgtggccgagcacgaaaagctgatcctgctggcccagctgaagcccgagaaggatagcgacgaagccgtgacatatagcctgggaaagtttgggcagagggccctggatttctacagcattcatgtgaccaaggagtccacccaccccgtgaagcccctggcccagatcgccggaaacagatacgcctccggacctgtgggaaaggccctgagcgacgcatgtatgggcacaatcgcctccttcctgtctaagtaccaggacatcatcatcgaacaccagaaggtggtgaagggcaaccagaagagactggagagcctgcgggagctggccggcaaggaaaacctggaataccctagcgtgaccctgccacctcagcctcacaccaaggagggcgttgatgcctacaacgaagtgatcgcccgggtgcgaatgtgggtgaacctgaacctgtggcagaagctgaagctaagcagagatgatgccaagcctctgctgagactgaagggattcccttcctttcctctggtcgagagacaggccaacgaagtggactggtgggacatggtgtgtaacgtgaagaagctgatcaacgagaaaaaggaggatggcaaggtgttttggcagaatctggctggctacaagagacaggaagccctgagaccatacctgagcagcgaggaagatcggaagaagggaaagaaattcgctcggtaccagctgggcgacctgctgctgcacctggaaaagaagcacggcgaggactggggaaaggtgtacgacgaggcctgggagcggattgacaagaaagtggaaggcctgagcaagcacatcaagctggaagaggaacggagaagcgaggacgcccagagcaaggccgccctgaccgactggctgcgggctaaggccagcttcgtgatcgagggcctgaaggaggccgacaaggacgagttctgcagatgcgagctgaagctgcagaagtggtacggggacctgcggggaaagcccttcgccatcgaagccgagaacagcatcctggacatcagcggcttcagcaagcagtacaactgtgccttcatctggcagaaggacggcgtgaagaagctgaacctgtacctgatcatcaactacttcaagggcggcaagctgcggttcaagaagatcaaacctgaagccttcgaagccaacagattctacaccgtgatcaacaaaaagagcggcgagatcgtgcccatggaggtgaacttcaacttcgacgaccccaacctgatcatcctgcctctggcctttggcaagagacagggcagagaattcatctggaacgacctgctgtccctggaaaccggcagcctgaagctggccaacggaagagtgatcgagaagacactgtacaacagaagaacccggcaggatgagcctgccctgttcgtggccctgaccttcgagcggcgggaggtcctggactcctccaatatcaaaccaatgaacctgatcggcgtggcaagaggcgaaaacatccccgccgtgatcgccctgaccgaccccgagggctgcccactgagccggtttaaggatagcctgggaaacccaacccacatcctgagaatcggcgagagctataaggagaagcagcggaccatccaggccaagaaggaggtggagcagcggagagccggcggctacagccggaagtacgccagcaaagccaagaatctggcagacgatatggtgagaaacaccgctagagatctgctgtactacgccgtgacccaggatgccatgctgatcttcgccaacctgagccggggcttcggccggcagggcaagcggaccttcatggccgagagacagtacacacggatggaggactggctgaccgccaagctggcctacgagggcctgagcaagacctacctgtccaagacactggcccagtacacctccaagacatgcagcaactgtgggtttaccatcaccagcgccgactacgacagggtgctggagaagctgaagaagacagcaacaggctggatgaccacaattaacggcaaggagctgaaggtggagggccagattacctactacaacagatacaagagacagaacgtagtcaaggacctgtccgtcgagctggatagactgagcgaagaatctgtgaacaacgacatctcctcctggacaaagggcagaagcggagaagctctgagcctcctgaagaaaagattctcccatagacccgtgcaggagaagttcgtgtgcctgaactgcggcttcgagacacacgcagccgagcaagccgccctgaacatcgccagatcctggctgttcctgcggagccaggagtacaagaaataccagacaaacaagacaaccggcaacaccgataagagagccttcgtcgagacctggcagtccttttaccggaagaagcttaaggaggtgtggaaacctgccgtgcggtctggcggatctggcggaggctccatgcccctgaaggccaggtaccaggagatggtgaccttcgaggacgtggccgtgcacttcaccaagaccgagtggaccggcctgagccccgcccagagggccctgtacaggagcgtgatgctggagaacttcggcaacctgaccgccctgggctaccccgtgcccaagcccgccctgatcagcctgctggagggcggcgacatggactggggcctggaggcccaggacgacccccccgccgagggcggcccaagcagcggcgcccctcctcccagcggcggcagcccagccggctccccaacctctaccgaggagggcacctctgagtccgccacccccgagagcggccctggcacctccaccgagcccagcgagggcagcgcacccggcagccctgccggcagccccacctccacagaggagggaaccagcaccgagcccagcgaaggcagcgccccaggcaccagcaccgagcctagtgagcaggagattaaacggatcaacaagatcagaagaagacttgtgaaagacagcaacaccaagaaggccggcaagacaggccccatgaaaaccctgctggttagagtgatgacacccgatctgagagagcggctggaaaacctgagaaagaagcctgaaaatatcccccagcccatcagcaatacatctagagccaacctgaataagctgctgaccgattacaccgaaatgaagaaggcgatcctgcatgtgtactgggaagagttccagaaggaccctgtgggcctgatgagccgggtggcccagcctgccagcaagaagatcgatcagaacaagctgaaacctgagatggacgagaagggcaacctgaccaccgccggctttgcctgctctcagtgtggccagcccctgttcgtgtacaagctggagcaggtgtctgagaagggcaaggcttacaccaactacttcggacggtgcaatgtggccgagcacgaaaagctgatcctgctggcccagctgaagcccgagaaggatagcgacgaagccgtgacatatagcctgggaaagtttgggcagagggccctggatttctacagcattcatgtgaccaaggagtccacccaccccgtgaagcccctggcccagatcgccggaaacagatacgcctccggacctgtgggaaaggccctgagcgacgcatgtatgggcacaatcgcctccttcctgtctaagtaccaggacatcatcatcgaacaccagaaggtggtgaagggcaaccagaagagactggagagcctgcgggagctggccggcaaggaaaacctggaataccctagcgtgaccctgccacctcagcctcacaccaaggagggcgttgatgcctacaacgaagtgatcgcccgggtgcgaatgtgggtgaacctgaacctgtggcagaagctgaagctaagcagagatgatgccaagcctctgctgagactgaagggattcccttcctttcctctggtcgagagacaggccaacgaagtggactggtgggacatggtgtgtaacgtgaagaagctgatcaacgagaaaaaggaggatggcaaggtgttttggcagaatctggctggctacaagagacaggaagccctgagaccatacctgagcagcgaggaagatcggaagaagggaaagaaattcgctcggtaccagctgggcgacctgctgctgcacctggaaaagaagcacggcgaggactggggaaaggtgtacgacgaggcctgggagcggattgacaagaaagtggaaggcctgagcaagcacatcaagctggaagaggaacggagaagcgaggacgcccagagcaaggccgccctgaccgactggctgcgggctaaggccagcttcgtgatcgagggcctgaaggaggccgacaaggacgagttctgcagatgcgagctgaagctgcagaagtggtacggggacctgcggggaaagcccttcgccatcgaagccgagaacagcatcctggacatcagcggcttcagcaagcagtacaactgtgccttcatctggcagaaggacggcgtgaagaagctgaacctgtacctgatcatcaactacttcaagggcggcaagctgcggttcaagaagatcaaacctgaagccttcgaagccaacagattctacaccgtgatcaacaaaaagagcggcgagatcgtgcccatggaggtgaacttcaacttcgacgaccccaacctgatcatcctgcctctggcctttggcaagagacagggcagagaattcatctggaacgacctgctgtccctggaaaccggcagcctgaagctggccaacggaagagtgatcgagaagacactgtacaacagaagaacccggcaggatgagcctgccctgttcgtggccctgaccttcgagcggcgggaggtcctggactcctccaatatcaaaccaatgaacctgatcggcgtggcaagaggcgaaaacatccccgccgtgatcgccctgaccgaccccgagggctgcccactgagccggtttaaggatagcctgggaaacccaacccacatcctgagaatcggcgagagctataaggagaagcagcggaccatccaggccaagaaggaggtggagcagcggagagccggcggctacagccggaagtacgccagcaaagccaagaatctggcagacgatatggtgagaaacaccgctagagatctgctgtactacgccgtgacccaggatgccatgctgatcttcgccaacctgagccggggcttcggccggcagggcaagcggaccttcatggccgagagacagtacacacggatggaggactggctgaccgccaagctggcctacgagggcctgagcaagacctacctgtccaagacactggcccagtacacctccaagacatgcagcaactgtgggtttaccatcaccagcgccgactacgacagggtgctggagaagctgaagaagacagcaacaggctggatgaccacaattaacggcaaggagctgaaggtggagggccagattacctactacaacagatacaagagacagaacgtagtcaaggacctgtccgtcgagctggatagactgagcgaagaatctgtgaacaacgacatctcctcctggacaaagggcagaagcggagaagctctgagcctcctgaagaaaagattctcccatagacccgtgcaggagaagttcgtgtgcctgaactgcggcttcgagacacacgcagccgagcaagccgccctgaacatcgccagatcctggctgttcctgcggagccaggagtacaagaaataccagacaaacaagacaaccggcaacaccgataagagagccttcgtcgagacctggcagtccttttaccggaagaagcttaaggaggtgtggaaacctgccgtgcggtctggcggatctggcggaggctcctatgcccctgaaggccaggtaccaggagatggtgaccttcgaggacgtggccgtgcacttcaccaagaccgagtggaccggcctgagccccgcccagagggccctgtacaggagcgtgatgctggagaacttcggcaacctgaccgccctgggctaccccgtgcccaagcccgccctgatcagcctgctggagggcggcgacatggactggggcctggaggcccaggacgacccccccgccgagggatctggctccggcagcggccccaagaaaaagagaaaagtctaagctgccttctgcggggcttgccttctggccatgcccttcttctctcccttgcacctgtacctcttggtctttgaataaagcctgagtaggaaggctagcaaaaaaaaaaaaaaaaaaaaaaaaaaaaaaaaaaaaaaaaaaaaaaaaaaaaaaaaaaaaaaaaaaaaaaaaaaaaaaaa

SEQ ID NO: 16628 - RNA, 9485 nt, synthetic construct
  source 1..9485: mol_type = other RNA
aggaaataagagagaaaagaagagtaagaagaaatataagagccaccatggcccctaagaagaagcgtaaagtgagccggatggaacgcctcgtctacgaggtgcggcagaagtgcagaaacatcgaggacatctgcatctcctgcggatctctgaacgtgaccctggagcacccactgttcatcggcggcatgtgccagaactgtaaaaactgttttctggagtgtgcctatcaatacgacgatgacggctaccagagctactgcaccatctgttgcggcggaagagaggtgctgatgtgtggaaataacaactgctgccggtgcttctgcgtggaatgcgtggacctgctggtgggccccggcgccgcccaggccgctattaaggaagatccttggaactgctacatgtgcggccacaagggcacatacggcctgctgagacggagagaggactggcctagcagactgcagatgttcttcgccaataaccacgaccaggagttcgacccccctaaggtgtaccctcccgtccccgccgagaagagaaagcccatccgggtcctgagcctgttcgatggcatcgccaccggtctgctggtgctgaaggacctgggcatccaggtggataggtacattgcctccgaggtgtgcgaggactccatcaccgtgggaatggtgcgtcatcagggcaagatcatgtacgtgggcgacgtgcggagcgtgacacagaagcatatccaggagtggggccctttcgacctggtgatcggcggcagcccttgcaatgacctgagcatcgtgaacccagcccggaagggcctgtacgagggaaccggcagactgttcttcgagttttacagactgctgcacgacgcccggcctaaggaaggcgacgaccggcccttcttttggctgttcgagaatgtggtggccatgggagtcagcgacaagcgggatattagccggttcctggagagcaaccccgtgatgatcgatgccaaggaagtgagcgccgcccaccgggccagatacttctggggcaatctgcctggcatgaacagacccctggccagcaccgtgaacgacaagctggagctgcaggagtgcctggagcacggccggatcgccaagttcagcaaggtgagaaccatcaccacccgaagcaacagcatcaaacaaggcaaggaccagcactttcctgtgttcatgaacgagaaggaggacatcctgtggtgtaccgagatggagagagtgttcgggttcccagtccactacacagatgtcagcaacatgtctagactggccagacagagactgctgggaagaagctggtccgtccctgtgatcagacacctgttcgcccctctgaaggagtacttcgcctgcgtgagcagcggcaacagcaacgccaacagccggggccccagcttctctagcggcctggtgccactgtccctgagagggagccacatgggccccatggagatctacaaaaccgtgagcgcctggaagcggcagcctgtgcgcgtgctgagcctgtttcggaatatcgataaagtcctgaaaagcctgggattcctggagagcggctctggctccggcggtggcaccctgaagtacgtggaggatgtgacaaacgtggtcagacgggatgtggagaagtggggccccttcgatctggtgtacggcagcacccaacccctgggcagctcttgtgaccggtgccctggctggtacatgtttcagttccaccggatcctgcagtacgccctgccgagacaggagtcccagcggccattcttttggattttcatggacaacttgctgctgaccgaggatgaccaggaaactaccactcggttcctgcagaccgaagccgtgaccctgcaggacgtgagaggccgggactaccagaacgccatgcgggtgtggtccaacatccctggactgaaaagcaagcacgcacctctgacccctaaagaagaggagtacctgcaggcccaggtgcggagcagaagcaagctggacgcccctaaggtggatctgctggtgaagaattgcctcctgcccctgagagagtacttcaagtatttcagccagaatagtctgcccctgggaggcagcggcggcggcgccctggtgacatttgaggacgtcgccgtgcggttcacccaggaggaatgggctctgctggatccttctcagaaaatcctgtaccgggacgtgatgagagagacataccggaatctgacctccgtgggcatcaactgggaatgttgggaccttgaagcctgcttcagaagcctgggaagaaacctgagagtgcaggtggtgaagagaaagtgcgagctgaccaacagcggcccctgcgccgagggcggcccaagcagcggcgcccctcctcccagcggcggcagcccagccggctccccaacctctaccgaggagggcacctctgagtccgccacccccgagagcggccctggcacctccaccgagcccagcgagggcagcgcacccggcagccctgccggcagccccacctccacagaggagggaaccagcaccgagcccagcgaaggcagcgccccaggcaccagcaccgagcctagtgagcaggagattaaacggatcaacaagatcagaagaagacttgtgaaagacagcaacaccaagaaggccggcaagacaggccccatgaaaaccctgctggttagagtgatgacacccgatctgagagagcggctggaaaacctgagaaagaagcctgaaaatatcccccagcccatcagcaatacatctagagccaacctgaataagctgctgaccgattacaccgaaatgaagaaggcgatcctgcatgtgtactgggaagagttccagaaggaccctgtgggcctgatgagccgggtggcccagcctgccagcaagaagatcgatcagaacaagctgaaacctgagatggacgagaagggcaacctgaccaccgccggctttgcctgctctcagtgtggccagcccctgttcgtgtacaagctggagcaggtgtctgagaagggcaaggcttacaccaactacttcggacggtgcaatgtggccgagcacgaaaagctgatcctgctggcccagctgaagcccgagaaggatagcgacgaagccgtgacatatagcctgggaaagtttgggcagagggccctggatttctacagcattcatgtgaccaaggagtccacccaccccgtgaagcccctggcccagatcgccggaaacagatacgcctccggacctgtgggaaaggccctgagcgacgcatgtatgggcacaatcgcctccttcctgtctaagtaccaggacatcatcatcgaacaccagaaggtggtgaagggcaaccagaagagactggagagcctgcgggagctggccggcaaggaaaacctggaataccctagcgtgaccctgccacctcagcctcacaccaaggagggcgttgatgcctacaacgaagtgatcgcccgggtgcgaatgtgggtgaacctgaacctgtggcagaagctgaagctaagcagagatgatgccaagcctctgctgagactgaagggattcccttcctttcctctggtcgagagacaggccaacgaagtggactggtgggacatggtgtgtaacgtgaagaagctgatcaacgagaaaaaggaggatggcaaggtgttttggcagaatctggctggctacaagagacaggaagccctgagaccatacctgagcagcgaggaagatcggaagaagggaaagaaattcgctcggtaccagctgggcgacctgctgctgcacctggaaaagaagcacggcgaggactggggaaaggtgtacgacgaggcctgggagcggattgacaagaaagtggaaggcctgagcaagcacatcaagctggaagaggaacggagaagcgaggacgcccagagcaaggccgccctgaccgactggctgcgggctaaggccagcttcgtgatcgagggcctgaaggaggccgacaaggacgagttctgcagatgcgagctgaagctgcagaagtggtacggggacctgcggggaaagcccttcgccatcgaagccgagaacagcatcctggacatcagcggcttcagcaagcagtacaactgtgccttcatctggcagaaggacggcgtgaagaagctgaacctgtacctgatcatcaactacttcaagggcggcaagctgcggttcaagaagatcaaacctgaagccttcgaagccaacagattctacaccgtgatcaacaaaaagagcggcgagatcgtgcccatggaggtgaacttcaacttcgacgaccccaacctgatcatcctgcctctggcctttggcaagagacagggcagagaattcatctggaacgacctgctgtccctggaaaccggcagcctgaagctggccaacggaagagtgatcgagaagacactgtacaacagaagaacccggcaggatgagcctgccctgttcgtggccctgaccttcgagcggcgggaggtcctggactcctccaatatcaaaccaatgaacctgatcggcgtggcaagaggcgaaaacatccccgccgtgatcgccctgaccgaccccgagggctgcccactgagccggtttaaggatagcctgggaaacccaacccacatcctgagaatcggcgagagctataaggagaagcagcggaccatccaggccaagaaggaggtggagcagcggagagccggcggctacagccggaagtacgccagcaaagccaagaatctggcagacgatatggtgagaaacaccgctagagatctgctgtactacgccgtgacccaggatgccatgctgatcttcgccaacctgagccggggcttcggccggcagggcaagcggaccttcatggccgagagacagtacacacggatggaggactggctgaccgccaagctggcctacgagggcctgagcaagacctacctgtccaagacactggcccagtacacctccaagacatgcagcaactgtgggtttaccatcaccagcgccgactacgacagggtgctggagaagctgaagaagacagcaacaggctggatgaccacaattaacggcaaggagctgaaggtggagggccagattacctactacaacagatacaagagacagaacgtagtcaaggacctgtccgtcgagctggatagactgagcgaagaatctgtgaacaacgacatctcctcctggacaaagggcagaagcggagaagctctgagcctcctgaagaaaagattctcccatagacccgtgcaggagaagttcgtgtgcctgaactgcggcttcgagacacacgcagccgagcaagccgccctgaacatcgccagatcctggctgttcctgcggagccaggagtacaagaaataccagacaaacaagacaaccggcaacaccgataagagagccttcgtcgagacctggcagtccttttaccggaagaagcttaaggaggtgtggaaacctgccgtgcggtctggcggatctggcggaggctccgagctggtgaccttcagggacgtggtgatcagcttcagccaggaggagtgggagtacctggacagcgcccagagggacctgtactgggacgtgatgatggagaactacagcaacctggtgagcctggacctggagagcaagtacgacaagaagaccctgagcaccgagaaggacatcatcgagaagaacgacagccagtgggaggtgatcgagagcagcaagctggtgggcctggccaacagcggcggcccaagcagcggcgcccctcctcccagcggcggcagcccagccggctccccaacctctaccgaggagggcacctctgagtccgccacccccgagagcggccctggcacctccaccgagcccagcgagggcagcgcacccggcagccctgccggcagccccacctccacagaggagggaaccagcaccgagcccagcgaaggcagcgccccaggcaccagcaccgagcctagtgagcaggagattaaacggatcaacaagatcagaagaagacttgtgaaagacagcaacaccaagaaggccggcaagacaggccccatgaaaaccctgctggttagagtgatgacacccgatctgagagagcggctggaaaacctgagaaagaagcctgaaaatatcccccagcccatcagcaatacatctagagccaacctgaataagctgctgaccgattacaccgaaatgaagaaggcgatcctgcatgtgtactgggaagagttccagaaggaccctgtgggcctgatgagccgggtggcccagcctgccagcaagaagatcgatcagaacaagctgaaacctgagatggacgagaagggcaacctgaccaccgccggctttgcctgctctcagtgtggccagcccctgttcgtgtacaagctggagcaggtgtctgagaagggcaaggcttacaccaactacttcggacggtgcaatgtggccgagcacgaaaagctgatcctgctggcccagctgaagcccgagaaggatagcgacgaagccgtgacatatagcctgggaaagtttgggcagagggccctggatttctacagcattcatgtgaccaaggagtccacccaccccgtgaagcccctggcccagatcgccggaaacagatacgcctccggacctgtgggaaaggccctgagcgacgcatgtatgggcacaatcgcctccttcctgtctaagtaccaggacatcatcatcgaacaccagaaggtggtgaagggcaaccagaagagactggagagcctgcgggagctggccggcaaggaaaacctggaataccctagcgtgaccctgccacctcagcctcacaccaaggagggcgttgatgcctacaacgaagtgatcgcccgggtgcgaatgtgggtgaacctgaacctgtggcagaagctgaagctaagcagagatgatgccaagcctctgctgagactgaagggattcccttcctttcctctggtcgagagacaggccaacgaagtggactggtgggacatggtgtgtaacgtgaagaagctgatcaacgagaaaaaggaggatggcaaggtgttttggcagaatctggctggctacaagagacaggaagccctgagaccatacctgagcagcgaggaagatcggaagaagggaaagaaattcgctcggtaccagctgggcgacctgctgctgcacctggaaaagaagcacggcgaggactggggaaaggtgtacgacgaggcctgggagcggattgacaagaaagtggaaggcctgagcaagcacatcaagctggaagaggaacggagaagcgaggacgcccagagcaaggccgccctgaccgactggctgcgggctaaggccagcttcgtgatcgagggcctgaaggaggccgacaaggacgagttctgcagatgcgagctgaagctgcagaagtggtacggggacctgcggggaaagcccttcgccatcgaagccgagaacagcatcctggacatcagcggcttcagcaagcagtacaactgtgccttcatctggcagaaggacggcgtgaagaagctgaacctgtacctgatcatcaactacttcaagggcggcaagctgcggttcaagaagatcaaacctgaagccttcgaagccaacagattctacaccgtgatcaacaaaaagagcggcgagatcgtgcccatggaggtgaacttcaacttcgacgaccccaacctgatcatcctgcctctggcctttggcaagagacagggcagagaattcatctggaacgacctgctgtccctggaaaccggcagcctgaagctggccaacggaagagtgatcgagaagacactgtacaacagaagaacccggcaggatgagcctgccctgttcgtggccctgaccttcgagcggcgggaggtcctggactcctccaatatcaaaccaatgaacctgatcggcgtggcaagaggcgaaaacatccccgccgtgatcgccctgaccgaccccgagggctgcccactgagccggtttaaggatagcctgggaaacccaacccacatcctgagaatcggcgagagctataaggagaagcagcggaccatccaggccaagaaggaggtggagcagcggagagccggcggctacagccggaagtacgccagcaaagccaagaatctggcagacgatatggtgagaaacaccgctagagatctgctgtactacgccgtgacccaggatgccatgctgatcttcgccaacctgagccggggcttcggccggcagggcaagcggaccttcatggccgagagacagtacacacggatggaggactggctgaccgccaagctggcctacgagggcctgagcaagacctacctgtccaagacactggcccagtacacctccaagacatgcagcaactgtgggtttaccatcaccagcgccgactacgacagggtgctggagaagctgaagaagacagcaacaggctggatgaccacaattaacggcaaggagctgaaggtggagggccagattacctactacaacagatacaagagacagaacgtagtcaaggacctgtccgtcgagctggatagactgagcgaagaatctgtgaacaacgacatctcctcctggacaaagggcagaagcggagaagctctgagcctcctgaagaaaagattctcccatagacccgtgcaggagaagttcgtgtgcctgaactgcggcttcgagacacacgcagccgagcaagccgccctgaacatcgccagatcctggctgttcctgcggagccaggagtacaagaaataccagacaaacaagacaaccggcaacaccgataagagagccttcgtcgagacctggcagtccttttaccggaagaagcttaaggaggtgtggaaacctgccgtgcggtctggcggatctggcggaggctcctgagctggtgaccttcagggacgtggtgatcagcttcagccaggaggagtgggagtacctggacagcgcccagagggacctgtactgggacgtgatgatggagaactacagcaacctggtgagcctggacctggagagcaagtacgacaagaagaccctgagcaccgagaaggacatcatcgagaagaacgacagccagtgggaggtgatcgagagcagcaagctggtgggcctggccaacagcggatctggctccggcagcggccccaagaaaaagagaaaagtctaagctgccttctgcggggcttgccttctggccatgcccttcttctctcccttgcacctgtacctcttggtctttgaataaagcctgagtaggaaggctagcaaaaaaaaaaaaaaaaaaaaaaaaaaaaaaaaaaaaaaaaaaaaaaaaaaaaaaaaaaaaaaaaaaaaaaaaaaaaaaaa

SEQ ID NO: 16629 - RNA, 9485 nt, synthetic construct
  source 1..9485: mol_type = other RNA
aggaaataagagagaaaagaagagtaagaagaaatataagagccaccatggcccctaagaagaagcgtaaagtgagccggatggaacgcctcgtctacgaggtgcggcagaagtgcagaaacatcgaggacatctgcatctcctgcggatctctgaacgtgaccctggagcacccactgttcatcggcggcatgtgccagaactgtaaaaactgttttctggagtgtgcctatcaatacgacgatgacggctaccagagctactgcaccatctgttgcggcggaagagaggtgctgatgtgtggaaataacaactgctgccggtgcttctgcgtggaatgcgtggacctgctggtgggccccggcgccgcccaggccgctattaaggaagatccttggaactgctacatgtgcggccacaagggcacatacggcctgctgagacggagagaggactggcctagcagactgcagatgttcttcgccaataaccacgaccaggagttcgacccccctaaggtgtaccctcccgtccccgccgagaagagaaagcccatccgggtcctgagcctgttcgatggcatcgccaccggtctgctggtgctgaaggacctgggcatccaggtggataggtacattgcctccgaggtgtgcgaggactccatcaccgtgggaatggtgcgtcatcagggcaagatcatgtacgtgggcgacgtgcggagcgtgacacagaagcatatccaggagtggggccctttcgacctggtgatcggcggcagcccttgcaatgacctgagcatcgtgaacccagcccggaagggcctgtacgagggaaccggcagactgttcttcgagttttacagactgctgcacgacgcccggcctaaggaaggcgacgaccggcccttcttttggctgttcgagaatgtggtggccatgggagtcagcgacaagcgggatattagccggttcctggagagcaaccccgtgatgatcgatgccaaggaagtgagcgccgcccaccgggccagatacttctggggcaatctgcctggcatgaacagacccctggccagcaccgtgaacgacaagctggagctgcaggagtgcctggagcacggccggatcgccaagttcagcaaggtgagaaccatcaccacccgaagcaacagcatcaaacaaggcaaggaccagcactttcctgtgttcatgaacgagaaggaggacatcctgtggtgtaccgagatggagagagtgttcgggttcccagtccactacacagatgtcagcaacatgtctagactggccagacagagactgctgggaagaagctggtccgtccctgtgatcagacacctgttcgcccctctgaaggagtacttcgcctgcgtgagcagcggcaacagcaacgccaacagccggggccccagcttctctagcggcctggtgccactgtccctgagagggagccacatgggccccatggagatctacaaaaccgtgagcgcctggaagcggcagcctgtgcgcgtgctgagcctgtttcggaatatcgataaagtcctgaaaagcctgggattcctggagagcggctctggctccggcggtggcaccctgaagtacgtggaggatgtgacaaacgtggtcagacgggatgtggagaagtggggccccttcgatctggtgtacggcagcacccaacccctgggcagctcttgtgaccggtgccctggctggtacatgtttcagttccaccggatcctgcagtacgccctgccgagacaggagtcccagcggccattcttttggattttcatggacaacttgctgctgaccgaggatgaccaggaaactaccactcggttcctgcagaccgaagccgtgaccctgcaggacgtgagaggccgggactaccagaacgccatgcgggtgtggtccaacatccctggactgaaaagcaagcacgcacctctgacccctaaagaagaggagtacctgcaggcccaggtgcggagcagaagcaagctggacgcccctaaggtggatctgctggtgaagaattgcctcctgcccctgagagagtacttcaagtatttcagccagaatagtctgcccctgggaggcagcggcggcggcgccctggtgacatttgaggacgtcgccgtgcggttcacccaggaggaatgggctctgctggatccttctcagaaaatcctgtaccgggacgtgatgagagagacataccggaatctgacctccgtgggcatcaactgggaatgttgggaccttgaagcctgcttcagaagcctgggaagaaacctgagagtgcaggtggtgaagagaaagtgcgagctgaccaacagcggcccctgcgccgagggcggcccaagcagcggcgcccctcctcccagcggcggcagcccagccggctccccaacctctaccgaggagggcacctctgagtccgccacccccgagagcggccctggcacctccaccgagcccagcgagggcagcgcacccggcagccctgccggcagccccacctccacagaggagggaaccagcaccgagcccagcgaaggcagcgccccaggcaccagcaccgagcctagtgagcaggagattaaacggatcaacaagatcagaagaagacttgtgaaagacagcaacaccaagaaggccggcaagacaggccccatgaaaaccctgctggttagagtgatgacacccgatctgagagagcggctggaaaacctgagaaagaagcctgaaaatatcccccagcccatcagcaatacatctagagccaacctgaataagctgctgaccgattacaccgaaatgaagaaggcgatcctgcatgtgtactgggaagagttccagaaggaccctgtgggcctgatgagccgggtggcccagcctgccagcaagaagatcgatcagaacaagctgaaacctgagatggacgagaagggcaacctgaccaccgccggctttgcctgctctcagtgtggccagcccctgttcgtgtacaagctggagcaggtgtctgagaagggcaaggcttacaccaactacttcggacggtgcaatgtggccgagcacgaaaagctgatcctgctggcccagctgaagcccgagaaggatagcgacgaagccgtgacatatagcctgggaaagtttgggcagagggccctggatttctacagcattcatgtgaccaaggagtccacccaccccgtgaagcccctggcccagatcgccggaaacagatacgcctccggacctgtgggaaaggccctgagcgacgcatgtatgggcacaatcgcctccttcctgtctaagtaccaggacatcatcatcgaacaccagaaggtggtgaagggcaaccagaagagactggagagcctgcgggagctggccggcaaggaaaacctggaataccctagcgtgaccctgccacctcagcctcacaccaaggagggcgttgatgcctacaacgaagtgatcgcccgggtgcgaatgtgggtgaacctgaacctgtggcagaagctgaagctaagcagagatgatgccaagcctctgctgagactgaagggattcccttcctttcctctggtcgagagacaggccaacgaagtggactggtgggacatggtgtgtaacgtgaagaagctgatcaacgagaaaaaggaggatggcaaggtgttttggcagaatctggctggctacaagagacaggaagccctgagaccatacctgagcagcgaggaagatcggaagaagggaaagaaattcgctcggtaccagctgggcgacctgctgctgcacctggaaaagaagcacggcgaggactggggaaaggtgtacgacgaggcctgggagcggattgacaagaaagtggaaggcctgagcaagcacatcaagctggaagaggaacggagaagcgaggacgcccagagcaaggccgccctgaccgactggctgcgggctaaggccagcttcgtgatcgagggcctgaaggaggccgacaaggacgagttctgcagatgcgagctgaagctgcagaagtggtacggggacctgcggggaaagcccttcgccatcgaagccgagaacagcatcctggacatcagcggcttcagcaagcagtacaactgtgccttcatctggcagaaggacggcgtgaagaagctgaacctgtacctgatcatcaactacttcaagggcggcaagctgcggttcaagaagatcaaacctgaagccttcgaagccaacagattctacaccgtgatcaacaaaaagagcggcgagatcgtgcccatggaggtgaacttcaacttcgacgaccccaacctgatcatcctgcctctggcctttggcaagagacagggcagagaattcatctggaacgacctgctgtccctggaaaccggcagcctgaagctggccaacggaagagtgatcgagaagacactgtacaacagaagaacccggcaggatgagcctgccctgttcgtggccctgaccttcgagcggcgggaggtcctggactcctccaatatcaaaccaatgaacctgatcggcgtggcaagaggcgaaaacatccccgccgtgatcgccctgaccgaccccgagggctgcccactgagccggtttaaggatagcctgggaaacccaacccacatcctgagaatcggcgagagctataaggagaagcagcggaccatccaggccaagaaggaggtggagcagcggagagccggcggctacagccggaagtacgccagcaaagccaagaatctggcagacgatatggtgagaaacaccgctagagatctgctgtactacgccgtgacccaggatgccatgctgatcttcgccaacctgagccggggcttcggccggcagggcaagcggaccttcatggccgagagacagtacacacggatggaggactggctgaccgccaagctggcctacgagggcctgagcaagacctacctgtccaagacactggcccagtacacctccaagacatgcagcaactgtgggtttaccatcaccagcgccgactacgacagggtgctggagaagctgaagaagacagcaacaggctggatgaccacaattaacggcaaggagctgaaggtggagggccagattacctactacaacagatacaagagacagaacgtagtcaaggacctgtccgtcgagctggatagactgagcgaagaatctgtgaacaacgacatctcctcctggacaaagggcagaagcggagaagctctgagcctcctgaagaaaagattctcccatagacccgtgcaggagaagttcgtgtgcctgaactgcggcttcgagacacacgcagccgagcaagccgccctgaacatcgccagatcctggctgttcctgcggagccaggagtacaagaaataccagacaaacaagacaaccggcaacaccgataagagagccttcgtcgagacctggcagtccttttaccggaagaagcttaaggaggtgtggaaacctgccgtgcggtctggcggatctggcggaggctccgcctgcgagagcatcaccttcggcgacgtggccatcgacttcagccaccaggagtgggagtacctgaacctggtgcagaagaccctgtaccaggaggtgatgatggagaactacgacaacctggtgagcctgggccacagcatcagcaagcccgacctgatcaccctgctggagcagggcaaggagccctggatgatcgtgggcgaggagaccaggggcgagtgcaccgacctggacagcaggggcggcccaagcagcggcgcccctcctcccagcggcggcagcccagccggctccccaacctctaccgaggagggcacctctgagtccgccacccccgagagcggccctggcacctccaccgagcccagcgagggcagcgcacccggcagccctgccggcagccccacctccacagaggagggaaccagcaccgagcccagcgaaggcagcgccccaggcaccagcaccgagcctagtgagcaggagattaaacggatcaacaagatcagaagaagacttgtgaaagacagcaacaccaagaaggccggcaagacaggccccatgaaaaccctgctggttagagtgatgacacccgatctgagagagcggctggaaaacctgagaaagaagcctgaaaatatcccccagcccatcagcaatacatctagagccaacctgaataagctgctgaccgattacaccgaaatgaagaaggcgatcctgcatgtgtactgggaagagttccagaaggaccctgtgggcctgatgagccgggtggcccagcctgccagcaagaagatcgatcagaacaagctgaaacctgagatggacgagaagggcaacctgaccaccgccggctttgcctgctctcagtgtggccagcccctgttcgtgtacaagctggagcaggtgtctgagaagggcaaggcttacaccaactacttcggacggtgcaatgtggccgagcacgaaaagctgatcctgctggcccagctgaagcccgagaaggatagcgacgaagccgtgacatatagcctgggaaagtttgggcagagggccctggatttctacagcattcatgtgaccaaggagtccacccaccccgtgaagcccctggcccagatcgccggaaacagatacgcctccggacctgtgggaaaggccctgagcgacgcatgtatgggcacaatcgcctccttcctgtctaagtaccaggacatcatcatcgaacaccagaaggtggtgaagggcaaccagaagagactggagagcctgcgggagctggccggcaaggaaaacctggaataccctagcgtgaccctgccacctcagcctcacaccaaggagggcgttgatgcctacaacgaagtgatcgcccgggtgcgaatgtgggtgaacctgaacctgtggcagaagctgaagctaagcagagatgatgccaagcctctgctgagactgaagggattcccttcctttcctctggtcgagagacaggccaacgaagtggactggtgggacatggtgtgtaacgtgaagaagctgatcaacgagaaaaaggaggatggcaaggtgttttggcagaatctggctggctacaagagacaggaagccctgagaccatacctgagcagcgaggaagatcggaagaagggaaagaaattcgctcggtaccagctgggcgacctgctgctgcacctggaaaagaagcacggcgaggactggggaaaggtgtacgacgaggcctgggagcggattgacaagaaagtggaaggcctgagcaagcacatcaagctggaagaggaacggagaagcgaggacgcccagagcaaggccgccctgaccgactggctgcgggctaaggccagcttcgtgatcgagggcctgaaggaggccgacaaggacgagttctgcagatgcgagctgaagctgcagaagtggtacggggacctgcggggaaagcccttcgccatcgaagccgagaacagcatcctggacatcagcggcttcagcaagcagtacaactgtgccttcatctggcagaaggacggcgtgaagaagctgaacctgtacctgatcatcaactacttcaagggcggcaagctgcggttcaagaagatcaaacctgaagccttcgaagccaacagattctacaccgtgatcaacaaaaagagcggcgagatcgtgcccatggaggtgaacttcaacttcgacgaccccaacctgatcatcctgcctctggcctttggcaagagacagggcagagaattcatctggaacgacctgctgtccctggaaaccggcagcctgaagctggccaacggaagagtgatcgagaagacactgtacaacagaagaacccggcaggatgagcctgccctgttcgtggccctgaccttcgagcggcgggaggtcctggactcctccaatatcaaaccaatgaacctgatcggcgtggcaagaggcgaaaacatccccgccgtgatcgccctgaccgaccccgagggctgcccactgagccggtttaaggatagcctgggaaacccaacccacatcctgagaatcggcgagagctataaggagaagcagcggaccatccaggccaagaaggaggtggagcagcggagagccggcggctacagccggaagtacgccagcaaagccaagaatctggcagacgatatggtgagaaacaccgctagagatctgctgtactacgccgtgacccaggatgccatgctgatcttcgccaacctgagccggggcttcggccggcagggcaagcggaccttcatggccgagagacagtacacacggatggaggactggctgaccgccaagctggcctacgagggcctgagcaagacctacctgtccaagacactggcccagtacacctccaagacatgcagcaactgtgggtttaccatcaccagcgccgactacgacagggtgctggagaagctgaagaagacagcaacaggctggatgaccacaattaacggcaaggagctgaaggtggagggccagattacctactacaacagatacaagagacagaacgtagtcaaggacctgtccgtcgagctggatagactgagcgaagaatctgtgaacaacgacatctcctcctggacaaagggcagaagcggagaagctctgagcctcctgaagaaaagattctcccatagacccgtgcaggagaagttcgtgtgcctgaactgcggcttcgagacacacgcagccgagcaagccgccctgaacatcgccagatcctggctgttcctgcggagccaggagtacaagaaataccagacaaacaagacaaccggcaacaccgataagagagccttcgtcgagacctggcagtccttttaccggaagaagcttaaggaggtgtggaaacctgccgtgcggtctggcggatctggcggaggctcctgcctgcgagagcatcaccttcggcgacgtggccatcgacttcagccaccaggagtgggagtacctgaacctggtgcagaagaccctgtaccaggaggtgatgatggagaactacgacaacctggtgagcctgggccacagcatcagcaagcccgacctgatcaccctgctggagcagggcaaggagccctggatgatcgtgggcgaggagaccaggggcgagtgcaccgacctggacagcaggggatctggctccggcagcggccccaagaaaaagagaaaagtctaagctgccttctgcggggcttgccttctggccatgcccttcttctctcccttgcacctgtacctcttggtctttgaataaagcctgagtaggaaggctagcaaaaaaaaaaaaaaaaaaaaaaaaaaaaaaaaaaaaaaaaaaaaaaaaaaaaaaaaaaaaaaaaaaaaaaaaaaaaaaaa

SEQ ID NO: 16630 - RNA, 9479 nt, synthetic construct
  source 1..9479: mol_type = other RNA
aggaaataagagagaaaagaagagtaagaagaaatataagagccaccatggcccctaagaagaagcgtaaagtgagccggatggaacgcctcgtctacgaggtgcggcagaagtgcagaaacatcgaggacatctgcatctcctgcggatctctgaacgtgaccctggagcacccactgttcatcggcggcatgtgccagaactgtaaaaactgttttctggagtgtgcctatcaatacgacgatgacggctaccagagctactgcaccatctgttgcggcggaagagaggtgctgatgtgtggaaataacaactgctgccggtgcttctgcgtggaatgcgtggacctgctggtgggccccggcgccgcccaggccgctattaaggaagatccttggaactgctacatgtgcggccacaagggcacatacggcctgctgagacggagagaggactggcctagcagactgcagatgttcttcgccaataaccacgaccaggagttcgacccccctaaggtgtaccctcccgtccccgccgagaagagaaagcccatccgggtcctgagcctgttcgatggcatcgccaccggtctgctggtgctgaaggacctgggcatccaggtggataggtacattgcctccgaggtgtgcgaggactccatcaccgtgggaatggtgcgtcatcagggcaagatcatgtacgtgggcgacgtgcggagcgtgacacagaagcatatccaggagtggggccctttcgacctggtgatcggcggcagcccttgcaatgacctgagcatcgtgaacccagcccggaagggcctgtacgagggaaccggcagactgttcttcgagttttacagactgctgcacgacgcccggcctaaggaaggcgacgaccggcccttcttttggctgttcgagaatgtggtggccatgggagtcagcgacaagcgggatattagccggttcctggagagcaaccccgtgatgatcgatgccaaggaagtgagcgccgcccaccgggccagatacttctggggcaatctgcctggcatgaacagacccctggccagcaccgtgaacgacaagctggagctgcaggagtgcctggagcacggccggatcgccaagttcagcaaggtgagaaccatcaccacccgaagcaacagcatcaaacaaggcaaggaccagcactttcctgtgttcatgaacgagaaggaggacatcctgtggtgtaccgagatggagagagtgttcgggttcccagtccactacacagatgtcagcaacatgtctagactggccagacagagactgctgggaagaagctggtccgtccctgtgatcagacacctgttcgcccctctgaaggagtacttcgcctgcgtgagcagcggcaacagcaacgccaacagccggggccccagcttctctagcggcctggtgccactgtccctgagagggagccacatgggccccatggagatctacaaaaccgtgagcgcctggaagcggcagcctgtgcgcgtgctgagcctgtttcggaatatcgataaagtcctgaaaagcctgggattcctggagagcggctctggctccggcggtggcaccctgaagtacgtggaggatgtgacaaacgtggtcagacgggatgtggagaagtggggccccttcgatctggtgtacggcagcacccaacccctgggcagctcttgtgaccggtgccctggctggtacatgtttcagttccaccggatcctgcagtacgccctgccgagacaggagtcccagcggccattcttttggattttcatggacaacttgctgctgaccgaggatgaccaggaaactaccactcggttcctgcagaccgaagccgtgaccctgcaggacgtgagaggccgggactaccagaacgccatgcgggtgtggtccaacatccctggactgaaaagcaagcacgcacctctgacccctaaagaagaggagtacctgcaggcccaggtgcggagcagaagcaagctggacgcccctaaggtggatctgctggtgaagaattgcctcctgcccctgagagagtacttcaagtatttcagccagaatagtctgcccctgggaggcagcggcggcggcgccctggtgacatttgaggacgtcgccgtgcggttcacccaggaggaatgggctctgctggatccttctcagaaaatcctgtaccgggacgtgatgagagagacataccggaatctgacctccgtgggcatcaactgggaatgttgggaccttgaagcctgcttcagaagcctgggaagaaacctgagagtgcaggtggtgaagagaaagtgcgagctgaccaacagcggcccctgcgccgagggcggcccaagcagcggcgcccctcctcccagcggcggcagcccagccggctccccaacctctaccgaggagggcacctctgagtccgccacccccgagagcggccctggcacctccaccgagcccagcgagggcagcgcacccggcagccctgccggcagccccacctccacagaggagggaaccagcaccgagcccagcgaaggcagcgccccaggcaccagcaccgagcctagtgagcaggagattaaacggatcaacaagatcagaagaagacttgtgaaagacagcaacaccaagaaggccggcaagacaggccccatgaaaaccctgctggttagagtgatgacacccgatctgagagagcggctggaaaacctgagaaagaagcctgaaaatatcccccagcccatcagcaatacatctagagccaacctgaataagctgctgaccgattacaccgaaatgaagaaggcgatcctgcatgtgtactgggaagagttccagaaggaccctgtgggcctgatgagccgggtggcccagcctgccagcaagaagatcgatcagaacaagctgaaacctgagatggacgagaagggcaacctgaccaccgccggctttgcctgctctcagtgtggccagcccctgttcgtgtacaagctggagcaggtgtctgagaagggcaaggcttacaccaactacttcggacggtgcaatgtggccgagcacgaaaagctgatcctgctggcccagctgaagcccgagaaggatagcgacgaagccgtgacatatagcctgggaaagtttgggcagagggccctggatttctacagcattcatgtgaccaaggagtccacccaccccgtgaagcccctggcccagatcgccggaaacagatacgcctccggacctgtgggaaaggccctgagcgacgcatgtatgggcacaatcgcctccttcctgtctaagtaccaggacatcatcatcgaacaccagaaggtggtgaagggcaaccagaagagactggagagcctgcgggagctggccggcaaggaaaacctggaataccctagcgtgaccctgccacctcagcctcacaccaaggagggcgttgatgcctacaacgaagtgatcgcccgggtgcgaatgtgggtgaacctgaacctgtggcagaagctgaagctaagcagagatgatgccaagcctctgctgagactgaagggattcccttcctttcctctggtcgagagacaggccaacgaagtggactggtgggacatggtgtgtaacgtgaagaagctgatcaacgagaaaaaggaggatggcaaggtgttttggcagaatctggctggctacaagagacaggaagccctgagaccatacctgagcagcgaggaagatcggaagaagggaaagaaattcgctcggtaccagctgggcgacctgctgctgcacctggaaaagaagcacggcgaggactggggaaaggtgtacgacgaggcctgggagcggattgacaagaaagtggaaggcctgagcaagcacatcaagctggaagaggaacggagaagcgaggacgcccagagcaaggccgccctgaccgactggctgcgggctaaggccagcttcgtgatcgagggcctgaaggaggccgacaaggacgagttctgcagatgcgagctgaagctgcagaagtggtacggggacctgcggggaaagcccttcgccatcgaagccgagaacagcatcctggacatcagcggcttcagcaagcagtacaactgtgccttcatctggcagaaggacggcgtgaagaagctgaacctgtacctgatcatcaactacttcaagggcggcaagctgcggttcaagaagatcaaacctgaagccttcgaagccaacagattctacaccgtgatcaacaaaaagagcggcgagatcgtgcccatggaggtgaacttcaacttcgacgaccccaacctgatcatcctgcctctggcctttggcaagagacagggcagagaattcatctggaacgacctgctgtccctggaaaccggcagcctgaagctggccaacggaagagtgatcgagaagacactgtacaacagaagaacccggcaggatgagcctgccctgttcgtggccctgaccttcgagcggcgggaggtcctggactcctccaatatcaaaccaatgaacctgatcggcgtggcaagaggcgaaaacatccccgccgtgatcgccctgaccgaccccgagggctgcccactgagccggtttaaggatagcctgggaaacccaacccacatcctgagaatcggcgagagctataaggagaagcagcggaccatccaggccaagaaggaggtggagcagcggagagccggcggctacagccggaagtacgccagcaaagccaagaatctggcagacgatatggtgagaaacaccgctagagatctgctgtactacgccgtgacccaggatgccatgctgatcttcgccaacctgagccggggcttcggccggcagggcaagcggaccttcatggccgagagacagtacacacggatggaggactggctgaccgccaagctggcctacgagggcctgagcaagacctacctgtccaagacactggcccagtacacctccaagacatgcagcaactgtgggtttaccatcaccagcgccgactacgacagggtgctggagaagctgaagaagacagcaacaggctggatgaccacaattaacggcaaggagctgaaggtggagggccagattacctactacaacagatacaagagacagaacgtagtcaaggacctgtccgtcgagctggatagactgagcgaagaatctgtgaacaacgacatctcctcctggacaaagggcagaagcggagaagctctgagcctcctgaagaaaagattctcccatagacccgtgcaggagaagttcgtgtgcctgaactgcggcttcgagacacacgcagccgagcaagccgccctgaacatcgccagatcctggctgttcctgcggagccaggagtacaagaaataccagacaaacaagacaaccggcaacaccgataagagagccttcgtcgagacctggcagtccttttaccggaagaagcttaaggaggtgtggaaacctgccgtgcggtctggcggatctggcggaggctccctgcagggcctgctgaccttcggcgacgtggccatcgagttcagccaggaggagtggaggtgcctgagccacacccagagggagctgtacagggacgtgatgctggagaactacggccacctgctgttcctgggcctgaccgtgagcaagcccgacctggtgagcttcctggagcagaggaaggagccctgggacgagaagaggaacaagaccgccggcttcgacgccagcaggtgggagggcggcccaagcagcggcgcccctcctcccagcggcggcagcccagccggctccccaacctctaccgaggagggcacctctgagtccgccacccccgagagcggccctggcacctccaccgagcccagcgagggcagcgcacccggcagccctgccggcagccccacctccacagaggagggaaccagcaccgagcccagcgaaggcagcgccccaggcaccagcaccgagcctagtgagcaggagattaaacggatcaacaagatcagaagaagacttgtgaaagacagcaacaccaagaaggccggcaagacaggccccatgaaaaccctgctggttagagtgatgacacccgatctgagagagcggctggaaaacctgagaaagaagcctgaaaatatcccccagcccatcagcaatacatctagagccaacctgaataagctgctgaccgattacaccgaaatgaagaaggcgatcctgcatgtgtactgggaagagttccagaaggaccctgtgggcctgatgagccgggtggcccagcctgccagcaagaagatcgatcagaacaagctgaaacctgagatggacgagaagggcaacctgaccaccgccggctttgcctgctctcagtgtggccagcccctgttcgtgtacaagctggagcaggtgtctgagaagggcaaggcttacaccaactacttcggacggtgcaatgtggccgagcacgaaaagctgatcctgctggcccagctgaagcccgagaaggatagcgacgaagccgtgacatatagcctgggaaagtttgggcagagggccctggatttctacagcattcatgtgaccaaggagtccacccaccccgtgaagcccctggcccagatcgccggaaacagatacgcctccggacctgtgggaaaggccctgagcgacgcatgtatgggcacaatcgcctccttcctgtctaagtaccaggacatcatcatcgaacaccagaaggtggtgaagggcaaccagaagagactggagagcctgcgggagctggccggcaaggaaaacctggaataccctagcgtgaccctgccacctcagcctcacaccaaggagggcgttgatgcctacaacgaagtgatcgcccgggtgcgaatgtgggtgaacctgaacctgtggcagaagctgaagctaagcagagatgatgccaagcctctgctgagactgaagggattcccttcctttcctctggtcgagagacaggccaacgaagtggactggtgggacatggtgtgtaacgtgaagaagctgatcaacgagaaaaaggaggatggcaaggtgttttggcagaatctggctggctacaagagacaggaagccctgagaccatacctgagcagcgaggaagatcggaagaagggaaagaaattcgctcggtaccagctgggcgacctgctgctgcacctggaaaagaagcacggcgaggactggggaaaggtgtacgacgaggcctgggagcggattgacaagaaagtggaaggcctgagcaagcacatcaagctggaagaggaacggagaagcgaggacgcccagagcaaggccgccctgaccgactggctgcgggctaaggccagcttcgtgatcgagggcctgaaggaggccgacaaggacgagttctgcagatgcgagctgaagctgcagaagtggtacggggacctgcggggaaagcccttcgccatcgaagccgagaacagcatcctggacatcagcggcttcagcaagcagtacaactgtgccttcatctggcagaaggacggcgtgaagaagctgaacctgtacctgatcatcaactacttcaagggcggcaagctgcggttcaagaagatcaaacctgaagccttcgaagccaacagattctacaccgtgatcaacaaaaagagcggcgagatcgtgcccatggaggtgaacttcaacttcgacgaccccaacctgatcatcctgcctctggcctttggcaagagacagggcagagaattcatctggaacgacctgctgtccctggaaaccggcagcctgaagctggccaacggaagagtgatcgagaagacactgtacaacagaagaacccggcaggatgagcctgccctgttcgtggccctgaccttcgagcggcgggaggtcctggactcctccaatatcaaaccaatgaacctgatcggcgtggcaagaggcgaaaacatccccgccgtgatcgccctgaccgaccccgagggctgcccactgagccggtttaaggatagcctgggaaacccaacccacatcctgagaatcggcgagagctataaggagaagcagcggaccatccaggccaagaaggaggtggagcagcggagagccggcggctacagccggaagtacgccagcaaagccaagaatctggcagacgatatggtgagaaacaccgctagagatctgctgtactacgccgtgacccaggatgccatgctgatcttcgccaacctgagccggggcttcggccggcagggcaagcggaccttcatggccgagagacagtacacacggatggaggactggctgaccgccaagctggcctacgagggcctgagcaagacctacctgtccaagacactggcccagtacacctccaagacatgcagcaactgtgggtttaccatcaccagcgccgactacgacagggtgctggagaagctgaagaagacagcaacaggctggatgaccacaattaacggcaaggagctgaaggtggagggccagattacctactacaacagatacaagagacagaacgtagtcaaggacctgtccgtcgagctggatagactgagcgaagaatctgtgaacaacgacatctcctcctggacaaagggcagaagcggagaagctctgagcctcctgaagaaaagattctcccatagacccgtgcaggagaagttcgtgtgcctgaactgcggcttcgagacacacgcagccgagcaagccgccctgaacatcgccagatcctggctgttcctgcggagccaggagtacaagaaataccagacaaacaagacaaccggcaacaccgataagagagccttcgtcgagacctggcagtccttttaccggaagaagcttaaggaggtgtggaaacctgccgtgcggtctggcggatctggcggaggctcctctgcagggcctgctgaccttcggcgacgtggccatcgagttcagccaggaggagtggaggtgcctgagccacacccagagggagctgtacagggacgtgatgctggagaactacggccacctgctgttcctgggcctgaccgtgagcaagcccgacctggtgagcttcctggagcagaggaaggagccctgggacgagaagaggaacaagaccgccggcttcgacgccagcaggtgggagggatctggctccggcagcggccccaagaaaaagagaaaagtctaagctgccttctgcggggcttgccttctggccatgcccttcttctctcccttgcacctgtacctcttggtctttgaataaagcctgagtaggaaggctagcaaaaaaaaaaaaaaaaaaaaaaaaaaaaaaaaaaaaaaaaaaaaaaaaaaaaaaaaaaaaaaaaaaaaaaaaaaaaaaaa

SEQ ID NO: 16631 - RNA, 9485 nt, synthetic construct
  source 1..9485: mol_type = other RNA
aggaaataagagagaaaagaagagtaagaagaaatataagagccaccatggcccctaagaagaagcgtaaagtgagccggatggaacgcctcgtctacgaggtgcggcagaagtgcagaaacatcgaggacatctgcatctcctgcggatctctgaacgtgaccctggagcacccactgttcatcggcggcatgtgccagaactgtaaaaactgttttctggagtgtgcctatcaatacgacgatgacggctaccagagctactgcaccatctgttgcggcggaagagaggtgctgatgtgtggaaataacaactgctgccggtgcttctgcgtggaatgcgtggacctgctggtgggccccggcgccgcccaggccgctattaaggaagatccttggaactgctacatgtgcggccacaagggcacatacggcctgctgagacggagagaggactggcctagcagactgcagatgttcttcgccaataaccacgaccaggagttcgacccccctaaggtgtaccctcccgtccccgccgagaagagaaagcccatccgggtcctgagcctgttcgatggcatcgccaccggtctgctggtgctgaaggacctgggcatccaggtggataggtacattgcctccgaggtgtgcgaggactccatcaccgtgggaatggtgcgtcatcagggcaagatcatgtacgtgggcgacgtgcggagcgtgacacagaagcatatccaggagtggggccctttcgacctggtgatcggcggcagcccttgcaatgacctgagcatcgtgaacccagcccggaagggcctgtacgagggaaccggcagactgttcttcgagttttacagactgctgcacgacgcccggcctaaggaaggcgacgaccggcccttcttttggctgttcgagaatgtggtggccatgggagtcagcgacaagcgggatattagccggttcctggagagcaaccccgtgatgatcgatgccaaggaagtgagcgccgcccaccgggccagatacttctggggcaatctgcctggcatgaacagacccctggccagcaccgtgaacgacaagctggagctgcaggagtgcctggagcacggccggatcgccaagttcagcaaggtgagaaccatcaccacccgaagcaacagcatcaaacaaggcaaggaccagcactttcctgtgttcatgaacgagaaggaggacatcctgtggtgtaccgagatggagagagtgttcgggttcccagtccactacacagatgtcagcaacatgtctagactggccagacagagactgctgggaagaagctggtccgtccctgtgatcagacacctgttcgcccctctgaaggagtacttcgcctgcgtgagcagcggcaacagcaacgccaacagccggggccccagcttctctagcggcctggtgccactgtccctgagagggagccacatgggccccatggagatctacaaaaccgtgagcgcctggaagcggcagcctgtgcgcgtgctgagcctgtttcggaatatcgataaagtcctgaaaagcctgggattcctggagagcggctctggctccggcggtggcaccctgaagtacgtggaggatgtgacaaacgtggtcagacgggatgtggagaagtggggccccttcgatctggtgtacggcagcacccaacccctgggcagctcttgtgaccggtgccctggctggtacatgtttcagttccaccggatcctgcagtacgccctgccgagacaggagtcccagcggccattcttttggattttcatggacaacttgctgctgaccgaggatgaccaggaaactaccactcggttcctgcagaccgaagccgtgaccctgcaggacgtgagaggccgggactaccagaacgccatgcgggtgtggtccaacatccctggactgaaaagcaagcacgcacctctgacccctaaagaagaggagtacctgcaggcccaggtgcggagcagaagcaagctggacgcccctaaggtggatctgctggtgaagaattgcctcctgcccctgagagagtacttcaagtatttcagccagaatagtctgcccctgggaggcagcggcggcggcgccctggtgacatttgaggacgtcgccgtgcggttcacccaggaggaatgggctctgctggatccttctcagaaaatcctgtaccgggacgtgatgagagagacataccggaatctgacctccgtgggcatcaactgggaatgttgggaccttgaagcctgcttcagaagcctgggaagaaacctgagagtgcaggtggtgaagagaaagtgcgagctgaccaacagcggcccctgcgccgagggcggcccaagcagcggcgcccctcctcccagcggcggcagcccagccggctccccaacctctaccgaggagggcacctctgagtccgccacccccgagagcggccctggcacctccaccgagcccagcgagggcagcgcacccggcagccctgccggcagccccacctccacagaggagggaaccagcaccgagcccagcgaaggcagcgccccaggcaccagcaccgagcctagtgagcaggagattaaacggatcaacaagatcagaagaagacttgtgaaagacagcaacaccaagaaggccggcaagacaggccccatgaaaaccctgctggttagagtgatgacacccgatctgagagagcggctggaaaacctgagaaagaagcctgaaaatatcccccagcccatcagcaatacatctagagccaacctgaataagctgctgaccgattacaccgaaatgaagaaggcgatcctgcatgtgtactgggaagagttccagaaggaccctgtgggcctgatgagccgggtggcccagcctgccagcaagaagatcgatcagaacaagctgaaacctgagatggacgagaagggcaacctgaccaccgccggctttgcctgctctcagtgtggccagcccctgttcgtgtacaagctggagcaggtgtctgagaagggcaaggcttacaccaactacttcggacggtgcaatgtggccgagcacgaaaagctgatcctgctggcccagctgaagcccgagaaggatagcgacgaagccgtgacatatagcctgggaaagtttgggcagagggccctggatttctacagcattcatgtgaccaaggagtccacccaccccgtgaagcccctggcccagatcgccggaaacagatacgcctccggacctgtgggaaaggccctgagcgacgcatgtatgggcacaatcgcctccttcctgtctaagtaccaggacatcatcatcgaacaccagaaggtggtgaagggcaaccagaagagactggagagcctgcgggagctggccggcaaggaaaacctggaataccctagcgtgaccctgccacctcagcctcacaccaaggagggcgttgatgcctacaacgaagtgatcgcccgggtgcgaatgtgggtgaacctgaacctgtggcagaagctgaagctaagcagagatgatgccaagcctctgctgagactgaagggattcccttcctttcctctggtcgagagacaggccaacgaagtggactggtgggacatggtgtgtaacgtgaagaagctgatcaacgagaaaaaggaggatggcaaggtgttttggcagaatctggctggctacaagagacaggaagccctgagaccatacctgagcagcgaggaagatcggaagaagggaaagaaattcgctcggtaccagctgggcgacctgctgctgcacctggaaaagaagcacggcgaggactggggaaaggtgtacgacgaggcctgggagcggattgacaagaaagtggaaggcctgagcaagcacatcaagctggaagaggaacggagaagcgaggacgcccagagcaaggccgccctgaccgactggctgcgggctaaggccagcttcgtgatcgagggcctgaaggaggccgacaaggacgagttctgcagatgcgagctgaagctgcagaagtggtacggggacctgcggggaaagcccttcgccatcgaagccgagaacagcatcctggacatcagcggcttcagcaagcagtacaactgtgccttcatctggcagaaggacggcgtgaagaagctgaacctgtacctgatcatcaactacttcaagggcggcaagctgcggttcaagaagatcaaacctgaagccttcgaagccaacagattctacaccgtgatcaacaaaaagagcggcgagatcgtgcccatggaggtgaacttcaacttcgacgaccccaacctgatcatcctgcctctggcctttggcaagagacagggcagagaattcatctggaacgacctgctgtccctggaaaccggcagcctgaagctggccaacggaagagtgatcgagaagacactgtacaacagaagaacccggcaggatgagcctgccctgttcgtggccctgaccttcgagcggcgggaggtcctggactcctccaatatcaaaccaatgaacctgatcggcgtggcaagaggcgaaaacatccccgccgtgatcgccctgaccgaccccgagggctgcccactgagccggtttaaggatagcctgggaaacccaacccacatcctgagaatcggcgagagctataaggagaagcagcggaccatccaggccaagaaggaggtggagcagcggagagccggcggctacagccggaagtacgccagcaaagccaagaatctggcagacgatatggtgagaaacaccgctagagatctgctgtactacgccgtgacccaggatgccatgctgatcttcgccaacctgagccggggcttcggccggcagggcaagcggaccttcatggccgagagacagtacacacggatggaggactggctgaccgccaagctggcctacgagggcctgagcaagacctacctgtccaagacactggcccagtacacctccaagacatgcagcaactgtgggtttaccatcaccagcgccgactacgacagggtgctggagaagctgaagaagacagcaacaggctggatgaccacaattaacggcaaggagctgaaggtggagggccagattacctactacaacagatacaagagacagaacgtagtcaaggacctgtccgtcgagctggatagactgagcgaagaatctgtgaacaacgacatctcctcctggacaaagggcagaagcggagaagctctgagcctcctgaagaaaagattctcccatagacccgtgcaggagaagttcgtgtgcctgaactgcggcttcgagacacacgcagccgagcaagccgccctgaacatcgccagatcctggctgttcctgcggagccaggagtacaagaaataccagacaaacaagacaaccggcaacaccgataagagagccttcgtcgagacctggcagtccttttaccggaagaagcttaaggaggtgtggaaacctgccgtgcggtctggcggatctggcggaggctccgtgcacggcagcgtgaccttcagggacgtggccatcgacttcagccaggaggagtgggagtgcctgcagcccgaccagaggaacctgtacagggacgtgatgctggagaactacagccacctgatcagcctgggcagcagcatcagcaagcccgacgtgatcaccctgctggagcaggagaaggagccctggatcgtggtgaggaaggagaccagcaggtggtaccccgacctggagagcaagggcggcccaagcagcggcgcccctcctcccagcggcggcagcccagccggctccccaacctctaccgaggagggcacctctgagtccgccacccccgagagcggccctggcacctccaccgagcccagcgagggcagcgcacccggcagccctgccggcagccccacctccacagaggagggaaccagcaccgagcccagcgaaggcagcgccccaggcaccagcaccgagcctagtgagcaggagattaaacggatcaacaagatcagaagaagacttgtgaaagacagcaacaccaagaaggccggcaagacaggccccatgaaaaccctgctggttagagtgatgacacccgatctgagagagcggctggaaaacctgagaaagaagcctgaaaatatcccccagcccatcagcaatacatctagagccaacctgaataagctgctgaccgattacaccgaaatgaagaaggcgatcctgcatgtgtactgggaagagttccagaaggaccctgtgggcctgatgagccgggtggcccagcctgccagcaagaagatcgatcagaacaagctgaaacctgagatggacgagaagggcaacctgaccaccgccggctttgcctgctctcagtgtggccagcccctgttcgtgtacaagctggagcaggtgtctgagaagggcaaggcttacaccaactacttcggacggtgcaatgtggccgagcacgaaaagctgatcctgctggcccagctgaagcccgagaaggatagcgacgaagccgtgacatatagcctgggaaagtttgggcagagggccctggatttctacagcattcatgtgaccaaggagtccacccaccccgtgaagcccctggcccagatcgccggaaacagatacgcctccggacctgtgggaaaggccctgagcgacgcatgtatgggcacaatcgcctccttcctgtctaagtaccaggacatcatcatcgaacaccagaaggtggtgaagggcaaccagaagagactggagagcctgcgggagctggccggcaaggaaaacctggaataccctagcgtgaccctgccacctcagcctcacaccaaggagggcgttgatgcctacaacgaagtgatcgcccgggtgcgaatgtgggtgaacctgaacctgtggcagaagctgaagctaagcagagatgatgccaagcctctgctgagactgaagggattcccttcctttcctctggtcgagagacaggccaacgaagtggactggtgggacatggtgtgtaacgtgaagaagctgatcaacgagaaaaaggaggatggcaaggtgttttggcagaatctggctggctacaagagacaggaagccctgagaccatacctgagcagcgaggaagatcggaagaagggaaagaaattcgctcggtaccagctgggcgacctgctgctgcacctggaaaagaagcacggcgaggactggggaaaggtgtacgacgaggcctgggagcggattgacaagaaagtggaaggcctgagcaagcacatcaagctggaagaggaacggagaagcgaggacgcccagagcaaggccgccctgaccgactggctgcgggctaaggccagcttcgtgatcgagggcctgaaggaggccgacaaggacgagttctgcagatgcgagctgaagctgcagaagtggtacggggacctgcggggaaagcccttcgccatcgaagccgagaacagcatcctggacatcagcggcttcagcaagcagtacaactgtgccttcatctggcagaaggacggcgtgaagaagctgaacctgtacctgatcatcaactacttcaagggcggcaagctgcggttcaagaagatcaaacctgaagccttcgaagccaacagattctacaccgtgatcaacaaaaagagcggcgagatcgtgcccatggaggtgaacttcaacttcgacgaccccaacctgatcatcctgcctctggcctttggcaagagacagggcagagaattcatctggaacgacctgctgtccctggaaaccggcagcctgaagctggccaacggaagagtgatcgagaagacactgtacaacagaagaacccggcaggatgagcctgccctgttcgtggccctgaccttcgagcggcgggaggtcctggactcctccaatatcaaaccaatgaacctgatcggcgtggcaagaggcgaaaacatccccgccgtgatcgccctgaccgaccccgagggctgcccactgagccggtttaaggatagcctgggaaacccaacccacatcctgagaatcggcgagagctataaggagaagcagcggaccatccaggccaagaaggaggtggagcagcggagagccggcggctacagccggaagtacgccagcaaagccaagaatctggcagacgatatggtgagaaacaccgctagagatctgctgtactacgccgtgacccaggatgccatgctgatcttcgccaacctgagccggggcttcggccggcagggcaagcggaccttcatggccgagagacagtacacacggatggaggactggctgaccgccaagctggcctacgagggcctgagcaagacctacctgtccaagacactggcccagtacacctccaagacatgcagcaactgtgggtttaccatcaccagcgccgactacgacagggtgctggagaagctgaagaagacagcaacaggctggatgaccacaattaacggcaaggagctgaaggtggagggccagattacctactacaacagatacaagagacagaacgtagtcaaggacctgtccgtcgagctggatagactgagcgaagaatctgtgaacaacgacatctcctcctggacaaagggcagaagcggagaagctctgagcctcctgaagaaaagattctcccatagacccgtgcaggagaagttcgtgtgcctgaactgcggcttcgagacacacgcagccgagcaagccgccctgaacatcgccagatcctggctgttcctgcggagccaggagtacaagaaataccagacaaacaagacaaccggcaacaccgataagagagccttcgtcgagacctggcagtccttttaccggaagaagcttaaggaggtgtggaaacctgccgtgcggtctggcggatctggcggaggctcctgtgcacggcagcgtgaccttcagggacgtggccatcgacttcagccaggaggagtgggagtgcctgcagcccgaccagaggaacctgtacagggacgtgatgctggagaactacagccacctgatcagcctgggcagcagcatcagcaagcccgacgtgatcaccctgctggagcaggagaaggagccctggatcgtggtgaggaaggagaccagcaggtggtaccccgacctggagagcaagggatctggctccggcagcggccccaagaaaaagagaaaagtctaagctgccttctgcggggcttgccttctggccatgcccttcttctctcccttgcacctgtacctcttggtctttgaataaagcctgagtaggaaggctagcaaaaaaaaaaaaaaaaaaaaaaaaaaaaaaaaaaaaaaaaaaaaaaaaaaaaaaaaaaaaaaaaaaaaaaaaaaaaaaaa

SEQ ID NO: 16632 - RNA, 9485 nt, synthetic construct
  source 1..9485: mol_type = other RNA
aggaaataagagagaaaagaagagtaagaagaaatataagagccaccatggcccctaagaagaagcgtaaagtgagccggatggaacgcctcgtctacgaggtgcggcagaagtgcagaaacatcgaggacatctgcatctcctgcggatctctgaacgtgaccctggagcacccactgttcatcggcggcatgtgccagaactgtaaaaactgttttctggagtgtgcctatcaatacgacgatgacggctaccagagctactgcaccatctgttgcggcggaagagaggtgctgatgtgtggaaataacaactgctgccggtgcttctgcgtggaatgcgtggacctgctggtgggccccggcgccgcccaggccgctattaaggaagatccttggaactgctacatgtgcggccacaagggcacatacggcctgctgagacggagagaggactggcctagcagactgcagatgttcttcgccaataaccacgaccaggagttcgacccccctaaggtgtaccctcccgtccccgccgagaagagaaagcccatccgggtcctgagcctgttcgatggcatcgccaccggtctgctggtgctgaaggacctgggcatccaggtggataggtacattgcctccgaggtgtgcgaggactccatcaccgtgggaatggtgcgtcatcagggcaagatcatgtacgtgggcgacgtgcggagcgtgacacagaagcatatccaggagtggggccctttcgacctggtgatcggcggcagcccttgcaatgacctgagcatcgtgaacccagcccggaagggcctgtacgagggaaccggcagactgttcttcgagttttacagactgctgcacgacgcccggcctaaggaaggcgacgaccggcccttcttttggctgttcgagaatgtggtggccatgggagtcagcgacaagcgggatattagccggttcctggagagcaaccccgtgatgatcgatgccaaggaagtgagcgccgcccaccgggccagatacttctggggcaatctgcctggcatgaacagacccctggccagcaccgtgaacgacaagctggagctgcaggagtgcctggagcacggccggatcgccaagttcagcaaggtgagaaccatcaccacccgaagcaacagcatcaaacaaggcaaggaccagcactttcctgtgttcatgaacgagaaggaggacatcctgtggtgtaccgagatggagagagtgttcgggttcccagtccactacacagatgtcagcaacatgtctagactggccagacagagactgctgggaagaagctggtccgtccctgtgatcagacacctgttcgcccctctgaaggagtacttcgcctgcgtgagcagcggcaacagcaacgccaacagccggggccccagcttctctagcggcctggtgccactgtccctgagagggagccacatgggccccatggagatctacaaaaccgtgagcgcctggaagcggcagcctgtgcgcgtgctgagcctgtttcggaatatcgataaagtcctgaaaagcctgggattcctggagagcggctctggctccggcggtggcaccctgaagtacgtggaggatgtgacaaacgtggtcagacgggatgtggagaagtggggccccttcgatctggtgtacggcagcacccaacccctgggcagctcttgtgaccggtgccctggctggtacatgtttcagttccaccggatcctgcagtacgccctgccgagacaggagtcccagcggccattcttttggattttcatggacaacttgctgctgaccgaggatgaccaggaaactaccactcggttcctgcagaccgaagccgtgaccctgcaggacgtgagaggccgggactaccagaacgccatgcgggtgtggtccaacatccctggactgaaaagcaagcacgcacctctgacccctaaagaagaggagtacctgcaggcccaggtgcggagcagaagcaagctggacgcccctaaggtggatctgctggtgaagaattgcctcctgcccctgagagagtacttcaagtatttcagccagaatagtctgcccctgggaggcagcggcggcggcgccctggtgacatttgaggacgtcgccgtgcggttcacccaggaggaatgggctctgctggatccttctcagaaaatcctgtaccgggacgtgatgagagagacataccggaatctgacctccgtgggcatcaactgggaatgttgggaccttgaagcctgcttcagaagcctgggaagaaacctgagagtgcaggtggtgaagagaaagtgcgagctgaccaacagcggcccctgcgccgagggcggcccaagcagcggcgcccctcctcccagcggcggcagcccagccggctccccaacctctaccgaggagggcacctctgagtccgccacccccgagagcggccctggcacctccaccgagcccagcgagggcagcgcacccggcagccctgccggcagccccacctccacagaggagggaaccagcaccgagcccagcgaaggcagcgccccaggcaccagcaccgagcctagtgagcaggagattaaacggatcaacaagatcagaagaagacttgtgaaagacagcaacaccaagaaggccggcaagacaggccccatgaaaaccctgctggttagagtgatgacacccgatctgagagagcggctggaaaacctgagaaagaagcctgaaaatatcccccagcccatcagcaatacatctagagccaacctgaataagctgctgaccgattacaccgaaatgaagaaggcgatcctgcatgtgtactgggaagagttccagaaggaccctgtgggcctgatgagccgggtggcccagcctgccagcaagaagatcgatcagaacaagctgaaacctgagatggacgagaagggcaacctgaccaccgccggctttgcctgctctcagtgtggccagcccctgttcgtgtacaagctggagcaggtgtctgagaagggcaaggcttacaccaactacttcggacggtgcaatgtggccgagcacgaaaagctgatcctgctggcccagctgaagcccgagaaggatagcgacgaagccgtgacatatagcctgggaaagtttgggcagagggccctggatttctacagcattcatgtgaccaaggagtccacccaccccgtgaagcccctggcccagatcgccggaaacagatacgcctccggacctgtgggaaaggccctgagcgacgcatgtatgggcacaatcgcctccttcctgtctaagtaccaggacatcatcatcgaacaccagaaggtggtgaagggcaaccagaagagactggagagcctgcgggagctggccggcaaggaaaacctggaataccctagcgtgaccctgccacctcagcctcacaccaaggagggcgttgatgcctacaacgaagtgatcgcccgggtgcgaatgtgggtgaacctgaacctgtggcagaagctgaagctaagcagagatgatgccaagcctctgctgagactgaagggattcccttcctttcctctggtcgagagacaggccaacgaagtggactggtgggacatggtgtgtaacgtgaagaagctgatcaacgagaaaaaggaggatggcaaggtgttttggcagaatctggctggctacaagagacaggaagccctgagaccatacctgagcagcgaggaagatcggaagaagggaaagaaattcgctcggtaccagctgggcgacctgctgctgcacctggaaaagaagcacggcgaggactggggaaaggtgtacgacgaggcctgggagcggattgacaagaaagtggaaggcctgagcaagcacatcaagctggaagaggaacggagaagcgaggacgcccagagcaaggccgccctgaccgactggctgcgggctaaggccagcttcgtgatcgagggcctgaaggaggccgacaaggacgagttctgcagatgcgagctgaagctgcagaagtggtacggggacctgcggggaaagcccttcgccatcgaagccgagaacagcatcctggacatcagcggcttcagcaagcagtacaactgtgccttcatctggcagaaggacggcgtgaagaagctgaacctgtacctgatcatcaactacttcaagggcggcaagctgcggttcaagaagatcaaacctgaagccttcgaagccaacagattctacaccgtgatcaacaaaaagagcggcgagatcgtgcccatggaggtgaacttcaacttcgacgaccccaacctgatcatcctgcctctggcctttggcaagagacagggcagagaattcatctggaacgacctgctgtccctggaaaccggcagcctgaagctggccaacggaagagtgatcgagaagacactgtacaacagaagaacccggcaggatgagcctgccctgttcgtggccctgaccttcgagcggcgggaggtcctggactcctccaatatcaaaccaatgaacctgatcggcgtggcaagaggcgaaaacatccccgccgtgatcgccctgaccgaccccgagggctgcccactgagccggtttaaggatagcctgggaaacccaacccacatcctgagaatcggcgagagctataaggagaagcagcggaccatccaggccaagaaggaggtggagcagcggagagccggcggctacagccggaagtacgccagcaaagccaagaatctggcagacgatatggtgagaaacaccgctagagatctgctgtactacgccgtgacccaggatgccatgctgatcttcgccaacctgagccggggcttcggccggcagggcaagcggaccttcatggccgagagacagtacacacggatggaggactggctgaccgccaagctggcctacgagggcctgagcaagacctacctgtccaagacactggcccagtacacctccaagacatgcagcaactgtgggtttaccatcaccagcgccgactacgacagggtgctggagaagctgaagaagacagcaacaggctggatgaccacaattaacggcaaggagctgaaggtggagggccagattacctactacaacagatacaagagacagaacgtagtcaaggacctgtccgtcgagctggatagactgagcgaagaatctgtgaacaacgacatctcctcctggacaaagggcagaagcggagaagctctgagcctcctgaagaaaagattctcccatagacccgtgcaggagaagttcgtgtgcctgaactgcggcttcgagacacacgcagccgagcaagccgccctgaacatcgccagatcctggctgttcctgcggagccaggagtacaagaaataccagacaaacaagacaaccggcaacaccgataagagagccttcgtcgagacctggcagtccttttaccggaagaagcttaaggaggtgtggaaacctgccgtgcggtctggcggatctggcggaggctccatgggccccctgcagttcagggacgtggccatcgagttcagcctggaggagtggcactgcctggacaccacccagaggaacctgtacagggacgtgatgctggagaactacaggaacctggtgttcctgggcatcgtggtgagcaagcccgacctgatcacctgcctggagcagggcaagaagcccctgaccatgaagaggcacgagatgatcgccaagccccccggccaggcccagtggctgggcggcccaagcagcggcgcccctcctcccagcggcggcagcccagccggctccccaacctctaccgaggagggcacctctgagtccgccacccccgagagcggccctggcacctccaccgagcccagcgagggcagcgcacccggcagccctgccggcagccccacctccacagaggagggaaccagcaccgagcccagcgaaggcagcgccccaggcaccagcaccgagcctagtgagcaggagattaaacggatcaacaagatcagaagaagacttgtgaaagacagcaacaccaagaaggccggcaagacaggccccatgaaaaccctgctggttagagtgatgacacccgatctgagagagcggctggaaaacctgagaaagaagcctgaaaatatcccccagcccatcagcaatacatctagagccaacctgaataagctgctgaccgattacaccgaaatgaagaaggcgatcctgcatgtgtactgggaagagttccagaaggaccctgtgggcctgatgagccgggtggcccagcctgccagcaagaagatcgatcagaacaagctgaaacctgagatggacgagaagggcaacctgaccaccgccggctttgcctgctctcagtgtggccagcccctgttcgtgtacaagctggagcaggtgtctgagaagggcaaggcttacaccaactacttcggacggtgcaatgtggccgagcacgaaaagctgatcctgctggcccagctgaagcccgagaaggatagcgacgaagccgtgacatatagcctgggaaagtttgggcagagggccctggatttctacagcattcatgtgaccaaggagtccacccaccccgtgaagcccctggcccagatcgccggaaacagatacgcctccggacctgtgggaaaggccctgagcgacgcatgtatgggcacaatcgcctccttcctgtctaagtaccaggacatcatcatcgaacaccagaaggtggtgaagggcaaccagaagagactggagagcctgcgggagctggccggcaaggaaaacctggaataccctagcgtgaccctgccacctcagcctcacaccaaggagggcgttgatgcctacaacgaagtgatcgcccgggtgcgaatgtgggtgaacctgaacctgtggcagaagctgaagctaagcagagatgatgccaagcctctgctgagactgaagggattcccttcctttcctctggtcgagagacaggccaacgaagtggactggtgggacatggtgtgtaacgtgaagaagctgatcaacgagaaaaaggaggatggcaaggtgttttggcagaatctggctggctacaagagacaggaagccctgagaccatacctgagcagcgaggaagatcggaagaagggaaagaaattcgctcggtaccagctgggcgacctgctgctgcacctggaaaagaagcacggcgaggactggggaaaggtgtacgacgaggcctgggagcggattgacaagaaagtggaaggcctgagcaagcacatcaagctggaagaggaacggagaagcgaggacgcccagagcaaggccgccctgaccgactggctgcgggctaaggccagcttcgtgatcgagggcctgaaggaggccgacaaggacgagttctgcagatgcgagctgaagctgcagaagtggtacggggacctgcggggaaagcccttcgccatcgaagccgagaacagcatcctggacatcagcggcttcagcaagcagtacaactgtgccttcatctggcagaaggacggcgtgaagaagctgaacctgtacctgatcatcaactacttcaagggcggcaagctgcggttcaagaagatcaaacctgaagccttcgaagccaacagattctacaccgtgatcaacaaaaagagcggcgagatcgtgcccatggaggtgaacttcaacttcgacgaccccaacctgatcatcctgcctctggcctttggcaagagacagggcagagaattcatctggaacgacctgctgtccctggaaaccggcagcctgaagctggccaacggaagagtgatcgagaagacactgtacaacagaagaacccggcaggatgagcctgccctgttcgtggccctgaccttcgagcggcgggaggtcctggactcctccaatatcaaaccaatgaacctgatcggcgtggcaagaggcgaaaacatccccgccgtgatcgccctgaccgaccccgagggctgcccactgagccggtttaaggatagcctgggaaacccaacccacatcctgagaatcggcgagagctataaggagaagcagcggaccatccaggccaagaaggaggtggagcagcggagagccggcggctacagccggaagtacgccagcaaagccaagaatctggcagacgatatggtgagaaacaccgctagagatctgctgtactacgccgtgacccaggatgccatgctgatcttcgccaacctgagccggggcttcggccggcagggcaagcggaccttcatggccgagagacagtacacacggatggaggactggctgaccgccaagctggcctacgagggcctgagcaagacctacctgtccaagacactggcccagtacacctccaagacatgcagcaactgtgggtttaccatcaccagcgccgactacgacagggtgctggagaagctgaagaagacagcaacaggctggatgaccacaattaacggcaaggagctgaaggtggagggccagattacctactacaacagatacaagagacagaacgtagtcaaggacctgtccgtcgagctggatagactgagcgaagaatctgtgaacaacgacatctcctcctggacaaagggcagaagcggagaagctctgagcctcctgaagaaaagattctcccatagacccgtgcaggagaagttcgtgtgcctgaactgcggcttcgagacacacgcagccgagcaagccgccctgaacatcgccagatcctggctgttcctgcggagccaggagtacaagaaataccagacaaacaagacaaccggcaacaccgataagagagccttcgtcgagacctggcagtccttttaccggaagaagcttaaggaggtgtggaaacctgccgtgcggtctggcggatctggcggaggctcctatgggccccctgcagttcagggacgtggccatcgagttcagcctggaggagtggcactgcctggacaccacccagaggaacctgtacagggacgtgatgctggagaactacaggaacctggtgttcctgggcatcgtggtgagcaagcccgacctgatcacctgcctggagcagggcaagaagcccctgaccatgaagaggcacgagatgatcgccaagccccccggccaggcccagtggctgggatctggctccggcagcggccccaagaaaaagagaaaagtctaagctgccttctgcggggcttgccttctggccatgcccttcttctctcccttgcacctgtacctcttggtctttgaataaagcctgagtaggaaggctagcaaaaaaaaaaaaaaaaaaaaaaaaaaaaaaaaaaaaaaaaaaaaaaaaaaaaaaaaaaaaaaaaaaaaaaaaaaaaaaaa

SEQ ID NO: 16633 - RNA, 9485 nt, synthetic construct
  source 1..9485: mol_type = other RNA
aggaaataagagagaaaagaagagtaagaagaaatataagagccaccatggcccctaagaagaagcgtaaagtgagccggatggaacgcctcgtctacgaggtgcggcagaagtgcagaaacatcgaggacatctgcatctcctgcggatctctgaacgtgaccctggagcacccactgttcatcggcggcatgtgccagaactgtaaaaactgttttctggagtgtgcctatcaatacgacgatgacggctaccagagctactgcaccatctgttgcggcggaagagaggtgctgatgtgtggaaataacaactgctgccggtgcttctgcgtggaatgcgtggacctgctggtgggccccggcgccgcccaggccgctattaaggaagatccttggaactgctacatgtgcggccacaagggcacatacggcctgctgagacggagagaggactggcctagcagactgcagatgttcttcgccaataaccacgaccaggagttcgacccccctaaggtgtaccctcccgtccccgccgagaagagaaagcccatccgggtcctgagcctgttcgatggcatcgccaccggtctgctggtgctgaaggacctgggcatccaggtggataggtacattgcctccgaggtgtgcgaggactccatcaccgtgggaatggtgcgtcatcagggcaagatcatgtacgtgggcgacgtgcggagcgtgacacagaagcatatccaggagtggggccctttcgacctggtgatcggcggcagcccttgcaatgacctgagcatcgtgaacccagcccggaagggcctgtacgagggaaccggcagactgttcttcgagttttacagactgctgcacgacgcccggcctaaggaaggcgacgaccggcccttcttttggctgttcgagaatgtggtggccatgggagtcagcgacaagcgggatattagccggttcctggagagcaaccccgtgatgatcgatgccaaggaagtgagcgccgcccaccgggccagatacttctggggcaatctgcctggcatgaacagacccctggccagcaccgtgaacgacaagctggagctgcaggagtgcctggagcacggccggatcgccaagttcagcaaggtgagaaccatcaccacccgaagcaacagcatcaaacaaggcaaggaccagcactttcctgtgttcatgaacgagaaggaggacatcctgtggtgtaccgagatggagagagtgttcgggttcccagtccactacacagatgtcagcaacatgtctagactggccagacagagactgctgggaagaagctggtccgtccctgtgatcagacacctgttcgcccctctgaaggagtacttcgcctgcgtgagcagcggcaacagcaacgccaacagccggggccccagcttctctagcggcctggtgccactgtccctgagagggagccacatgggccccatggagatctacaaaaccgtgagcgcctggaagcggcagcctgtgcgcgtgctgagcctgtttcggaatatcgataaagtcctgaaaagcctgggattcctggagagcggctctggctccggcggtggcaccctgaagtacgtggaggatgtgacaaacgtggtcagacgggatgtggagaagtggggccccttcgatctggtgtacggcagcacccaacccctgggcagctcttgtgaccggtgccctggctggtacatgtttcagttccaccggatcctgcagtacgccctgccgagacaggagtcccagcggccattcttttggattttcatggacaacttgctgctgaccgaggatgaccaggaaactaccactcggttcctgcagaccgaagccgtgaccctgcaggacgtgagaggccgggactaccagaacgccatgcgggtgtggtccaacatccctggactgaaaagcaagcacgcacctctgacccctaaagaagaggagtacctgcaggcccaggtgcggagcagaagcaagctggacgcccctaaggtggatctgctggtgaagaattgcctcctgcccctgagagagtacttcaagtatttcagccagaatagtctgcccctgggaggcagcggcggcggcgccctggtgacatttgaggacgtcgccgtgcggttcacccaggaggaatgggctctgctggatccttctcagaaaatcctgtaccgggacgtgatgagagagacataccggaatctgacctccgtgggcatcaactgggaatgttgggaccttgaagcctgcttcagaagcctgggaagaaacctgagagtgcaggtggtgaagagaaagtgcgagctgaccaacagcggcccctgcgccgagggcggcccaagcagcggcgcccctcctcccagcggcggcagcccagccggctccccaacctctaccgaggagggcacctctgagtccgccacccccgagagcggccctggcacctccaccgagcccagcgagggcagcgcacccggcagccctgccggcagccccacctccacagaggagggaaccagcaccgagcccagcgaaggcagcgccccaggcaccagcaccgagcctagtgagcaggagattaaacggatcaacaagatcagaagaagacttgtgaaagacagcaacaccaagaaggccggcaagacaggccccatgaaaaccctgctggttagagtgatgacacccgatctgagagagcggctggaaaacctgagaaagaagcctgaaaatatcccccagcccatcagcaatacatctagagccaacctgaataagctgctgaccgattacaccgaaatgaagaaggcgatcctgcatgtgtactgggaagagttccagaaggaccctgtgggcctgatgagccgggtggcccagcctgccagcaagaagatcgatcagaacaagctgaaacctgagatggacgagaagggcaacctgaccaccgccggctttgcctgctctcagtgtggccagcccctgttcgtgtacaagctggagcaggtgtctgagaagggcaaggcttacaccaactacttcggacggtgcaatgtggccgagcacgaaaagctgatcctgctggcccagctgaagcccgagaaggatagcgacgaagccgtgacatatagcctgggaaagtttgggcagagggccctggatttctacagcattcatgtgaccaaggagtccacccaccccgtgaagcccctggcccagatcgccggaaacagatacgcctccggacctgtgggaaaggccctgagcgacgcatgtatgggcacaatcgcctccttcctgtctaagtaccaggacatcatcatcgaacaccagaaggtggtgaagggcaaccagaagagactggagagcctgcgggagctggccggcaaggaaaacctggaataccctagcgtgaccctgccacctcagcctcacaccaaggagggcgttgatgcctacaacgaagtgatcgcccgggtgcgaatgtgggtgaacctgaacctgtggcagaagctgaagctaagcagagatgatgccaagcctctgctgagactgaagggattcccttcctttcctctggtcgagagacaggccaacgaagtggactggtgggacatggtgtgtaacgtgaagaagctgatcaacgagaaaaaggaggatggcaaggtgttttggcagaatctggctggctacaagagacaggaagccctgagaccatacctgagcagcgaggaagatcggaagaagggaaagaaattcgctcggtaccagctgggcgacctgctgctgcacctggaaaagaagcacggcgaggactggggaaaggtgtacgacgaggcctgggagcggattgacaagaaagtggaaggcctgagcaagcacatcaagctggaagaggaacggagaagcgaggacgcccagagcaaggccgccctgaccgactggctgcgggctaaggccagcttcgtgatcgagggcctgaaggaggccgacaaggacgagttctgcagatgcgagctgaagctgcagaagtggtacggggacctgcggggaaagcccttcgccatcgaagccgagaacagcatcctggacatcagcggcttcagcaagcagtacaactgtgccttcatctggcagaaggacggcgtgaagaagctgaacctgtacctgatcatcaactacttcaagggcggcaagctgcggttcaagaagatcaaacctgaagccttcgaagccaacagattctacaccgtgatcaacaaaaagagcggcgagatcgtgcccatggaggtgaacttcaacttcgacgaccccaacctgatcatcctgcctctggcctttggcaagagacagggcagagaattcatctggaacgacctgctgtccctggaaaccggcagcctgaagctggccaacggaagagtgatcgagaagacactgtacaacagaagaacccggcaggatgagcctgccctgttcgtggccctgaccttcgagcggcgggaggtcctggactcctccaatatcaaaccaatgaacctgatcggcgtggcaagaggcgaaaacatccccgccgtgatcgccctgaccgaccccgagggctgcccactgagccggtttaaggatagcctgggaaacccaacccacatcctgagaatcggcgagagctataaggagaagcagcggaccatccaggccaagaaggaggtggagcagcggagagccggcggctacagccggaagtacgccagcaaagccaagaatctggcagacgatatggtgagaaacaccgctagagatctgctgtactacgccgtgacccaggatgccatgctgatcttcgccaacctgagccggggcttcggccggcagggcaagcggaccttcatggccgagagacagtacacacggatggaggactggctgaccgccaagctggcctacgagggcctgagcaagacctacctgtccaagacactggcccagtacacctccaagacatgcagcaactgtgggtttaccatcaccagcgccgactacgacagggtgctggagaagctgaagaagacagcaacaggctggatgaccacaattaacggcaaggagctgaaggtggagggccagattacctactacaacagatacaagagacagaacgtagtcaaggacctgtccgtcgagctggatagactgagcgaagaatctgtgaacaacgacatctcctcctggacaaagggcagaagcggagaagctctgagcctcctgaagaaaagattctcccatagacccgtgcaggagaagttcgtgtgcctgaactgcggcttcgagacacacgcagccgagcaagccgccctgaacatcgccagatcctggctgttcctgcggagccaggagtacaagaaataccagacaaacaagacaaccggcaacaccgataagagagccttcgtcgagacctggcagtccttttaccggaagaagcttaaggaggtgtggaaacctgccgtgcggtctggcggatctggcggaggctccgccagcggcaccctgaccttcgacgacgtggccctgtacttcagcgagcaggagtgggagatcctggagaagtggcagaagcagatgtacaagcaggagatgaagaccaactacgagaccctggacagcctgggctacgccttcagcaagcccgacctgatcacctggatggagaagggcaggatgctgctgatcagcgaccagggcaggctgcacaagaccaagaggaccgccggcccccccggcggcccaagcagcggcgcccctcctcccagcggcggcagcccagccggctccccaacctctaccgaggagggcacctctgagtccgccacccccgagagcggccctggcacctccaccgagcccagcgagggcagcgcacccggcagccctgccggcagccccacctccacagaggagggaaccagcaccgagcccagcgaaggcagcgccccaggcaccagcaccgagcctagtgagcaggagattaaacggatcaacaagatcagaagaagacttgtgaaagacagcaacaccaagaaggccggcaagacaggccccatgaaaaccctgctggttagagtgatgacacccgatctgagagagcggctggaaaacctgagaaagaagcctgaaaatatcccccagcccatcagcaatacatctagagccaacctgaataagctgctgaccgattacaccgaaatgaagaaggcgatcctgcatgtgtactgggaagagttccagaaggaccctgtgggcctgatgagccgggtggcccagcctgccagcaagaagatcgatcagaacaagctgaaacctgagatggacgagaagggcaacctgaccaccgccggctttgcctgctctcagtgtggccagcccctgttcgtgtacaagctggagcaggtgtctgagaagggcaaggcttacaccaactacttcggacggtgcaatgtggccgagcacgaaaagctgatcctgctggcccagctgaagcccgagaaggatagcgacgaagccgtgacatatagcctgggaaagtttgggcagagggccctggatttctacagcattcatgtgaccaaggagtccacccaccccgtgaagcccctggcccagatcgccggaaacagatacgcctccggacctgtgggaaaggccctgagcgacgcatgtatgggcacaatcgcctccttcctgtctaagtaccaggacatcatcatcgaacaccagaaggtggtgaagggcaaccagaagagactggagagcctgcgggagctggccggcaaggaaaacctggaataccctagcgtgaccctgccacctcagcctcacaccaaggagggcgttgatgcctacaacgaagtgatcgcccgggtgcgaatgtgggtgaacctgaacctgtggcagaagctgaagctaagcagagatgatgccaagcctctgctgagactgaagggattcccttcctttcctctggtcgagagacaggccaacgaagtggactggtgggacatggtgtgtaacgtgaagaagctgatcaacgagaaaaaggaggatggcaaggtgttttggcagaatctggctggctacaagagacaggaagccctgagaccatacctgagcagcgaggaagatcggaagaagggaaagaaattcgctcggtaccagctgggcgacctgctgctgcacctggaaaagaagcacggcgaggactggggaaaggtgtacgacgaggcctgggagcggattgacaagaaagtggaaggcctgagcaagcacatcaagctggaagaggaacggagaagcgaggacgcccagagcaaggccgccctgaccgactggctgcgggctaaggccagcttcgtgatcgagggcctgaaggaggccgacaaggacgagttctgcagatgcgagctgaagctgcagaagtggtacggggacctgcggggaaagcccttcgccatcgaagccgagaacagcatcctggacatcagcggcttcagcaagcagtacaactgtgccttcatctggcagaaggacggcgtgaagaagctgaacctgtacctgatcatcaactacttcaagggcggcaagctgcggttcaagaagatcaaacctgaagccttcgaagccaacagattctacaccgtgatcaacaaaaagagcggcgagatcgtgcccatggaggtgaacttcaacttcgacgaccccaacctgatcatcctgcctctggcctttggcaagagacagggcagagaattcatctggaacgacctgctgtccctggaaaccggcagcctgaagctggccaacggaagagtgatcgagaagacactgtacaacagaagaacccggcaggatgagcctgccctgttcgtggccctgaccttcgagcggcgggaggtcctggactcctccaatatcaaaccaatgaacctgatcggcgtggcaagaggcgaaaacatccccgccgtgatcgccctgaccgaccccgagggctgcccactgagccggtttaaggatagcctgggaaacccaacccacatcctgagaatcggcgagagctataaggagaagcagcggaccatccaggccaagaaggaggtggagcagcggagagccggcggctacagccggaagtacgccagcaaagccaagaatctggcagacgatatggtgagaaacaccgctagagatctgctgtactacgccgtgacccaggatgccatgctgatcttcgccaacctgagccggggcttcggccggcagggcaagcggaccttcatggccgagagacagtacacacggatggaggactggctgaccgccaagctggcctacgagggcctgagcaagacctacctgtccaagacactggcccagtacacctccaagacatgcagcaactgtgggtttaccatcaccagcgccgactacgacagggtgctggagaagctgaagaagacagcaacaggctggatgaccacaattaacggcaaggagctgaaggtggagggccagattacctactacaacagatacaagagacagaacgtagtcaaggacctgtccgtcgagctggatagactgagcgaagaatctgtgaacaacgacatctcctcctggacaaagggcagaagcggagaagctctgagcctcctgaagaaaagattctcccatagacccgtgcaggagaagttcgtgtgcctgaactgcggcttcgagacacacgcagccgagcaagccgccctgaacatcgccagatcctggctgttcctgcggagccaggagtacaagaaataccagacaaacaagacaaccggcaacaccgataagagagccttcgtcgagacctggcagtccttttaccggaagaagcttaaggaggtgtggaaacctgccgtgcggtctggcggatctggcggaggctcctgccagcggcaccctgaccttcgacgacgtggccctgtacttcagcgagcaggagtgggagatcctggagaagtggcagaagcagatgtacaagcaggagatgaagaccaactacgagaccctggacagcctgggctacgccttcagcaagcccgacctgatcacctggatggagaagggcaggatgctgctgatcagcgaccagggcaggctgcacaagaccaagaggaccgccggcccccccggatctggctccggcagcggccccaagaaaaagagaaaagtctaagctgccttctgcggggcttgccttctggccatgcccttcttctctcccttgcacctgtacctcttggtctttgaataaagcctgagtaggaaggctagcaaaaaaaaaaaaaaaaaaaaaaaaaaaaaaaaaaaaaaaaaaaaaaaaaaaaaaaaaaaaaaaaaaaaaaaaaaaaaaaa

SEQ ID NO: 16634 - RNA, 9485 nt, synthetic construct
  source 1..9485: mol_type = other RNA
aggaaataagagagaaaagaagagtaagaagaaatataagagccaccatggcccctaagaagaagcgtaaagtgagccggatggaacgcctcgtctacgaggtgcggcagaagtgcagaaacatcgaggacatctgcatctcctgcggatctctgaacgtgaccctggagcacccactgttcatcggcggcatgtgccagaactgtaaaaactgttttctggagtgtgcctatcaatacgacgatgacggctaccagagctactgcaccatctgttgcggcggaagagaggtgctgatgtgtggaaataacaactgctgccggtgcttctgcgtggaatgcgtggacctgctggtgggccccggcgccgcccaggccgctattaaggaagatccttggaactgctacatgtgcggccacaagggcacatacggcctgctgagacggagagaggactggcctagcagactgcagatgttcttcgccaataaccacgaccaggagttcgacccccctaaggtgtaccctcccgtccccgccgagaagagaaagcccatccgggtcctgagcctgttcgatggcatcgccaccggtctgctggtgctgaaggacctgggcatccaggtggataggtacattgcctccgaggtgtgcgaggactccatcaccgtgggaatggtgcgtcatcagggcaagatcatgtacgtgggcgacgtgcggagcgtgacacagaagcatatccaggagtggggccctttcgacctggtgatcggcggcagcccttgcaatgacctgagcatcgtgaacccagcccggaagggcctgtacgagggaaccggcagactgttcttcgagttttacagactgctgcacgacgcccggcctaaggaaggcgacgaccggcccttcttttggctgttcgagaatgtggtggccatgggagtcagcgacaagcgggatattagccggttcctggagagcaaccccgtgatgatcgatgccaaggaagtgagcgccgcccaccgggccagatacttctggggcaatctgcctggcatgaacagacccctggccagcaccgtgaacgacaagctggagctgcaggagtgcctggagcacggccggatcgccaagttcagcaaggtgagaaccatcaccacccgaagcaacagcatcaaacaaggcaaggaccagcactttcctgtgttcatgaacgagaaggaggacatcctgtggtgtaccgagatggagagagtgttcgggttcccagtccactacacagatgtcagcaacatgtctagactggccagacagagactgctgggaagaagctggtccgtccctgtgatcagacacctgttcgcccctctgaaggagtacttcgcctgcgtgagcagcggcaacagcaacgccaacagccggggccccagcttctctagcggcctggtgccactgtccctgagagggagccacatgggccccatggagatctacaaaaccgtgagcgcctggaagcggcagcctgtgcgcgtgctgagcctgtttcggaatatcgataaagtcctgaaaagcctgggattcctggagagcggctctggctccggcggtggcaccctgaagtacgtggaggatgtgacaaacgtggtcagacgggatgtggagaagtggggccccttcgatctggtgtacggcagcacccaacccctgggcagctcttgtgaccggtgccctggctggtacatgtttcagttccaccggatcctgcagtacgccctgccgagacaggagtcccagcggccattcttttggattttcatggacaacttgctgctgaccgaggatgaccaggaaactaccactcggttcctgcagaccgaagccgtgaccctgcaggacgtgagaggccgggactaccagaacgccatgcgggtgtggtccaacatccctggactgaaaagcaagcacgcacctctgacccctaaagaagaggagtacctgcaggcccaggtgcggagcagaagcaagctggacgcccctaaggtggatctgctggtgaagaattgcctcctgcccctgagagagtacttcaagtatttcagccagaatagtctgcccctgggaggcagcggcggcggcgccctggtgacatttgaggacgtcgccgtgcggttcacccaggaggaatgggctctgctggatccttctcagaaaatcctgtaccgggacgtgatgagagagacataccggaatctgacctccgtgggcatcaactgggaatgttgggaccttgaagcctgcttcagaagcctgggaagaaacctgagagtgcaggtggtgaagagaaagtgcgagctgaccaacagcggcccctgcgccgagggcggcccaagcagcggcgcccctcctcccagcggcggcagcccagccggctccccaacctctaccgaggagggcacctctgagtccgccacccccgagagcggccctggcacctccaccgagcccagcgagggcagcgcacccggcagccctgccggcagccccacctccacagaggagggaaccagcaccgagcccagcgaaggcagcgccccaggcaccagcaccgagcctagtgagcaggagattaaacggatcaacaagatcagaagaagacttgtgaaagacagcaacaccaagaaggccggcaagacaggccccatgaaaaccctgctggttagagtgatgacacccgatctgagagagcggctggaaaacctgagaaagaagcctgaaaatatcccccagcccatcagcaatacatctagagccaacctgaataagctgctgaccgattacaccgaaatgaagaaggcgatcctgcatgtgtactgggaagagttccagaaggaccctgtgggcctgatgagccgggtggcccagcctgccagcaagaagatcgatcagaacaagctgaaacctgagatggacgagaagggcaacctgaccaccgccggctttgcctgctctcagtgtggccagcccctgttcgtgtacaagctggagcaggtgtctgagaagggcaaggcttacaccaactacttcggacggtgcaatgtggccgagcacgaaaagctgatcctgctggcccagctgaagcccgagaaggatagcgacgaagccgtgacatatagcctgggaaagtttgggcagagggccctggatttctacagcattcatgtgaccaaggagtccacccaccccgtgaagcccctggcccagatcgccggaaacagatacgcctccggacctgtgggaaaggccctgagcgacgcatgtatgggcacaatcgcctccttcctgtctaagtaccaggacatcatcatcgaacaccagaaggtggtgaagggcaaccagaagagactggagagcctgcgggagctggccggcaaggaaaacctggaataccctagcgtgaccctgccacctcagcctcacaccaaggagggcgttgatgcctacaacgaagtgatcgcccgggtgcgaatgtgggtgaacctgaacctgtggcagaagctgaagctaagcagagatgatgccaagcctctgctgagactgaagggattcccttcctttcctctggtcgagagacaggccaacgaagtggactggtgggacatggtgtgtaacgtgaagaagctgatcaacgagaaaaaggaggatggcaaggtgttttggcagaatctggctggctacaagagacaggaagccctgagaccatacctgagcagcgaggaagatcggaagaagggaaagaaattcgctcggtaccagctgggcgacctgctgctgcacctggaaaagaagcacggcgaggactggggaaaggtgtacgacgaggcctgggagcggattgacaagaaagtggaaggcctgagcaagcacatcaagctggaagaggaacggagaagcgaggacgcccagagcaaggccgccctgaccgactggctgcgggctaaggccagcttcgtgatcgagggcctgaaggaggccgacaaggacgagttctgcagatgcgagctgaagctgcagaagtggtacggggacctgcggggaaagcccttcgccatcgaagccgagaacagcatcctggacatcagcggcttcagcaagcagtacaactgtgccttcatctggcagaaggacggcgtgaagaagctgaacctgtacctgatcatcaactacttcaagggcggcaagctgcggttcaagaagatcaaacctgaagccttcgaagccaacagattctacaccgtgatcaacaaaaagagcggcgagatcgtgcccatggaggtgaacttcaacttcgacgaccccaacctgatcatcctgcctctggcctttggcaagagacagggcagagaattcatctggaacgacctgctgtccctggaaaccggcagcctgaagctggccaacggaagagtgatcgagaagacactgtacaacagaagaacccggcaggatgagcctgccctgttcgtggccctgaccttcgagcggcgggaggtcctggactcctccaatatcaaaccaatgaacctgatcggcgtggcaagaggcgaaaacatccccgccgtgatcgccctgaccgaccccgagggctgcccactgagccggtttaaggatagcctgggaaacccaacccacatcctgagaatcggcgagagctataaggagaagcagcggaccatccaggccaagaaggaggtggagcagcggagagccggcggctacagccggaagtacgccagcaaagccaagaatctggcagacgatatggtgagaaacaccgctagagatctgctgtactacgccgtgacccaggatgccatgctgatcttcgccaacctgagccggggcttcggccggcagggcaagcggaccttcatggccgagagacagtacacacggatggaggactggctgaccgccaagctggcctacgagggcctgagcaagacctacctgtccaagacactggcccagtacacctccaagacatgcagcaactgtgggtttaccatcaccagcgccgactacgacagggtgctggagaagctgaagaagacagcaacaggctggatgaccacaattaacggcaaggagctgaaggtggagggccagattacctactacaacagatacaagagacagaacgtagtcaaggacctgtccgtcgagctggatagactgagcgaagaatctgtgaacaacgacatctcctcctggacaaagggcagaagcggagaagctctgagcctcctgaagaaaagattctcccatagacccgtgcaggagaagttcgtgtgcctgaactgcggcttcgagacacacgcagccgagcaagccgccctgaacatcgccagatcctggctgttcctgcggagccaggagtacaagaaataccagacaaacaagacaaccggcaacaccgataagagagccttcgtcgagacctggcagtccttttaccggaagaagcttaaggaggtgtggaaacctgccgtgcggtctggcggatctggcggaggctccggccccctgaccttcagggacgtggccatcgagttcagccaggaggagtggaagagcctggaccccgtgcagaaggccctgtactgggacgtgatgctggagaactacaggaacctggtgttcctgggcatcctgcccaagtgcatgaccaaggagctgccccccatcggcaacagcaacaccggcgagaagttccagagggtgatgctggagaggcacgagtgctacgacatcgagaacttcggcggcccaagcagcggcgcccctcctcccagcggcggcagcccagccggctccccaacctctaccgaggagggcacctctgagtccgccacccccgagagcggccctggcacctccaccgagcccagcgagggcagcgcacccggcagccctgccggcagccccacctccacagaggagggaaccagcaccgagcccagcgaaggcagcgccccaggcaccagcaccgagcctagtgagcaggagattaaacggatcaacaagatcagaagaagacttgtgaaagacagcaacaccaagaaggccggcaagacaggccccatgaaaaccctgctggttagagtgatgacacccgatctgagagagcggctggaaaacctgagaaagaagcctgaaaatatcccccagcccatcagcaatacatctagagccaacctgaataagctgctgaccgattacaccgaaatgaagaaggcgatcctgcatgtgtactgggaagagttccagaaggaccctgtgggcctgatgagccgggtggcccagcctgccagcaagaagatcgatcagaacaagctgaaacctgagatggacgagaagggcaacctgaccaccgccggctttgcctgctctcagtgtggccagcccctgttcgtgtacaagctggagcaggtgtctgagaagggcaaggcttacaccaactacttcggacggtgcaatgtggccgagcacgaaaagctgatcctgctggcccagctgaagcccgagaaggatagcgacgaagccgtgacatatagcctgggaaagtttgggcagagggccctggatttctacagcattcatgtgaccaaggagtccacccaccccgtgaagcccctggcccagatcgccggaaacagatacgcctccggacctgtgggaaaggccctgagcgacgcatgtatgggcacaatcgcctccttcctgtctaagtaccaggacatcatcatcgaacaccagaaggtggtgaagggcaaccagaagagactggagagcctgcgggagctggccggcaaggaaaacctggaataccctagcgtgaccctgccacctcagcctcacaccaaggagggcgttgatgcctacaacgaagtgatcgcccgggtgcgaatgtgggtgaacctgaacctgtggcagaagctgaagctaagcagagatgatgccaagcctctgctgagactgaagggattcccttcctttcctctggtcgagagacaggccaacgaagtggactggtgggacatggtgtgtaacgtgaagaagctgatcaacgagaaaaaggaggatggcaaggtgttttggcagaatctggctggctacaagagacaggaagccctgagaccatacctgagcagcgaggaagatcggaagaagggaaagaaattcgctcggtaccagctgggcgacctgctgctgcacctggaaaagaagcacggcgaggactggggaaaggtgtacgacgaggcctgggagcggattgacaagaaagtggaaggcctgagcaagcacatcaagctggaagaggaacggagaagcgaggacgcccagagcaaggccgccctgaccgactggctgcgggctaaggccagcttcgtgatcgagggcctgaaggaggccgacaaggacgagttctgcagatgcgagctgaagctgcagaagtggtacggggacctgcggggaaagcccttcgccatcgaagccgagaacagcatcctggacatcagcggcttcagcaagcagtacaactgtgccttcatctggcagaaggacggcgtgaagaagctgaacctgtacctgatcatcaactacttcaagggcggcaagctgcggttcaagaagatcaaacctgaagccttcgaagccaacagattctacaccgtgatcaacaaaaagagcggcgagatcgtgcccatggaggtgaacttcaacttcgacgaccccaacctgatcatcctgcctctggcctttggcaagagacagggcagagaattcatctggaacgacctgctgtccctggaaaccggcagcctgaagctggccaacggaagagtgatcgagaagacactgtacaacagaagaacccggcaggatgagcctgccctgttcgtggccctgaccttcgagcggcgggaggtcctggactcctccaatatcaaaccaatgaacctgatcggcgtggcaagaggcgaaaacatccccgccgtgatcgccctgaccgaccccgagggctgcccactgagccggtttaaggatagcctgggaaacccaacccacatcctgagaatcggcgagagctataaggagaagcagcggaccatccaggccaagaaggaggtggagcagcggagagccggcggctacagccggaagtacgccagcaaagccaagaatctggcagacgatatggtgagaaacaccgctagagatctgctgtactacgccgtgacccaggatgccatgctgatcttcgccaacctgagccggggcttcggccggcagggcaagcggaccttcatggccgagagacagtacacacggatggaggactggctgaccgccaagctggcctacgagggcctgagcaagacctacctgtccaagacactggcccagtacacctccaagacatgcagcaactgtgggtttaccatcaccagcgccgactacgacagggtgctggagaagctgaagaagacagcaacaggctggatgaccacaattaacggcaaggagctgaaggtggagggccagattacctactacaacagatacaagagacagaacgtagtcaaggacctgtccgtcgagctggatagactgagcgaagaatctgtgaacaacgacatctcctcctggacaaagggcagaagcggagaagctctgagcctcctgaagaaaagattctcccatagacccgtgcaggagaagttcgtgtgcctgaactgcggcttcgagacacacgcagccgagcaagccgccctgaacatcgccagatcctggctgttcctgcggagccaggagtacaagaaataccagacaaacaagacaaccggcaacaccgataagagagccttcgtcgagacctggcagtccttttaccggaagaagcttaaggaggtgtggaaacctgccgtgcggtctggcggatctggcggaggctcctggccccctgaccttcagggacgtggccatcgagttcagccaggaggagtggaagagcctggaccccgtgcagaaggccctgtactgggacgtgatgctggagaactacaggaacctggtgttcctgggcatcctgcccaagtgcatgaccaaggagctgccccccatcggcaacagcaacaccggcgagaagttccagagggtgatgctggagaggcacgagtgctacgacatcgagaacttcggatctggctccggcagcggccccaagaaaaagagaaaagtctaagctgccttctgcggggcttgccttctggccatgcccttcttctctcccttgcacctgtacctcttggtctttgaataaagcctgagtaggaaggctagcaaaaaaaaaaaaaaaaaaaaaaaaaaaaaaaaaaaaaaaaaaaaaaaaaaaaaaaaaaaaaaaaaaaaaaaaaaaaaaaa

SEQ ID NO: 16635 - RNA, 9485 nt, synthetic construct
  source 1..9485: mol_type = other RNA
aggaaataagagagaaaagaagagtaagaagaaatataagagccaccatggcccctaagaagaagcgtaaagtgagccggatggaacgcctcgtctacgaggtgcggcagaagtgcagaaacatcgaggacatctgcatctcctgcggatctctgaacgtgaccctggagcacccactgttcatcggcggcatgtgccagaactgtaaaaactgttttctggagtgtgcctatcaatacgacgatgacggctaccagagctactgcaccatctgttgcggcggaagagaggtgctgatgtgtggaaataacaactgctgccggtgcttctgcgtggaatgcgtggacctgctggtgggccccggcgccgcccaggccgctattaaggaagatccttggaactgctacatgtgcggccacaagggcacatacggcctgctgagacggagagaggactggcctagcagactgcagatgttcttcgccaataaccacgaccaggagttcgacccccctaaggtgtaccctcccgtccccgccgagaagagaaagcccatccgggtcctgagcctgttcgatggcatcgccaccggtctgctggtgctgaaggacctgggcatccaggtggataggtacattgcctccgaggtgtgcgaggactccatcaccgtgggaatggtgcgtcatcagggcaagatcatgtacgtgggcgacgtgcggagcgtgacacagaagcatatccaggagtggggccctttcgacctggtgatcggcggcagcccttgcaatgacctgagcatcgtgaacccagcccggaagggcctgtacgagggaaccggcagactgttcttcgagttttacagactgctgcacgacgcccggcctaaggaaggcgacgaccggcccttcttttggctgttcgagaatgtggtggccatgggagtcagcgacaagcgggatattagccggttcctggagagcaaccccgtgatgatcgatgccaaggaagtgagcgccgcccaccgggccagatacttctggggcaatctgcctggcatgaacagacccctggccagcaccgtgaacgacaagctggagctgcaggagtgcctggagcacggccggatcgccaagttcagcaaggtgagaaccatcaccacccgaagcaacagcatcaaacaaggcaaggaccagcactttcctgtgttcatgaacgagaaggaggacatcctgtggtgtaccgagatggagagagtgttcgggttcccagtccactacacagatgtcagcaacatgtctagactggccagacagagactgctgggaagaagctggtccgtccctgtgatcagacacctgttcgcccctctgaaggagtacttcgcctgcgtgagcagcggcaacagcaacgccaacagccggggccccagcttctctagcggcctggtgccactgtccctgagagggagccacatgggccccatggagatctacaaaaccgtgagcgcctggaagcggcagcctgtgcgcgtgctgagcctgtttcggaatatcgataaagtcctgaaaagcctgggattcctggagagcggctctggctccggcggtggcaccctgaagtacgtggaggatgtgacaaacgtggtcagacgggatgtggagaagtggggccccttcgatctggtgtacggcagcacccaacccctgggcagctcttgtgaccggtgccctggctggtacatgtttcagttccaccggatcctgcagtacgccctgccgagacaggagtcccagcggccattcttttggattttcatggacaacttgctgctgaccgaggatgaccaggaaactaccactcggttcctgcagaccgaagccgtgaccctgcaggacgtgagaggccgggactaccagaacgccatgcgggtgtggtccaacatccctggactgaaaagcaagcacgcacctctgacccctaaagaagaggagtacctgcaggcccaggtgcggagcagaagcaagctggacgcccctaaggtggatctgctggtgaagaattgcctcctgcccctgagagagtacttcaagtatttcagccagaatagtctgcccctgggaggcagcggcggcggcgccctggtgacatttgaggacgtcgccgtgcggttcacccaggaggaatgggctctgctggatccttctcagaaaatcctgtaccgggacgtgatgagagagacataccggaatctgacctccgtgggcatcaactgggaatgttgggaccttgaagcctgcttcagaagcctgggaagaaacctgagagtgcaggtggtgaagagaaagtgcgagctgaccaacagcggcccctgcgccgagggcggcccaagcagcggcgcccctcctcccagcggcggcagcccagccggctccccaacctctaccgaggagggcacctctgagtccgccacccccgagagcggccctggcacctccaccgagcccagcgagggcagcgcacccggcagccctgccggcagccccacctccacagaggagggaaccagcaccgagcccagcgaaggcagcgccccaggcaccagcaccgagcctagtgagcaggagattaaacggatcaacaagatcagaagaagacttgtgaaagacagcaacaccaagaaggccggcaagacaggccccatgaaaaccctgctggttagagtgatgacacccgatctgagagagcggctggaaaacctgagaaagaagcctgaaaatatcccccagcccatcagcaatacatctagagccaacctgaataagctgctgaccgattacaccgaaatgaagaaggcgatcctgcatgtgtactgggaagagttccagaaggaccctgtgggcctgatgagccgggtggcccagcctgccagcaagaagatcgatcagaacaagctgaaacctgagatggacgagaagggcaacctgaccaccgccggctttgcctgctctcagtgtggccagcccctgttcgtgtacaagctggagcaggtgtctgagaagggcaaggcttacaccaactacttcggacggtgcaatgtggccgagcacgaaaagctgatcctgctggcccagctgaagcccgagaaggatagcgacgaagccgtgacatatagcctgggaaagtttgggcagagggccctggatttctacagcattcatgtgaccaaggagtccacccaccccgtgaagcccctggcccagatcgccggaaacagatacgcctccggacctgtgggaaaggccctgagcgacgcatgtatgggcacaatcgcctccttcctgtctaagtaccaggacatcatcatcgaacaccagaaggtggtgaagggcaaccagaagagactggagagcctgcgggagctggccggcaaggaaaacctggaataccctagcgtgaccctgccacctcagcctcacaccaaggagggcgttgatgcctacaacgaagtgatcgcccgggtgcgaatgtgggtgaacctgaacctgtggcagaagctgaagctaagcagagatgatgccaagcctctgctgagactgaagggattcccttcctttcctctggtcgagagacaggccaacgaagtggactggtgggacatggtgtgtaacgtgaagaagctgatcaacgagaaaaaggaggatggcaaggtgttttggcagaatctggctggctacaagagacaggaagccctgagaccatacctgagcagcgaggaagatcggaagaagggaaagaaattcgctcggtaccagctgggcgacctgctgctgcacctggaaaagaagcacggcgaggactggggaaaggtgtacgacgaggcctgggagcggattgacaagaaagtggaaggcctgagcaagcacatcaagctggaagaggaacggagaagcgaggacgcccagagcaaggccgccctgaccgactggctgcgggctaaggccagcttcgtgatcgagggcctgaaggaggccgacaaggacgagttctgcagatgcgagctgaagctgcagaagtggtacggggacctgcggggaaagcccttcgccatcgaagccgagaacagcatcctggacatcagcggcttcagcaagcagtacaactgtgccttcatctggcagaaggacggcgtgaagaagctgaacctgtacctgatcatcaactacttcaagggcggcaagctgcggttcaagaagatcaaacctgaagccttcgaagccaacagattctacaccgtgatcaacaaaaagagcggcgagatcgtgcccatggaggtgaacttcaacttcgacgaccccaacctgatcatcctgcctctggcctttggcaagagacagggcagagaattcatctggaacgacctgctgtccctggaaaccggcagcctgaagctggccaacggaagagtgatcgagaagacactgtacaacagaagaacccggcaggatgagcctgccctgttcgtggccctgaccttcgagcggcgggaggtcctggactcctccaatatcaaaccaatgaacctgatcggcgtggcaagaggcgaaaacatccccgccgtgatcgccctgaccgaccccgagggctgcccactgagccggtttaaggatagcctgggaaacccaacccacatcctgagaatcggcgagagctataaggagaagcagcggaccatccaggccaagaaggaggtggagcagcggagagccggcggctacagccggaagtacgccagcaaagccaagaatctggcagacgatatggtgagaaacaccgctagagatctgctgtactacgccgtgacccaggatgccatgctgatcttcgccaacctgagccggggcttcggccggcagggcaagcggaccttcatggccgagagacagtacacacggatggaggactggctgaccgccaagctggcctacgagggcctgagcaagacctacctgtccaagacactggcccagtacacctccaagacatgcagcaactgtgggtttaccatcaccagcgccgactacgacagggtgctggagaagctgaagaagacagcaacaggctggatgaccacaattaacggcaaggagctgaaggtggagggccagattacctactacaacagatacaagagacagaacgtagtcaaggacctgtccgtcgagctggatagactgagcgaagaatctgtgaacaacgacatctcctcctggacaaagggcagaagcggagaagctctgagcctcctgaagaaaagattctcccatagacccgtgcaggagaagttcgtgtgcctgaactgcggcttcgagacacacgcagccgagcaagccgccctgaacatcgccagatcctggctgttcctgcggagccaggagtacaagaaataccagacaaacaagacaaccggcaacaccgataagagagccttcgtcgagacctggcagtccttttaccggaagaagcttaaggaggtgtggaaacctgccgtgcggtctggcggatctggcggaggctccttccagggcagcgtgaccttcagggacgtgagcatcgacttcagccaggaggagtgggagtggctgcagcccgcccagagggacctgtacaggcacgtgatgctggagaactacggccacctggtgagcctgggcctgaacatgagcaagcccgacgtggtgagcctgctggagcagggcaaggagccctggctgggcaacggcgacgtgagcagggagctgttccccgccagcaagagcaacggcggcccaagcagcggcgcccctcctcccagcggcggcagcccagccggctccccaacctctaccgaggagggcacctctgagtccgccacccccgagagcggccctggcacctccaccgagcccagcgagggcagcgcacccggcagccctgccggcagccccacctccacagaggagggaaccagcaccgagcccagcgaaggcagcgccccaggcaccagcaccgagcctagtgagcaggagattaaacggatcaacaagatcagaagaagacttgtgaaagacagcaacaccaagaaggccggcaagacaggccccatgaaaaccctgctggttagagtgatgacacccgatctgagagagcggctggaaaacctgagaaagaagcctgaaaatatcccccagcccatcagcaatacatctagagccaacctgaataagctgctgaccgattacaccgaaatgaagaaggcgatcctgcatgtgtactgggaagagttccagaaggaccctgtgggcctgatgagccgggtggcccagcctgccagcaagaagatcgatcagaacaagctgaaacctgagatggacgagaagggcaacctgaccaccgccggctttgcctgctctcagtgtggccagcccctgttcgtgtacaagctggagcaggtgtctgagaagggcaaggcttacaccaactacttcggacggtgcaatgtggccgagcacgaaaagctgatcctgctggcccagctgaagcccgagaaggatagcgacgaagccgtgacatatagcctgggaaagtttgggcagagggccctggatttctacagcattcatgtgaccaaggagtccacccaccccgtgaagcccctggcccagatcgccggaaacagatacgcctccggacctgtgggaaaggccctgagcgacgcatgtatgggcacaatcgcctccttcctgtctaagtaccaggacatcatcatcgaacaccagaaggtggtgaagggcaaccagaagagactggagagcctgcgggagctggccggcaaggaaaacctggaataccctagcgtgaccctgccacctcagcctcacaccaaggagggcgttgatgcctacaacgaagtgatcgcccgggtgcgaatgtgggtgaacctgaacctgtggcagaagctgaagctaagcagagatgatgccaagcctctgctgagactgaagggattcccttcctttcctctggtcgagagacaggccaacgaagtggactggtgggacatggtgtgtaacgtgaagaagctgatcaacgagaaaaaggaggatggcaaggtgttttggcagaatctggctggctacaagagacaggaagccctgagaccatacctgagcagcgaggaagatcggaagaagggaaagaaattcgctcggtaccagctgggcgacctgctgctgcacctggaaaagaagcacggcgaggactggggaaaggtgtacgacgaggcctgggagcggattgacaagaaagtggaaggcctgagcaagcacatcaagctggaagaggaacggagaagcgaggacgcccagagcaaggccgccctgaccgactggctgcgggctaaggccagcttcgtgatcgagggcctgaaggaggccgacaaggacgagttctgcagatgcgagctgaagctgcagaagtggtacggggacctgcggggaaagcccttcgccatcgaagccgagaacagcatcctggacatcagcggcttcagcaagcagtacaactgtgccttcatctggcagaaggacggcgtgaagaagctgaacctgtacctgatcatcaactacttcaagggcggcaagctgcggttcaagaagatcaaacctgaagccttcgaagccaacagattctacaccgtgatcaacaaaaagagcggcgagatcgtgcccatggaggtgaacttcaacttcgacgaccccaacctgatcatcctgcctctggcctttggcaagagacagggcagagaattcatctggaacgacctgctgtccctggaaaccggcagcctgaagctggccaacggaagagtgatcgagaagacactgtacaacagaagaacccggcaggatgagcctgccctgttcgtggccctgaccttcgagcggcgggaggtcctggactcctccaatatcaaaccaatgaacctgatcggcgtggcaagaggcgaaaacatccccgccgtgatcgccctgaccgaccccgagggctgcccactgagccggtttaaggatagcctgggaaacccaacccacatcctgagaatcggcgagagctataaggagaagcagcggaccatccaggccaagaaggaggtggagcagcggagagccggcggctacagccggaagtacgccagcaaagccaagaatctggcagacgatatggtgagaaacaccgctagagatctgctgtactacgccgtgacccaggatgccatgctgatcttcgccaacctgagccggggcttcggccggcagggcaagcggaccttcatggccgagagacagtacacacggatggaggactggctgaccgccaagctggcctacgagggcctgagcaagacctacctgtccaagacactggcccagtacacctccaagacatgcagcaactgtgggtttaccatcaccagcgccgactacgacagggtgctggagaagctgaagaagacagcaacaggctggatgaccacaattaacggcaaggagctgaaggtggagggccagattacctactacaacagatacaagagacagaacgtagtcaaggacctgtccgtcgagctggatagactgagcgaagaatctgtgaacaacgacatctcctcctggacaaagggcagaagcggagaagctctgagcctcctgaagaaaagattctcccatagacccgtgcaggagaagttcgtgtgcctgaactgcggcttcgagacacacgcagccgagcaagccgccctgaacatcgccagatcctggctgttcctgcggagccaggagtacaagaaataccagacaaacaagacaaccggcaacaccgataagagagccttcgtcgagacctggcagtccttttaccggaagaagcttaaggaggtgtggaaacctgccgtgcggtctggcggatctggcggaggctcctttccagggcagcgtgaccttcagggacgtgagcatcgacttcagccaggaggagtgggagtggctgcagcccgcccagagggacctgtacaggcacgtgatgctggagaactacggccacctggtgagcctgggcctgaacatgagcaagcccgacgtggtgagcctgctggagcagggcaaggagccctggctgggcaacggcgacgtgagcagggagctgttccccgccagcaagagcaacggatctggctccggcagcggccccaagaaaaagagaaaagtctaagctgccttctgcggggcttgccttctggccatgcccttcttctctcccttgcacctgtacctcttggtctttgaataaagcctgagtaggaaggctagcaaaaaaaaaaaaaaaaaaaaaaaaaaaaaaaaaaaaaaaaaaaaaaaaaaaaaaaaaaaaaaaaaaaaaaaaaaaaaaaa

SEQ ID NO: 16636 - RNA, 9485 nt, synthetic construct
  source 1..9485: mol_type = other RNA
aggaaataagagagaaaagaagagtaagaagaaatataagagccaccatggcccctaagaagaagcgtaaagtgagccggatggaacgcctcgtctacgaggtgcggcagaagtgcagaaacatcgaggacatctgcatctcctgcggatctctgaacgtgaccctggagcacccactgttcatcggcggcatgtgccagaactgtaaaaactgttttctggagtgtgcctatcaatacgacgatgacggctaccagagctactgcaccatctgttgcggcggaagagaggtgctgatgtgtggaaataacaactgctgccggtgcttctgcgtggaatgcgtggacctgctggtgggccccggcgccgcccaggccgctattaaggaagatccttggaactgctacatgtgcggccacaagggcacatacggcctgctgagacggagagaggactggcctagcagactgcagatgttcttcgccaataaccacgaccaggagttcgacccccctaaggtgtaccctcccgtccccgccgagaagagaaagcccatccgggtcctgagcctgttcgatggcatcgccaccggtctgctggtgctgaaggacctgggcatccaggtggataggtacattgcctccgaggtgtgcgaggactccatcaccgtgggaatggtgcgtcatcagggcaagatcatgtacgtgggcgacgtgcggagcgtgacacagaagcatatccaggagtggggccctttcgacctggtgatcggcggcagcccttgcaatgacctgagcatcgtgaacccagcccggaagggcctgtacgagggaaccggcagactgttcttcgagttttacagactgctgcacgacgcccggcctaaggaaggcgacgaccggcccttcttttggctgttcgagaatgtggtggccatgggagtcagcgacaagcgggatattagccggttcctggagagcaaccccgtgatgatcgatgccaaggaagtgagcgccgcccaccgggccagatacttctggggcaatctgcctggcatgaacagacccctggccagcaccgtgaacgacaagctggagctgcaggagtgcctggagcacggccggatcgccaagttcagcaaggtgagaaccatcaccacccgaagcaacagcatcaaacaaggcaaggaccagcactttcctgtgttcatgaacgagaaggaggacatcctgtggtgtaccgagatggagagagtgttcgggttcccagtccactacacagatgtcagcaacatgtctagactggccagacagagactgctgggaagaagctggtccgtccctgtgatcagacacctgttcgcccctctgaaggagtacttcgcctgcgtgagcagcggcaacagcaacgccaacagccggggccccagcttctctagcggcctggtgccactgtccctgagagggagccacatgggccccatggagatctacaaaaccgtgagcgcctggaagcggcagcctgtgcgcgtgctgagcctgtttcggaatatcgataaagtcctgaaaagcctgggattcctggagagcggctctggctccggcggtggcaccctgaagtacgtggaggatgtgacaaacgtggtcagacgggatgtggagaagtggggccccttcgatctggtgtacggcagcacccaacccctgggcagctcttgtgaccggtgccctggctggtacatgtttcagttccaccggatcctgcagtacgccctgccgagacaggagtcccagcggccattcttttggattttcatggacaacttgctgctgaccgaggatgaccaggaaactaccactcggttcctgcagaccgaagccgtgaccctgcaggacgtgagaggccgggactaccagaacgccatgcgggtgtggtccaacatccctggactgaaaagcaagcacgcacctctgacccctaaagaagaggagtacctgcaggcccaggtgcggagcagaagcaagctggacgcccctaaggtggatctgctggtgaagaattgcctcctgcccctgagagagtacttcaagtatttcagccagaatagtctgcccctgggaggcagcggcggcggcgccctggtgacatttgaggacgtcgccgtgcggttcacccaggaggaatgggctctgctggatccttctcagaaaatcctgtaccgggacgtgatgagagagacataccggaatctgacctccgtgggcatcaactgggaatgttgggaccttgaagcctgcttcagaagcctgggaagaaacctgagagtgcaggtggtgaagagaaagtgcgagctgaccaacagcggcccctgcgccgagggcggcccaagcagcggcgcccctcctcccagcggcggcagcccagccggctccccaacctctaccgaggagggcacctctgagtccgccacccccgagagcggccctggcacctccaccgagcccagcgagggcagcgcacccggcagccctgccggcagccccacctccacagaggagggaaccagcaccgagcccagcgaaggcagcgccccaggcaccagcaccgagcctagtgagcaggagattaaacggatcaacaagatcagaagaagacttgtgaaagacagcaacaccaagaaggccggcaagacaggccccatgaaaaccctgctggttagagtgatgacacccgatctgagagagcggctggaaaacctgagaaagaagcctgaaaatatcccccagcccatcagcaatacatctagagccaacctgaataagctgctgaccgattacaccgaaatgaagaaggcgatcctgcatgtgtactgggaagagttccagaaggaccctgtgggcctgatgagccgggtggcccagcctgccagcaagaagatcgatcagaacaagctgaaacctgagatggacgagaagggcaacctgaccaccgccggctttgcctgctctcagtgtggccagcccctgttcgtgtacaagctggagcaggtgtctgagaagggcaaggcttacaccaactacttcggacggtgcaatgtggccgagcacgaaaagctgatcctgctggcccagctgaagcccgagaaggatagcgacgaagccgtgacatatagcctgggaaagtttgggcagagggccctggatttctacagcattcatgtgaccaaggagtccacccaccccgtgaagcccctggcccagatcgccggaaacagatacgcctccggacctgtgggaaaggccctgagcgacgcatgtatgggcacaatcgcctccttcctgtctaagtaccaggacatcatcatcgaacaccagaaggtggtgaagggcaaccagaagagactggagagcctgcgggagctggccggcaaggaaaacctggaataccctagcgtgaccctgccacctcagcctcacaccaaggagggcgttgatgcctacaacgaagtgatcgcccgggtgcgaatgtgggtgaacctgaacctgtggcagaagctgaagctaagcagagatgatgccaagcctctgctgagactgaagggattcccttcctttcctctggtcgagagacaggccaacgaagtggactggtgggacatggtgtgtaacgtgaagaagctgatcaacgagaaaaaggaggatggcaaggtgttttggcagaatctggctggctacaagagacaggaagccctgagaccatacctgagcagcgaggaagatcggaagaagggaaagaaattcgctcggtaccagctgggcgacctgctgctgcacctggaaaagaagcacggcgaggactggggaaaggtgtacgacgaggcctgggagcggattgacaagaaagtggaaggcctgagcaagcacatcaagctggaagaggaacggagaagcgaggacgcccagagcaaggccgccctgaccgactggctgcgggctaaggccagcttcgtgatcgagggcctgaaggaggccgacaaggacgagttctgcagatgcgagctgaagctgcagaagtggtacggggacctgcggggaaagcccttcgccatcgaagccgagaacagcatcctggacatcagcggcttcagcaagcagtacaactgtgccttcatctggcagaaggacggcgtgaagaagctgaacctgtacctgatcatcaactacttcaagggcggcaagctgcggttcaagaagatcaaacctgaagccttcgaagccaacagattctacaccgtgatcaacaaaaagagcggcgagatcgtgcccatggaggtgaacttcaacttcgacgaccccaacctgatcatcctgcctctggcctttggcaagagacagggcagagaattcatctggaacgacctgctgtccctggaaaccggcagcctgaagctggccaacggaagagtgatcgagaagacactgtacaacagaagaacccggcaggatgagcctgccctgttcgtggccctgaccttcgagcggcgggaggtcctggactcctccaatatcaaaccaatgaacctgatcggcgtggcaagaggcgaaaacatccccgccgtgatcgccctgaccgaccccgagggctgcccactgagccggtttaaggatagcctgggaaacccaacccacatcctgagaatcggcgagagctataaggagaagcagcggaccatccaggccaagaaggaggtggagcagcggagagccggcggctacagccggaagtacgccagcaaagccaagaatctggcagacgatatggtgagaaacaccgctagagatctgctgtactacgccgtgacccaggatgccatgctgatcttcgccaacctgagccggggcttcggccggcagggcaagcggaccttcatggccgagagacagtacacacggatggaggactggctgaccgccaagctggcctacgagggcctgagcaagacctacctgtccaagacactggcccagtacacctccaagacatgcagcaactgtgggtttaccatcaccagcgccgactacgacagggtgctggagaagctgaagaagacagcaacaggctggatgaccacaattaacggcaaggagctgaaggtggagggccagattacctactacaacagatacaagagacagaacgtagtcaaggacctgtccgtcgagctggatagactgagcgaagaatctgtgaacaacgacatctcctcctggacaaagggcagaagcggagaagctctgagcctcctgaagaaaagattctcccatagacccgtgcaggagaagttcgtgtgcctgaactgcggcttcgagacacacgcagccgagcaagccgccctgaacatcgccagatcctggctgttcctgcggagccaggagtacaagaaataccagacaaacaagacaaccggcaacaccgataagagagccttcgtcgagacctggcagtccttttaccggaagaagcttaaggaggtgtggaaacctgccgtgcggtctggcggatctggcggaggctcccagggcagcgtgaccttcgaggacgtggccgtgcacttcagctgggacgagtggcacctgctggacaaggcccagaggtgcctgtacagggacgtgatggccgagaacctggccctgatcaccagcctgggcctgtggcccggcgtgggcgacgccgaggccagcagcgagcagagcgccagcctgaagggcatgagccaggtgaggaccttcagggagggcctgagcccccagagggcccagggcggcccaagcagcggcgcccctcctcccagcggcggcagcccagccggctccccaacctctaccgaggagggcacctctgagtccgccacccccgagagcggccctggcacctccaccgagcccagcgagggcagcgcacccggcagccctgccggcagccccacctccacagaggagggaaccagcaccgagcccagcgaaggcagcgccccaggcaccagcaccgagcctagtgagcaggagattaaacggatcaacaagatcagaagaagacttgtgaaagacagcaacaccaagaaggccggcaagacaggccccatgaaaaccctgctggttagagtgatgacacccgatctgagagagcggctggaaaacctgagaaagaagcctgaaaatatcccccagcccatcagcaatacatctagagccaacctgaataagctgctgaccgattacaccgaaatgaagaaggcgatcctgcatgtgtactgggaagagttccagaaggaccctgtgggcctgatgagccgggtggcccagcctgccagcaagaagatcgatcagaacaagctgaaacctgagatggacgagaagggcaacctgaccaccgccggctttgcctgctctcagtgtggccagcccctgttcgtgtacaagctggagcaggtgtctgagaagggcaaggcttacaccaactacttcggacggtgcaatgtggccgagcacgaaaagctgatcctgctggcccagctgaagcccgagaaggatagcgacgaagccgtgacatatagcctgggaaagtttgggcagagggccctggatttctacagcattcatgtgaccaaggagtccacccaccccgtgaagcccctggcccagatcgccggaaacagatacgcctccggacctgtgggaaaggccctgagcgacgcatgtatgggcacaatcgcctccttcctgtctaagtaccaggacatcatcatcgaacaccagaaggtggtgaagggcaaccagaagagactggagagcctgcgggagctggccggcaaggaaaacctggaataccctagcgtgaccctgccacctcagcctcacaccaaggagggcgttgatgcctacaacgaagtgatcgcccgggtgcgaatgtgggtgaacctgaacctgtggcagaagctgaagctaagcagagatgatgccaagcctctgctgagactgaagggattcccttcctttcctctggtcgagagacaggccaacgaagtggactggtgggacatggtgtgtaacgtgaagaagctgatcaacgagaaaaaggaggatggcaaggtgttttggcagaatctggctggctacaagagacaggaagccctgagaccatacctgagcagcgaggaagatcggaagaagggaaagaaattcgctcggtaccagctgggcgacctgctgctgcacctggaaaagaagcacggcgaggactggggaaaggtgtacgacgaggcctgggagcggattgacaagaaagtggaaggcctgagcaagcacatcaagctggaagaggaacggagaagcgaggacgcccagagcaaggccgccctgaccgactggctgcgggctaaggccagcttcgtgatcgagggcctgaaggaggccgacaaggacgagttctgcagatgcgagctgaagctgcagaagtggtacggggacctgcggggaaagcccttcgccatcgaagccgagaacagcatcctggacatcagcggcttcagcaagcagtacaactgtgccttcatctggcagaaggacggcgtgaagaagctgaacctgtacctgatcatcaactacttcaagggcggcaagctgcggttcaagaagatcaaacctgaagccttcgaagccaacagattctacaccgtgatcaacaaaaagagcggcgagatcgtgcccatggaggtgaacttcaacttcgacgaccccaacctgatcatcctgcctctggcctttggcaagagacagggcagagaattcatctggaacgacctgctgtccctggaaaccggcagcctgaagctggccaacggaagagtgatcgagaagacactgtacaacagaagaacccggcaggatgagcctgccctgttcgtggccctgaccttcgagcggcgggaggtcctggactcctccaatatcaaaccaatgaacctgatcggcgtggcaagaggcgaaaacatccccgccgtgatcgccctgaccgaccccgagggctgcccactgagccggtttaaggatagcctgggaaacccaacccacatcctgagaatcggcgagagctataaggagaagcagcggaccatccaggccaagaaggaggtggagcagcggagagccggcggctacagccggaagtacgccagcaaagccaagaatctggcagacgatatggtgagaaacaccgctagagatctgctgtactacgccgtgacccaggatgccatgctgatcttcgccaacctgagccggggcttcggccggcagggcaagcggaccttcatggccgagagacagtacacacggatggaggactggctgaccgccaagctggcctacgagggcctgagcaagacctacctgtccaagacactggcccagtacacctccaagacatgcagcaactgtgggtttaccatcaccagcgccgactacgacagggtgctggagaagctgaagaagacagcaacaggctggatgaccacaattaacggcaaggagctgaaggtggagggccagattacctactacaacagatacaagagacagaacgtagtcaaggacctgtccgtcgagctggatagactgagcgaagaatctgtgaacaacgacatctcctcctggacaaagggcagaagcggagaagctctgagcctcctgaagaaaagattctcccatagacccgtgcaggagaagttcgtgtgcctgaactgcggcttcgagacacacgcagccgagcaagccgccctgaacatcgccagatcctggctgttcctgcggagccaggagtacaagaaataccagacaaacaagacaaccggcaacaccgataagagagccttcgtcgagacctggcagtccttttaccggaagaagcttaaggaggtgtggaaacctgccgtgcggtctggcggatctggcggaggctcctcagggcagcgtgaccttcgaggacgtggccgtgcacttcagctgggacgagtggcacctgctggacaaggcccagaggtgcctgtacagggacgtgatggccgagaacctggccctgatcaccagcctgggcctgtggcccggcgtgggcgacgccgaggccagcagcgagcagagcgccagcctgaagggcatgagccaggtgaggaccttcagggagggcctgagcccccagagggcccagggatctggctccggcagcggccccaagaaaaagagaaaagtctaagctgccttctgcggggcttgccttctggccatgcccttcttctctcccttgcacctgtacctcttggtctttgaataaagcctgagtaggaaggctagcaaaaaaaaaaaaaaaaaaaaaaaaaaaaaaaaaaaaaaaaaaaaaaaaaaaaaaaaaaaaaaaaaaaaaaaaaaaaaaaa

SEQ ID NO: 16637 - RNA, 9485 nt, synthetic construct
  source 1..9485: mol_type = other RNA
aggaaataagagagaaaagaagagtaagaagaaatataagagccaccatggcccctaagaagaagcgtaaagtgagccggatggaacgcctcgtctacgaggtgcggcagaagtgcagaaacatcgaggacatctgcatctcctgcggatctctgaacgtgaccctggagcacccactgttcatcggcggcatgtgccagaactgtaaaaactgttttctggagtgtgcctatcaatacgacgatgacggctaccagagctactgcaccatctgttgcggcggaagagaggtgctgatgtgtggaaataacaactgctgccggtgcttctgcgtggaatgcgtggacctgctggtgggccccggcgccgcccaggccgctattaaggaagatccttggaactgctacatgtgcggccacaagggcacatacggcctgctgagacggagagaggactggcctagcagactgcagatgttcttcgccaataaccacgaccaggagttcgacccccctaaggtgtaccctcccgtccccgccgagaagagaaagcccatccgggtcctgagcctgttcgatggcatcgccaccggtctgctggtgctgaaggacctgggcatccaggtggataggtacattgcctccgaggtgtgcgaggactccatcaccgtgggaatggtgcgtcatcagggcaagatcatgtacgtgggcgacgtgcggagcgtgacacagaagcatatccaggagtggggccctttcgacctggtgatcggcggcagcccttgcaatgacctgagcatcgtgaacccagcccggaagggcctgtacgagggaaccggcagactgttcttcgagttttacagactgctgcacgacgcccggcctaaggaaggcgacgaccggcccttcttttggctgttcgagaatgtggtggccatgggagtcagcgacaagcgggatattagccggttcctggagagcaaccccgtgatgatcgatgccaaggaagtgagcgccgcccaccgggccagatacttctggggcaatctgcctggcatgaacagacccctggccagcaccgtgaacgacaagctggagctgcaggagtgcctggagcacggccggatcgccaagttcagcaaggtgagaaccatcaccacccgaagcaacagcatcaaacaaggcaaggaccagcactttcctgtgttcatgaacgagaaggaggacatcctgtggtgtaccgagatggagagagtgttcgggttcccagtccactacacagatgtcagcaacatgtctagactggccagacagagactgctgggaagaagctggtccgtccctgtgatcagacacctgttcgcccctctgaaggagtacttcgcctgcgtgagcagcggcaacagcaacgccaacagccggggccccagcttctctagcggcctggtgccactgtccctgagagggagccacatgggccccatggagatctacaaaaccgtgagcgcctggaagcggcagcctgtgcgcgtgctgagcctgtttcggaatatcgataaagtcctgaaaagcctgggattcctggagagcggctctggctccggcggtggcaccctgaagtacgtggaggatgtgacaaacgtggtcagacgggatgtggagaagtggggccccttcgatctggtgtacggcagcacccaacccctgggcagctcttgtgaccggtgccctggctggtacatgtttcagttccaccggatcctgcagtacgccctgccgagacaggagtcccagcggccattcttttggattttcatggacaacttgctgctgaccgaggatgaccaggaaactaccactcggttcctgcagaccgaagccgtgaccctgcaggacgtgagaggccgggactaccagaacgccatgcgggtgtggtccaacatccctggactgaaaagcaagcacgcacctctgacccctaaagaagaggagtacctgcaggcccaggtgcggagcagaagcaagctggacgcccctaaggtggatctgctggtgaagaattgcctcctgcccctgagagagtacttcaagtatttcagccagaatagtctgcccctgggaggcagcggcggcggcgccctggtgacatttgaggacgtcgccgtgcggttcacccaggaggaatgggctctgctggatccttctcagaaaatcctgtaccgggacgtgatgagagagacataccggaatctgacctccgtgggcatcaactgggaatgttgggaccttgaagcctgcttcagaagcctgggaagaaacctgagagtgcaggtggtgaagagaaagtgcgagctgaccaacagcggcccctgcgccgagggcggcccaagcagcggcgcccctcctcccagcggcggcagcccagccggctccccaacctctaccgaggagggcacctctgagtccgccacccccgagagcggccctggcacctccaccgagcccagcgagggcagcgcacccggcagccctgccggcagccccacctccacagaggagggaaccagcaccgagcccagcgaaggcagcgccccaggcaccagcaccgagcctagtgagcaggagattaaacggatcaacaagatcagaagaagacttgtgaaagacagcaacaccaagaaggccggcaagacaggccccatgaaaaccctgctggttagagtgatgacacccgatctgagagagcggctggaaaacctgagaaagaagcctgaaaatatcccccagcccatcagcaatacatctagagccaacctgaataagctgctgaccgattacaccgaaatgaagaaggcgatcctgcatgtgtactgggaagagttccagaaggaccctgtgggcctgatgagccgggtggcccagcctgccagcaagaagatcgatcagaacaagctgaaacctgagatggacgagaagggcaacctgaccaccgccggctttgcctgctctcagtgtggccagcccctgttcgtgtacaagctggagcaggtgtctgagaagggcaaggcttacaccaactacttcggacggtgcaatgtggccgagcacgaaaagctgatcctgctggcccagctgaagcccgagaaggatagcgacgaagccgtgacatatagcctgggaaagtttgggcagagggccctggatttctacagcattcatgtgaccaaggagtccacccaccccgtgaagcccctggcccagatcgccggaaacagatacgcctccggacctgtgggaaaggccctgagcgacgcatgtatgggcacaatcgcctccttcctgtctaagtaccaggacatcatcatcgaacaccagaaggtggtgaagggcaaccagaagagactggagagcctgcgggagctggccggcaaggaaaacctggaataccctagcgtgaccctgccacctcagcctcacaccaaggagggcgttgatgcctacaacgaagtgatcgcccgggtgcgaatgtgggtgaacctgaacctgtggcagaagctgaagctaagcagagatgatgccaagcctctgctgagactgaagggattcccttcctttcctctggtcgagagacaggccaacgaagtggactggtgggacatggtgtgtaacgtgaagaagctgatcaacgagaaaaaggaggatggcaaggtgttttggcagaatctggctggctacaagagacaggaagccctgagaccatacctgagcagcgaggaagatcggaagaagggaaagaaattcgctcggtaccagctgggcgacctgctgctgcacctggaaaagaagcacggcgaggactggggaaaggtgtacgacgaggcctgggagcggattgacaagaaagtggaaggcctgagcaagcacatcaagctggaagaggaacggagaagcgaggacgcccagagcaaggccgccctgaccgactggctgcgggctaaggccagcttcgtgatcgagggcctgaaggaggccgacaaggacgagttctgcagatgcgagctgaagctgcagaagtggtacggggacctgcggggaaagcccttcgccatcgaagccgagaacagcatcctggacatcagcggcttcagcaagcagtacaactgtgccttcatctggcagaaggacggcgtgaagaagctgaacctgtacctgatcatcaactacttcaagggcggcaagctgcggttcaagaagatcaaacctgaagccttcgaagccaacagattctacaccgtgatcaacaaaaagagcggcgagatcgtgcccatggaggtgaacttcaacttcgacgaccccaacctgatcatcctgcctctggcctttggcaagagacagggcagagaattcatctggaacgacctgctgtccctggaaaccggcagcctgaagctggccaacggaagagtgatcgagaagacactgtacaacagaagaacccggcaggatgagcctgccctgttcgtggccctgaccttcgagcggcgggaggtcctggactcctccaatatcaaaccaatgaacctgatcggcgtggcaagaggcgaaaacatccccgccgtgatcgccctgaccgaccccgagggctgcccactgagccggtttaaggatagcctgggaaacccaacccacatcctgagaatcggcgagagctataaggagaagcagcggaccatccaggccaagaaggaggtggagcagcggagagccggcggctacagccggaagtacgccagcaaagccaagaatctggcagacgatatggtgagaaacaccgctagagatctgctgtactacgccgtgacccaggatgccatgctgatcttcgccaacctgagccggggcttcggccggcagggcaagcggaccttcatggccgagagacagtacacacggatggaggactggctgaccgccaagctggcctacgagggcctgagcaagacctacctgtccaagacactggcccagtacacctccaagacatgcagcaactgtgggtttaccatcaccagcgccgactacgacagggtgctggagaagctgaagaagacagcaacaggctggatgaccacaattaacggcaaggagctgaaggtggagggccagattacctactacaacagatacaagagacagaacgtagtcaaggacctgtccgtcgagctggatagactgagcgaagaatctgtgaacaacgacatctcctcctggacaaagggcagaagcggagaagctctgagcctcctgaagaaaagattctcccatagacccgtgcaggagaagttcgtgtgcctgaactgcggcttcgagacacacgcagccgagcaagccgccctgaacatcgccagatcctggctgttcctgcggagccaggagtacaagaaataccagacaaacaagacaaccggcaacaccgataagagagccttcgtcgagacctggcagtccttttaccggaagaagcttaaggaggtgtggaaacctgccgtgcggtctggcggatctggcggaggctcccaccagatcagcgtgaccttcgacgacgtggccctggacttcacccaggaggagtggatcctgctggacctgagccagaggaacctgtacaggaacgtgatgctggagaactaccagaacctggtgaccgtggagtaccagctgagcaagcccaagctgatcgcctggctggagcagcaggagctgagggccgtggagcagggcatcctgcaggagtgggagaccggcctgcagaccaagggcggcggcccaagcagcggcgcccctcctcccagcggcggcagcccagccggctccccaacctctaccgaggagggcacctctgagtccgccacccccgagagcggccctggcacctccaccgagcccagcgagggcagcgcacccggcagccctgccggcagccccacctccacagaggagggaaccagcaccgagcccagcgaaggcagcgccccaggcaccagcaccgagcctagtgagcaggagattaaacggatcaacaagatcagaagaagacttgtgaaagacagcaacaccaagaaggccggcaagacaggccccatgaaaaccctgctggttagagtgatgacacccgatctgagagagcggctggaaaacctgagaaagaagcctgaaaatatcccccagcccatcagcaatacatctagagccaacctgaataagctgctgaccgattacaccgaaatgaagaaggcgatcctgcatgtgtactgggaagagttccagaaggaccctgtgggcctgatgagccgggtggcccagcctgccagcaagaagatcgatcagaacaagctgaaacctgagatggacgagaagggcaacctgaccaccgccggctttgcctgctctcagtgtggccagcccctgttcgtgtacaagctggagcaggtgtctgagaagggcaaggcttacaccaactacttcggacggtgcaatgtggccgagcacgaaaagctgatcctgctggcccagctgaagcccgagaaggatagcgacgaagccgtgacatatagcctgggaaagtttgggcagagggccctggatttctacagcattcatgtgaccaaggagtccacccaccccgtgaagcccctggcccagatcgccggaaacagatacgcctccggacctgtgggaaaggccctgagcgacgcatgtatgggcacaatcgcctccttcctgtctaagtaccaggacatcatcatcgaacaccagaaggtggtgaagggcaaccagaagagactggagagcctgcgggagctggccggcaaggaaaacctggaataccctagcgtgaccctgccacctcagcctcacaccaaggagggcgttgatgcctacaacgaagtgatcgcccgggtgcgaatgtgggtgaacctgaacctgtggcagaagctgaagctaagcagagatgatgccaagcctctgctgagactgaagggattcccttcctttcctctggtcgagagacaggccaacgaagtggactggtgggacatggtgtgtaacgtgaagaagctgatcaacgagaaaaaggaggatggcaaggtgttttggcagaatctggctggctacaagagacaggaagccctgagaccatacctgagcagcgaggaagatcggaagaagggaaagaaattcgctcggtaccagctgggcgacctgctgctgcacctggaaaagaagcacggcgaggactggggaaaggtgtacgacgaggcctgggagcggattgacaagaaagtggaaggcctgagcaagcacatcaagctggaagaggaacggagaagcgaggacgcccagagcaaggccgccctgaccgactggctgcgggctaaggccagcttcgtgatcgagggcctgaaggaggccgacaaggacgagttctgcagatgcgagctgaagctgcagaagtggtacggggacctgcggggaaagcccttcgccatcgaagccgagaacagcatcctggacatcagcggcttcagcaagcagtacaactgtgccttcatctggcagaaggacggcgtgaagaagctgaacctgtacctgatcatcaactacttcaagggcggcaagctgcggttcaagaagatcaaacctgaagccttcgaagccaacagattctacaccgtgatcaacaaaaagagcggcgagatcgtgcccatggaggtgaacttcaacttcgacgaccccaacctgatcatcctgcctctggcctttggcaagagacagggcagagaattcatctggaacgacctgctgtccctggaaaccggcagcctgaagctggccaacggaagagtgatcgagaagacactgtacaacagaagaacccggcaggatgagcctgccctgttcgtggccctgaccttcgagcggcgggaggtcctggactcctccaatatcaaaccaatgaacctgatcggcgtggcaagaggcgaaaacatccccgccgtgatcgccctgaccgaccccgagggctgcccactgagccggtttaaggatagcctgggaaacccaacccacatcctgagaatcggcgagagctataaggagaagcagcggaccatccaggccaagaaggaggtggagcagcggagagccggcggctacagccggaagtacgccagcaaagccaagaatctggcagacgatatggtgagaaacaccgctagagatctgctgtactacgccgtgacccaggatgccatgctgatcttcgccaacctgagccggggcttcggccggcagggcaagcggaccttcatggccgagagacagtacacacggatggaggactggctgaccgccaagctggcctacgagggcctgagcaagacctacctgtccaagacactggcccagtacacctccaagacatgcagcaactgtgggtttaccatcaccagcgccgactacgacagggtgctggagaagctgaagaagacagcaacaggctggatgaccacaattaacggcaaggagctgaaggtggagggccagattacctactacaacagatacaagagacagaacgtagtcaaggacctgtccgtcgagctggatagactgagcgaagaatctgtgaacaacgacatctcctcctggacaaagggcagaagcggagaagctctgagcctcctgaagaaaagattctcccatagacccgtgcaggagaagttcgtgtgcctgaactgcggcttcgagacacacgcagccgagcaagccgccctgaacatcgccagatcctggctgttcctgcggagccaggagtacaagaaataccagacaaacaagacaaccggcaacaccgataagagagccttcgtcgagacctggcagtccttttaccggaagaagcttaaggaggtgtggaaacctgccgtgcggtctggcggatctggcggaggctcctcaccagatcagcgtgaccttcgacgacgtggccctggacttcacccaggaggagtggatcctgctggacctgagccagaggaacctgtacaggaacgtgatgctggagaactaccagaacctggtgaccgtggagtaccagctgagcaagcccaagctgatcgcctggctggagcagcaggagctgagggccgtggagcagggcatcctgcaggagtgggagaccggcctgcagaccaagggcggatctggctccggcagcggccccaagaaaaagagaaaagtctaagctgccttctgcggggcttgccttctggccatgcccttcttctctcccttgcacctgtacctcttggtctttgaataaagcctgagtaggaaggctagcaaaaaaaaaaaaaaaaaaaaaaaaaaaaaaaaaaaaaaaaaaaaaaaaaaaaaaaaaaaaaaaaaaaaaaaaaaaaaaaa

SEQ ID NO: 16638 - RNA, 9485 nt, synthetic construct
  source 1..9485: mol_type = other RNA
aggaaataagagagaaaagaagagtaagaagaaatataagagccaccatggcccctaagaagaagcgtaaagtgagccggatggaacgcctcgtctacgaggtgcggcagaagtgcagaaacatcgaggacatctgcatctcctgcggatctctgaacgtgaccctggagcacccactgttcatcggcggcatgtgccagaactgtaaaaactgttttctggagtgtgcctatcaatacgacgatgacggctaccagagctactgcaccatctgttgcggcggaagagaggtgctgatgtgtggaaataacaactgctgccggtgcttctgcgtggaatgcgtggacctgctggtgggccccggcgccgcccaggccgctattaaggaagatccttggaactgctacatgtgcggccacaagggcacatacggcctgctgagacggagagaggactggcctagcagactgcagatgttcttcgccaataaccacgaccaggagttcgacccccctaaggtgtaccctcccgtccccgccgagaagagaaagcccatccgggtcctgagcctgttcgatggcatcgccaccggtctgctggtgctgaaggacctgggcatccaggtggataggtacattgcctccgaggtgtgcgaggactccatcaccgtgggaatggtgcgtcatcagggcaagatcatgtacgtgggcgacgtgcggagcgtgacacagaagcatatccaggagtggggccctttcgacctggtgatcggcggcagcccttgcaatgacctgagcatcgtgaacccagcccggaagggcctgtacgagggaaccggcagactgttcttcgagttttacagactgctgcacgacgcccggcctaaggaaggcgacgaccggcccttcttttggctgttcgagaatgtggtggccatgggagtcagcgacaagcgggatattagccggttcctggagagcaaccccgtgatgatcgatgccaaggaagtgagcgccgcccaccgggccagatacttctggggcaatctgcctggcatgaacagacccctggccagcaccgtgaacgacaagctggagctgcaggagtgcctggagcacggccggatcgccaagttcagcaaggtgagaaccatcaccacccgaagcaacagcatcaaacaaggcaaggaccagcactttcctgtgttcatgaacgagaaggaggacatcctgtggtgtaccgagatggagagagtgttcgggttcccagtccactacacagatgtcagcaacatgtctagactggccagacagagactgctgggaagaagctggtccgtccctgtgatcagacacctgttcgcccctctgaaggagtacttcgcctgcgtgagcagcggcaacagcaacgccaacagccggggccccagcttctctagcggcctggtgccactgtccctgagagggagccacatgggccccatggagatctacaaaaccgtgagcgcctggaagcggcagcctgtgcgcgtgctgagcctgtttcggaatatcgataaagtcctgaaaagcctgggattcctggagagcggctctggctccggcggtggcaccctgaagtacgtggaggatgtgacaaacgtggtcagacgggatgtggagaagtggggccccttcgatctggtgtacggcagcacccaacccctgggcagctcttgtgaccggtgccctggctggtacatgtttcagttccaccggatcctgcagtacgccctgccgagacaggagtcccagcggccattcttttggattttcatggacaacttgctgctgaccgaggatgaccaggaaactaccactcggttcctgcagaccgaagccgtgaccctgcaggacgtgagaggccgggactaccagaacgccatgcgggtgtggtccaacatccctggactgaaaagcaagcacgcacctctgacccctaaagaagaggagtacctgcaggcccaggtgcggagcagaagcaagctggacgcccctaaggtggatctgctggtgaagaattgcctcctgcccctgagagagtacttcaagtatttcagccagaatagtctgcccctgggaggcagcggcggcggcgccctggtgacatttgaggacgtcgccgtgcggttcacccaggaggaatgggctctgctggatccttctcagaaaatcctgtaccgggacgtgatgagagagacataccggaatctgacctccgtgggcatcaactgggaatgttgggaccttgaagcctgcttcagaagcctgggaagaaacctgagagtgcaggtggtgaagagaaagtgcgagctgaccaacagcggcccctgcgccgagggcggcccaagcagcggcgcccctcctcccagcggcggcagcccagccggctccccaacctctaccgaggagggcacctctgagtccgccacccccgagagcggccctggcacctccaccgagcccagcgagggcagcgcacccggcagccctgccggcagccccacctccacagaggagggaaccagcaccgagcccagcgaaggcagcgccccaggcaccagcaccgagcctagtgagcaggagattaaacggatcaacaagatcagaagaagacttgtgaaagacagcaacaccaagaaggccggcaagacaggccccatgaaaaccctgctggttagagtgatgacacccgatctgagagagcggctggaaaacctgagaaagaagcctgaaaatatcccccagcccatcagcaatacatctagagccaacctgaataagctgctgaccgattacaccgaaatgaagaaggcgatcctgcatgtgtactgggaagagttccagaaggaccctgtgggcctgatgagccgggtggcccagcctgccagcaagaagatcgatcagaacaagctgaaacctgagatggacgagaagggcaacctgaccaccgccggctttgcctgctctcagtgtggccagcccctgttcgtgtacaagctggagcaggtgtctgagaagggcaaggcttacaccaactacttcggacggtgcaatgtggccgagcacgaaaagctgatcctgctggcccagctgaagcccgagaaggatagcgacgaagccgtgacatatagcctgggaaagtttgggcagagggccctggatttctacagcattcatgtgaccaaggagtccacccaccccgtgaagcccctggcccagatcgccggaaacagatacgcctccggacctgtgggaaaggccctgagcgacgcatgtatgggcacaatcgcctccttcctgtctaagtaccaggacatcatcatcgaacaccagaaggtggtgaagggcaaccagaagagactggagagcctgcgggagctggccggcaaggaaaacctggaataccctagcgtgaccctgccacctcagcctcacaccaaggagggcgttgatgcctacaacgaagtgatcgcccgggtgcgaatgtgggtgaacctgaacctgtggcagaagctgaagctaagcagagatgatgccaagcctctgctgagactgaagggattcccttcctttcctctggtcgagagacaggccaacgaagtggactggtgggacatggtgtgtaacgtgaagaagctgatcaacgagaaaaaggaggatggcaaggtgttttggcagaatctggctggctacaagagacaggaagccctgagaccatacctgagcagcgaggaagatcggaagaagggaaagaaattcgctcggtaccagctgggcgacctgctgctgcacctggaaaagaagcacggcgaggactggggaaaggtgtacgacgaggcctgggagcggattgacaagaaagtggaaggcctgagcaagcacatcaagctggaagaggaacggagaagcgaggacgcccagagcaaggccgccctgaccgactggctgcgggctaaggccagcttcgtgatcgagggcctgaaggaggccgacaaggacgagttctgcagatgcgagctgaagctgcagaagtggtacggggacctgcggggaaagcccttcgccatcgaagccgagaacagcatcctggacatcagcggcttcagcaagcagtacaactgtgccttcatctggcagaaggacggcgtgaagaagctgaacctgtacctgatcatcaactacttcaagggcggcaagctgcggttcaagaagatcaaacctgaagccttcgaagccaacagattctacaccgtgatcaacaaaaagagcggcgagatcgtgcccatggaggtgaacttcaacttcgacgaccccaacctgatcatcctgcctctggcctttggcaagagacagggcagagaattcatctggaacgacctgctgtccctggaaaccggcagcctgaagctggccaacggaagagtgatcgagaagacactgtacaacagaagaacccggcaggatgagcctgccctgttcgtggccctgaccttcgagcggcgggaggtcctggactcctccaatatcaaaccaatgaacctgatcggcgtggcaagaggcgaaaacatccccgccgtgatcgccctgaccgaccccgagggctgcccactgagccggtttaaggatagcctgggaaacccaacccacatcctgagaatcggcgagagctataaggagaagcagcggaccatccaggccaagaaggaggtggagcagcggagagccggcggctacagccggaagtacgccagcaaagccaagaatctggcagacgatatggtgagaaacaccgctagagatctgctgtactacgccgtgacccaggatgccatgctgatcttcgccaacctgagccggggcttcggccggcagggcaagcggaccttcatggccgagagacagtacacacggatggaggactggctgaccgccaagctggcctacgagggcctgagcaagacctacctgtccaagacactggcccagtacacctccaagacatgcagcaactgtgggtttaccatcaccagcgccgactacgacagggtgctggagaagctgaagaagacagcaacaggctggatgaccacaattaacggcaaggagctgaaggtggagggccagattacctactacaacagatacaagagacagaacgtagtcaaggacctgtccgtcgagctggatagactgagcgaagaatctgtgaacaacgacatctcctcctggacaaagggcagaagcggagaagctctgagcctcctgaagaaaagattctcccatagacccgtgcaggagaagttcgtgtgcctgaactgcggcttcgagacacacgcagccgagcaagccgccctgaacatcgccagatcctggctgttcctgcggagccaggagtacaagaaataccagacaaacaagacaaccggcaacaccgataagagagccttcgtcgagacctggcagtccttttaccggaagaagcttaaggaggtgtggaaacctgccgtgcggtctggcggatctggcggaggctccgccagctgcggcctgctgaccttcagggacgtggccatcgagttcagccaggaggagtggaggtgcctgagccacacccagagggagctgtacagggacgtgatgctggagaactacggccacctgctgttcctgggcctgatcgtgagcaagcccgacctggtgagcttcctggagctgaggaaggacccctgggacgtgaagaggaggaagaccgccggcttcgaccccggcaggtggcagggcggcccaagcagcggcgcccctcctcccagcggcggcagcccagccggctccccaacctctaccgaggagggcacctctgagtccgccacccccgagagcggccctggcacctccaccgagcccagcgagggcagcgcacccggcagccctgccggcagccccacctccacagaggagggaaccagcaccgagcccagcgaaggcagcgccccaggcaccagcaccgagcctagtgagcaggagattaaacggatcaacaagatcagaagaagacttgtgaaagacagcaacaccaagaaggccggcaagacaggccccatgaaaaccctgctggttagagtgatgacacccgatctgagagagcggctggaaaacctgagaaagaagcctgaaaatatcccccagcccatcagcaatacatctagagccaacctgaataagctgctgaccgattacaccgaaatgaagaaggcgatcctgcatgtgtactgggaagagttccagaaggaccctgtgggcctgatgagccgggtggcccagcctgccagcaagaagatcgatcagaacaagctgaaacctgagatggacgagaagggcaacctgaccaccgccggctttgcctgctctcagtgtggccagcccctgttcgtgtacaagctggagcaggtgtctgagaagggcaaggcttacaccaactacttcggacggtgcaatgtggccgagcacgaaaagctgatcctgctggcccagctgaagcccgagaaggatagcgacgaagccgtgacatatagcctgggaaagtttgggcagagggccctggatttctacagcattcatgtgaccaaggagtccacccaccccgtgaagcccctggcccagatcgccggaaacagatacgcctccggacctgtgggaaaggccctgagcgacgcatgtatgggcacaatcgcctccttcctgtctaagtaccaggacatcatcatcgaacaccagaaggtggtgaagggcaaccagaagagactggagagcctgcgggagctggccggcaaggaaaacctggaataccctagcgtgaccctgccacctcagcctcacaccaaggagggcgttgatgcctacaacgaagtgatcgcccgggtgcgaatgtgggtgaacctgaacctgtggcagaagctgaagctaagcagagatgatgccaagcctctgctgagactgaagggattcccttcctttcctctggtcgagagacaggccaacgaagtggactggtgggacatggtgtgtaacgtgaagaagctgatcaacgagaaaaaggaggatggcaaggtgttttggcagaatctggctggctacaagagacaggaagccctgagaccatacctgagcagcgaggaagatcggaagaagggaaagaaattcgctcggtaccagctgggcgacctgctgctgcacctggaaaagaagcacggcgaggactggggaaaggtgtacgacgaggcctgggagcggattgacaagaaagtggaaggcctgagcaagcacatcaagctggaagaggaacggagaagcgaggacgcccagagcaaggccgccctgaccgactggctgcgggctaaggccagcttcgtgatcgagggcctgaaggaggccgacaaggacgagttctgcagatgcgagctgaagctgcagaagtggtacggggacctgcggggaaagcccttcgccatcgaagccgagaacagcatcctggacatcagcggcttcagcaagcagtacaactgtgccttcatctggcagaaggacggcgtgaagaagctgaacctgtacctgatcatcaactacttcaagggcggcaagctgcggttcaagaagatcaaacctgaagccttcgaagccaacagattctacaccgtgatcaacaaaaagagcggcgagatcgtgcccatggaggtgaacttcaacttcgacgaccccaacctgatcatcctgcctctggcctttggcaagagacagggcagagaattcatctggaacgacctgctgtccctggaaaccggcagcctgaagctggccaacggaagagtgatcgagaagacactgtacaacagaagaacccggcaggatgagcctgccctgttcgtggccctgaccttcgagcggcgggaggtcctggactcctccaatatcaaaccaatgaacctgatcggcgtggcaagaggcgaaaacatccccgccgtgatcgccctgaccgaccccgagggctgcccactgagccggtttaaggatagcctgggaaacccaacccacatcctgagaatcggcgagagctataaggagaagcagcggaccatccaggccaagaaggaggtggagcagcggagagccggcggctacagccggaagtacgccagcaaagccaagaatctggcagacgatatggtgagaaacaccgctagagatctgctgtactacgccgtgacccaggatgccatgctgatcttcgccaacctgagccggggcttcggccggcagggcaagcggaccttcatggccgagagacagtacacacggatggaggactggctgaccgccaagctggcctacgagggcctgagcaagacctacctgtccaagacactggcccagtacacctccaagacatgcagcaactgtgggtttaccatcaccagcgccgactacgacagggtgctggagaagctgaagaagacagcaacaggctggatgaccacaattaacggcaaggagctgaaggtggagggccagattacctactacaacagatacaagagacagaacgtagtcaaggacctgtccgtcgagctggatagactgagcgaagaatctgtgaacaacgacatctcctcctggacaaagggcagaagcggagaagctctgagcctcctgaagaaaagattctcccatagacccgtgcaggagaagttcgtgtgcctgaactgcggcttcgagacacacgcagccgagcaagccgccctgaacatcgccagatcctggctgttcctgcggagccaggagtacaagaaataccagacaaacaagacaaccggcaacaccgataagagagccttcgtcgagacctggcagtccttttaccggaagaagcttaaggaggtgtggaaacctgccgtgcggtctggcggatctggcggaggctcctgccagctgcggcctgctgaccttcagggacgtggccatcgagttcagccaggaggagtggaggtgcctgagccacacccagagggagctgtacagggacgtgatgctggagaactacggccacctgctgttcctgggcctgatcgtgagcaagcccgacctggtgagcttcctggagctgaggaaggacccctgggacgtgaagaggaggaagaccgccggcttcgaccccggcaggtggcagggatctggctccggcagcggccccaagaaaaagagaaaagtctaagctgccttctgcggggcttgccttctggccatgcccttcttctctcccttgcacctgtacctcttggtctttgaataaagcctgagtaggaaggctagcaaaaaaaaaaaaaaaaaaaaaaaaaaaaaaaaaaaaaaaaaaaaaaaaaaaaaaaaaaaaaaaaaaaaaaaaaaaaaaaa

SEQ ID NO: 16639 - RNA, 9557 nt, synthetic construct
  source 1..9557: mol_type = other RNA
aggaaataagagagaaaagaagagtaagaagaaatataagagccaccatggcccctaagaagaagcgtaaagtgagccggatggaacgcctcgtctacgaggtgcggcagaagtgcagaaacatcgaggacatctgcatctcctgcggatctctgaacgtgaccctggagcacccactgttcatcggcggcatgtgccagaactgtaaaaactgttttctggagtgtgcctatcaatacgacgatgacggctaccagagctactgcaccatctgttgcggcggaagagaggtgctgatgtgtggaaataacaactgctgccggtgcttctgcgtggaatgcgtggacctgctggtgggccccggcgccgcccaggccgctattaaggaagatccttggaactgctacatgtgcggccacaagggcacatacggcctgctgagacggagagaggactggcctagcagactgcagatgttcttcgccaataaccacgaccaggagttcgacccccctaaggtgtaccctcccgtccccgccgagaagagaaagcccatccgggtcctgagcctgttcgatggcatcgccaccggtctgctggtgctgaaggacctgggcatccaggtggataggtacattgcctccgaggtgtgcgaggactccatcaccgtgggaatggtgcgtcatcagggcaagatcatgtacgtgggcgacgtgcggagcgtgacacagaagcatatccaggagtggggccctttcgacctggtgatcggcggcagcccttgcaatgacctgagcatcgtgaacccagcccggaagggcctgtacgagggaaccggcagactgttcttcgagttttacagactgctgcacgacgcccggcctaaggaaggcgacgaccggcccttcttttggctgttcgagaatgtggtggccatgggagtcagcgacaagcgggatattagccggttcctggagagcaaccccgtgatgatcgatgccaaggaagtgagcgccgcccaccgggccagatacttctggggcaatctgcctggcatgaacagacccctggccagcaccgtgaacgacaagctggagctgcaggagtgcctggagcacggccggatcgccaagttcagcaaggtgagaaccatcaccacccgaagcaacagcatcaaacaaggcaaggaccagcactttcctgtgttcatgaacgagaaggaggacatcctgtggtgtaccgagatggagagagtgttcgggttcccagtccactacacagatgtcagcaacatgtctagactggccagacagagactgctgggaagaagctggtccgtccctgtgatcagacacctgttcgcccctctgaaggagtacttcgcctgcgtgagcagcggcaacagcaacgccaacagccggggccccagcttctctagcggcctggtgccactgtccctgagagggagccacatgggccccatggagatctacaaaaccgtgagcgcctggaagcggcagcctgtgcgcgtgctgagcctgtttcggaatatcgataaagtcctgaaaagcctgggattcctggagagcggctctggctccggcggtggcaccctgaagtacgtggaggatgtgacaaacgtggtcagacgggatgtggagaagtggggccccttcgatctggtgtacggcagcacccaacccctgggcagctcttgtgaccggtgccctggctggtacatgtttcagttccaccggatcctgcagtacgccctgccgagacaggagtcccagcggccattcttttggattttcatggacaacttgctgctgaccgaggatgaccaggaaactaccactcggttcctgcagaccgaagccgtgaccctgcaggacgtgagaggccgggactaccagaacgccatgcgggtgtggtccaacatccctggactgaaaagcaagcacgcacctctgacccctaaagaagaggagtacctgcaggcccaggtgcggagcagaagcaagctggacgcccctaaggtggatctgctggtgaagaattgcctcctgcccctgagagagtacttcaagtatttcagccagaatagtctgcccctgggaggcagcggcggcggcgccctggtgacatttgaggacgtcgccgtgcggttcacccaggaggaatgggctctgctggatccttctcagaaaatcctgtaccgggacgtgatgagagagacataccggaatctgacctccgtgggcatcaactgggaatgttgggaccttgaagcctgcttcagaagcctgggaagaaacctgagagtgcaggtggtgaagagaaagtgcgagctgaccaacagcggcccctgcgccgagggcggcccaagcagcggcgcccctcctcccagcggcggcagcccagccggctccccaacctctaccgaggagggcacctctgagtccgccacccccgagagcggccctggcacctccaccgagcccagcgagggcagcgcacccggcagccctgccggcagccccacctccacagaggagggaaccagcaccgagcccagcgaaggcagcgccccaggcaccagcaccgagcctagtgagcaggagattaaacggatcaacaagatcagaagaagacttgtgaaagacagcaacaccaagaaggccggcaagacaggccccatgaaaaccctgctggttagagtgatgacacccgatctgagagagcggctggaaaacctgagaaagaagcctgaaaatatcccccagcccatcagcaatacatctagagccaacctgaataagctgctgaccgattacaccgaaatgaagaaggcgatcctgcatgtgtactgggaagagttccagaaggaccctgtgggcctgatgagccgggtggcccagcctgccagcaagaagatcgatcagaacaagctgaaacctgagatggacgagaagggcaacctgaccaccgccggctttgcctgctctcagtgtggccagcccctgttcgtgtacaagctggagcaggtgtctgagaagggcaaggcttacaccaactacttcggacggtgcaatgtggccgagcacgaaaagctgatcctgctggcccagctgaagcccgagaaggatagcgacgaagccgtgacatatagcctgggaaagtttgggcagagggccctggatttctacagcattcatgtgaccaaggagtccacccaccccgtgaagcccctggcccagatcgccggaaacagatacgcctccggacctgtgggaaaggccctgagcgacgcatgtatgggcacaatcgcctccttcctgtctaagtaccaggacatcatcatcgaacaccagaaggtggtgaagggcaaccagaagagactggagagcctgcgggagctggccggcaaggaaaacctggaataccctagcgtgaccctgccacctcagcctcacaccaaggagggcgttgatgcctacaacgaagtgatcgcccgggtgcgaatgtgggtgaacctgaacctgtggcagaagctgaagctaagcagagatgatgccaagcctctgctgagactgaagggattcccttcctttcctctggtcgagagacaggccaacgaagtggactggtgggacatggtgtgtaacgtgaagaagctgatcaacgagaaaaaggaggatggcaaggtgttttggcagaatctggctggctacaagagacaggaagccctgagaccatacctgagcagcgaggaagatcggaagaagggaaagaaattcgctcggtaccagctgggcgacctgctgctgcacctggaaaagaagcacggcgaggactggggaaaggtgtacgacgaggcctgggagcggattgacaagaaagtggaaggcctgagcaagcacatcaagctggaagaggaacggagaagcgaggacgcccagagcaaggccgccctgaccgactggctgcgggctaaggccagcttcgtgatcgagggcctgaaggaggccgacaaggacgagttctgcagatgcgagctgaagctgcagaagtggtacggggacctgcggggaaagcccttcgccatcgaagccgagaacagcatcctggacatcagcggcttcagcaagcagtacaactgtgccttcatctggcagaaggacggcgtgaagaagctgaacctgtacctgatcatcaactacttcaagggcggcaagctgcggttcaagaagatcaaacctgaagccttcgaagccaacagattctacaccgtgatcaacaaaaagagcggcgagatcgtgcccatggaggtgaacttcaacttcgacgaccccaacctgatcatcctgcctctggcctttggcaagagacagggcagagaattcatctggaacgacctgctgtccctggaaaccggcagcctgaagctggccaacggaagagtgatcgagaagacactgtacaacagaagaacccggcaggatgagcctgccctgttcgtggccctgaccttcgagcggcgggaggtcctggactcctccaatatcaaaccaatgaacctgatcggcgtggcaagaggcgaaaacatccccgccgtgatcgccctgaccgaccccgagggctgcccactgagccggtttaaggatagcctgggaaacccaacccacatcctgagaatcggcgagagctataaggagaagcagcggaccatccaggccaagaaggaggtggagcagcggagagccggcggctacagccggaagtacgccagcaaagccaagaatctggcagacgatatggtgagaaacaccgctagagatctgctgtactacgccgtgacccaggatgccatgctgatcttcgccaacctgagccggggcttcggccggcagggcaagcggaccttcatggccgagagacagtacacacggatggaggactggctgaccgccaagctggcctacgagggcctgagcaagacctacctgtccaagacactggcccagtacacctccaagacatgcagcaactgtgggtttaccatcaccagcgccgactacgacagggtgctggagaagctgaagaagacagcaacaggctggatgaccacaattaacggcaaggagctgaaggtggagggccagattacctactacaacagatacaagagacagaacgtagtcaaggacctgtccgtcgagctggatagactgagcgaagaatctgtgaacaacgacatctcctcctggacaaagggcagaagcggagaagctctgagcctcctgaagaaaagattctcccatagacccgtgcaggagaagttcgtgtgcctgaactgcggcttcgagacacacgcagccgagcaagccgccctgaacatcgccagatcctggctgttcctgcggagccaggagtacaagaaataccagacaaacaagacaaccggcaacaccgataagagagccttcgtcgagacctggcagtccttttaccggaagaagcttaaggaggtgtggaaacctgccgtgcggtctggcggatctggcggaggctccgtgaccttccaggaggtggccgtgtgcttcaccgaggaggagtgggccctgctggaccccggccagagggccctgtacagggtggtgatgcaggagaactacgaggccgtgaccagcctggtggccaagggcaacaagaacagcctgtgccagaccttctgcctgtgctggggcagccccagcagcatgctgttctgcagccccagcctgctgcagggcctgcagaagccccaggactgcaggggcctgtacggcggcgccccccagtgccagaccgtgggcggcccaagcagcggcgcccctcctcccagcggcggcagcccagccggctccccaacctctaccgaggagggcacctctgagtccgccacccccgagagcggccctggcacctccaccgagcccagcgagggcagcgcacccggcagccctgccggcagccccacctccacagaggagggaaccagcaccgagcccagcgaaggcagcgccccaggcaccagcaccgagcctagtgagcaggagattaaacggatcaacaagatcagaagaagacttgtgaaagacagcaacaccaagaaggccggcaagacaggccccatgaaaaccctgctggttagagtgatgacacccgatctgagagagcggctggaaaacctgagaaagaagcctgaaaatatcccccagcccatcagcaatacatctagagccaacctgaataagctgctgaccgattacaccgaaatgaagaaggcgatcctgcatgtgtactgggaagagttccagaaggaccctgtgggcctgatgagccgggtggcccagcctgccagcaagaagatcgatcagaacaagctgaaacctgagatggacgagaagggcaacctgaccaccgccggctttgcctgctctcagtgtggccagcccctgttcgtgtacaagctggagcaggtgtctgagaagggcaaggcttacaccaactacttcggacggtgcaatgtggccgagcacgaaaagctgatcctgctggcccagctgaagcccgagaaggatagcgacgaagccgtgacatatagcctgggaaagtttgggcagagggccctggatttctacagcattcatgtgaccaaggagtccacccaccccgtgaagcccctggcccagatcgccggaaacagatacgcctccggacctgtgggaaaggccctgagcgacgcatgtatgggcacaatcgcctccttcctgtctaagtaccaggacatcatcatcgaacaccagaaggtggtgaagggcaaccagaagagactggagagcctgcgggagctggccggcaaggaaaacctggaataccctagcgtgaccctgccacctcagcctcacaccaaggagggcgttgatgcctacaacgaagtgatcgcccgggtgcgaatgtgggtgaacctgaacctgtggcagaagctgaagctaagcagagatgatgccaagcctctgctgagactgaagggattcccttcctttcctctggtcgagagacaggccaacgaagtggactggtgggacatggtgtgtaacgtgaagaagctgatcaacgagaaaaaggaggatggcaaggtgttttggcagaatctggctggctacaagagacaggaagccctgagaccatacctgagcagcgaggaagatcggaagaagggaaagaaattcgctcggtaccagctgggcgacctgctgctgcacctggaaaagaagcacggcgaggactggggaaaggtgtacgacgaggcctgggagcggattgacaagaaagtggaaggcctgagcaagcacatcaagctggaagaggaacggagaagcgaggacgcccagagcaaggccgccctgaccgactggctgcgggctaaggccagcttcgtgatcgagggcctgaaggaggccgacaaggacgagttctgcagatgcgagctgaagctgcagaagtggtacggggacctgcggggaaagcccttcgccatcgaagccgagaacagcatcctggacatcagcggcttcagcaagcagtacaactgtgccttcatctggcagaaggacggcgtgaagaagctgaacctgtacctgatcatcaactacttcaagggcggcaagctgcggttcaagaagatcaaacctgaagccttcgaagccaacagattctacaccgtgatcaacaaaaagagcggcgagatcgtgcccatggaggtgaacttcaacttcgacgaccccaacctgatcatcctgcctctggcctttggcaagagacagggcagagaattcatctggaacgacctgctgtccctggaaaccggcagcctgaagctggccaacggaagagtgatcgagaagacactgtacaacagaagaacccggcaggatgagcctgccctgttcgtggccctgaccttcgagcggcgggaggtcctggactcctccaatatcaaaccaatgaacctgatcggcgtggcaagaggcgaaaacatccccgccgtgatcgccctgaccgaccccgagggctgcccactgagccggtttaaggatagcctgggaaacccaacccacatcctgagaatcggcgagagctataaggagaagcagcggaccatccaggccaagaaggaggtggagcagcggagagccggcggctacagccggaagtacgccagcaaagccaagaatctggcagacgatatggtgagaaacaccgctagagatctgctgtactacgccgtgacccaggatgccatgctgatcttcgccaacctgagccggggcttcggccggcagggcaagcggaccttcatggccgagagacagtacacacggatggaggactggctgaccgccaagctggcctacgagggcctgagcaagacctacctgtccaagacactggcccagtacacctccaagacatgcagcaactgtgggtttaccatcaccagcgccgactacgacagggtgctggagaagctgaagaagacagcaacaggctggatgaccacaattaacggcaaggagctgaaggtggagggccagattacctactacaacagatacaagagacagaacgtagtcaaggacctgtccgtcgagctggatagactgagcgaagaatctgtgaacaacgacatctcctcctggacaaagggcagaagcggagaagctctgagcctcctgaagaaaagattctcccatagacccgtgcaggagaagttcgtgtgcctgaactgcggcttcgagacacacgcagccgagcaagccgccctgaacatcgccagatcctggctgttcctgcggagccaggagtacaagaaataccagacaaacaagacaaccggcaacaccgataagagagccttcgtcgagacctggcagtccttttaccggaagaagcttaaggaggtgtggaaacctgccgtgcggtctggcggatctggcggaggctcctgtgaccttccaggaggtggccgtgtgcttcaccgaggaggagtgggccctgctggaccccggccagagggccctgtacagggtggtgatgcaggagaactacgaggccgtgaccagcctggtggccaagggcaacaagaacagcctgtgccagaccttctgcctgtgctggggcagccccagcagcatgctgttctgcagccccagcctgctgcagggcctgcagaagccccaggactgcaggggcctgtacggcggcgccccccagtgccagaccgtgggatctggctccggcagcggccccaagaaaaagagaaaagtctaagctgccttctgcggggcttgccttctggccatgcccttcttctctcccttgcacctgtacctcttggtctttgaataaagcctgagtaggaaggctagcaaaaaaaaaaaaaaaaaaaaaaaaaaaaaaaaaaaaaaaaaaaaaaaaaaaaaaaaaaaaaaaaaaaaaaaaaaaaaaaa

SEQ ID NO: 16640 - RNA, 9485 nt, synthetic construct
  source 1..9485: mol_type = other RNA
aggaaataagagagaaaagaagagtaagaagaaatataagagccaccatggcccctaagaagaagcgtaaagtgagccggatggaacgcctcgtctacgaggtgcggcagaagtgcagaaacatcgaggacatctgcatctcctgcggatctctgaacgtgaccctggagcacccactgttcatcggcggcatgtgccagaactgtaaaaactgttttctggagtgtgcctatcaatacgacgatgacggctaccagagctactgcaccatctgttgcggcggaagagaggtgctgatgtgtggaaataacaactgctgccggtgcttctgcgtggaatgcgtggacctgctggtgggccccggcgccgcccaggccgctattaaggaagatccttggaactgctacatgtgcggccacaagggcacatacggcctgctgagacggagagaggactggcctagcagactgcagatgttcttcgccaataaccacgaccaggagttcgacccccctaaggtgtaccctcccgtccccgccgagaagagaaagcccatccgggtcctgagcctgttcgatggcatcgccaccggtctgctggtgctgaaggacctgggcatccaggtggataggtacattgcctccgaggtgtgcgaggactccatcaccgtgggaatggtgcgtcatcagggcaagatcatgtacgtgggcgacgtgcggagcgtgacacagaagcatatccaggagtggggccctttcgacctggtgatcggcggcagcccttgcaatgacctgagcatcgtgaacccagcccggaagggcctgtacgagggaaccggcagactgttcttcgagttttacagactgctgcacgacgcccggcctaaggaaggcgacgaccggcccttcttttggctgttcgagaatgtggtggccatgggagtcagcgacaagcgggatattagccggttcctggagagcaaccccgtgatgatcgatgccaaggaagtgagcgccgcccaccgggccagatacttctggggcaatctgcctggcatgaacagacccctggccagcaccgtgaacgacaagctggagctgcaggagtgcctggagcacggccggatcgccaagttcagcaaggtgagaaccatcaccacccgaagcaacagcatcaaacaaggcaaggaccagcactttcctgtgttcatgaacgagaaggaggacatcctgtggtgtaccgagatggagagagtgttcgggttcccagtccactacacagatgtcagcaacatgtctagactggccagacagagactgctgggaagaagctggtccgtccctgtgatcagacacctgttcgcccctctgaaggagtacttcgcctgcgtgagcagcggcaacagcaacgccaacagccggggccccagcttctctagcggcctggtgccactgtccctgagagggagccacatgggccccatggagatctacaaaaccgtgagcgcctggaagcggcagcctgtgcgcgtgctgagcctgtttcggaatatcgataaagtcctgaaaagcctgggattcctggagagcggctctggctccggcggtggcaccctgaagtacgtggaggatgtgacaaacgtggtcagacgggatgtggagaagtggggccccttcgatctggtgtacggcagcacccaacccctgggcagctcttgtgaccggtgccctggctggtacatgtttcagttccaccggatcctgcagtacgccctgccgagacaggagtcccagcggccattcttttggattttcatggacaacttgctgctgaccgaggatgaccaggaaactaccactcggttcctgcagaccgaagccgtgaccctgcaggacgtgagaggccgggactaccagaacgccatgcgggtgtggtccaacatccctggactgaaaagcaagcacgcacctctgacccctaaagaagaggagtacctgcaggcccaggtgcggagcagaagcaagctggacgcccctaaggtggatctgctggtgaagaattgcctcctgcccctgagagagtacttcaagtatttcagccagaatagtctgcccctgggaggcagcggcggcggcgccctggtgacatttgaggacgtcgccgtgcggttcacccaggaggaatgggctctgctggatccttctcagaaaatcctgtaccgggacgtgatgagagagacataccggaatctgacctccgtgggcatcaactgggaatgttgggaccttgaagcctgcttcagaagcctgggaagaaacctgagagtgcaggtggtgaagagaaagtgcgagctgaccaacagcggcccctgcgccgagggcggcccaagcagcggcgcccctcctcccagcggcggcagcccagccggctccccaacctctaccgaggagggcacctctgagtccgccacccccgagagcggccctggcacctccaccgagcccagcgagggcagcgcacccggcagccctgccggcagccccacctccacagaggagggaaccagcaccgagcccagcgaaggcagcgccccaggcaccagcaccgagcctagtgagcaggagattaaacggatcaacaagatcagaagaagacttgtgaaagacagcaacaccaagaaggccggcaagacaggccccatgaaaaccctgctggttagagtgatgacacccgatctgagagagcggctggaaaacctgagaaagaagcctgaaaatatcccccagcccatcagcaatacatctagagccaacctgaataagctgctgaccgattacaccgaaatgaagaaggcgatcctgcatgtgtactgggaagagttccagaaggaccctgtgggcctgatgagccgggtggcccagcctgccagcaagaagatcgatcagaacaagctgaaacctgagatggacgagaagggcaacctgaccaccgccggctttgcctgctctcagtgtggccagcccctgttcgtgtacaagctggagcaggtgtctgagaagggcaaggcttacaccaactacttcggacggtgcaatgtggccgagcacgaaaagctgatcctgctggcccagctgaagcccgagaaggatagcgacgaagccgtgacatatagcctgggaaagtttgggcagagggccctggatttctacagcattcatgtgaccaaggagtccacccaccccgtgaagcccctggcccagatcgccggaaacagatacgcctccggacctgtgggaaaggccctgagcgacgcatgtatgggcacaatcgcctccttcctgtctaagtaccaggacatcatcatcgaacaccagaaggtggtgaagggcaaccagaagagactggagagcctgcgggagctggccggcaaggaaaacctggaataccctagcgtgaccctgccacctcagcctcacaccaaggagggcgttgatgcctacaacgaagtgatcgcccgggtgcgaatgtgggtgaacctgaacctgtggcagaagctgaagctaagcagagatgatgccaagcctctgctgagactgaagggattcccttcctttcctctggtcgagagacaggccaacgaagtggactggtgggacatggtgtgtaacgtgaagaagctgatcaacgagaaaaaggaggatggcaaggtgttttggcagaatctggctggctacaagagacaggaagccctgagaccatacctgagcagcgaggaagatcggaagaagggaaagaaattcgctcggtaccagctgggcgacctgctgctgcacctggaaaagaagcacggcgaggactggggaaaggtgtacgacgaggcctgggagcggattgacaagaaagtggaaggcctgagcaagcacatcaagctggaagaggaacggagaagcgaggacgcccagagcaaggccgccctgaccgactggctgcgggctaaggccagcttcgtgatcgagggcctgaaggaggccgacaaggacgagttctgcagatgcgagctgaagctgcagaagtggtacggggacctgcggggaaagcccttcgccatcgaagccgagaacagcatcctggacatcagcggcttcagcaagcagtacaactgtgccttcatctggcagaaggacggcgtgaagaagctgaacctgtacctgatcatcaactacttcaagggcggcaagctgcggttcaagaagatcaaacctgaagccttcgaagccaacagattctacaccgtgatcaacaaaaagagcggcgagatcgtgcccatggaggtgaacttcaacttcgacgaccccaacctgatcatcctgcctctggcctttggcaagagacagggcagagaattcatctggaacgacctgctgtccctggaaaccggcagcctgaagctggccaacggaagagtgatcgagaagacactgtacaacagaagaacccggcaggatgagcctgccctgttcgtggccctgaccttcgagcggcgggaggtcctggactcctccaatatcaaaccaatgaacctgatcggcgtggcaagaggcgaaaacatccccgccgtgatcgccctgaccgaccccgagggctgcccactgagccggtttaaggatagcctgggaaacccaacccacatcctgagaatcggcgagagctataaggagaagcagcggaccatccaggccaagaaggaggtggagcagcggagagccggcggctacagccggaagtacgccagcaaagccaagaatctggcagacgatatggtgagaaacaccgctagagatctgctgtactacgccgtgacccaggatgccatgctgatcttcgccaacctgagccggggcttcggccggcagggcaagcggaccttcatggccgagagacagtacacacggatggaggactggctgaccgccaagctggcctacgagggcctgagcaagacctacctgtccaagacactggcccagtacacctccaagacatgcagcaactgtgggtttaccatcaccagcgccgactacgacagggtgctggagaagctgaagaagacagcaacaggctggatgaccacaattaacggcaaggagctgaaggtggagggccagattacctactacaacagatacaagagacagaacgtagtcaaggacctgtccgtcgagctggatagactgagcgaagaatctgtgaacaacgacatctcctcctggacaaagggcagaagcggagaagctctgagcctcctgaagaaaagattctcccatagacccgtgcaggagaagttcgtgtgcctgaactgcggcttcgagacacacgcagccgagcaagccgccctgaacatcgccagatcctggctgttcctgcggagccaggagtacaagaaataccagacaaacaagacaaccggcaacaccgataagagagccttcgtcgagacctggcagtccttttaccggaagaagcttaaggaggtgtggaaacctgccgtgcggtctggcggatctggcggaggctccagccacggccccctgagcttcgaggacgtggccatcgccttcaccaaggaggagtggcagcagctggaccccgcccagaggaccctgtacagggacgtgatgctggagaacttcagccacctggtgagcctgggccaccccgtgagcaagcccgacatcatcagcaagctggagcagggcgaggagccctggatcatcaagaggcacatcagcgactggatctgccccgagagggagaccaggggcggcccaagcagcggcgcccctcctcccagcggcggcagcccagccggctccccaacctctaccgaggagggcacctctgagtccgccacccccgagagcggccctggcacctccaccgagcccagcgagggcagcgcacccggcagccctgccggcagccccacctccacagaggagggaaccagcaccgagcccagcgaaggcagcgccccaggcaccagcaccgagcctagtgagcaggagattaaacggatcaacaagatcagaagaagacttgtgaaagacagcaacaccaagaaggccggcaagacaggccccatgaaaaccctgctggttagagtgatgacacccgatctgagagagcggctggaaaacctgagaaagaagcctgaaaatatcccccagcccatcagcaatacatctagagccaacctgaataagctgctgaccgattacaccgaaatgaagaaggcgatcctgcatgtgtactgggaagagttccagaaggaccctgtgggcctgatgagccgggtggcccagcctgccagcaagaagatcgatcagaacaagctgaaacctgagatggacgagaagggcaacctgaccaccgccggctttgcctgctctcagtgtggccagcccctgttcgtgtacaagctggagcaggtgtctgagaagggcaaggcttacaccaactacttcggacggtgcaatgtggccgagcacgaaaagctgatcctgctggcccagctgaagcccgagaaggatagcgacgaagccgtgacatatagcctgggaaagtttgggcagagggccctggatttctacagcattcatgtgaccaaggagtccacccaccccgtgaagcccctggcccagatcgccggaaacagatacgcctccggacctgtgggaaaggccctgagcgacgcatgtatgggcacaatcgcctccttcctgtctaagtaccaggacatcatcatcgaacaccagaaggtggtgaagggcaaccagaagagactggagagcctgcgggagctggccggcaaggaaaacctggaataccctagcgtgaccctgccacctcagcctcacaccaaggagggcgttgatgcctacaacgaagtgatcgcccgggtgcgaatgtgggtgaacctgaacctgtggcagaagctgaagctaagcagagatgatgccaagcctctgctgagactgaagggattcccttcctttcctctggtcgagagacaggccaacgaagtggactggtgggacatggtgtgtaacgtgaagaagctgatcaacgagaaaaaggaggatggcaaggtgttttggcagaatctggctggctacaagagacaggaagccctgagaccatacctgagcagcgaggaagatcggaagaagggaaagaaattcgctcggtaccagctgggcgacctgctgctgcacctggaaaagaagcacggcgaggactggggaaaggtgtacgacgaggcctgggagcggattgacaagaaagtggaaggcctgagcaagcacatcaagctggaagaggaacggagaagcgaggacgcccagagcaaggccgccctgaccgactggctgcgggctaaggccagcttcgtgatcgagggcctgaaggaggccgacaaggacgagttctgcagatgcgagctgaagctgcagaagtggtacggggacctgcggggaaagcccttcgccatcgaagccgagaacagcatcctggacatcagcggcttcagcaagcagtacaactgtgccttcatctggcagaaggacggcgtgaagaagctgaacctgtacctgatcatcaactacttcaagggcggcaagctgcggttcaagaagatcaaacctgaagccttcgaagccaacagattctacaccgtgatcaacaaaaagagcggcgagatcgtgcccatggaggtgaacttcaacttcgacgaccccaacctgatcatcctgcctctggcctttggcaagagacagggcagagaattcatctggaacgacctgctgtccctggaaaccggcagcctgaagctggccaacggaagagtgatcgagaagacactgtacaacagaagaacccggcaggatgagcctgccctgttcgtggccctgaccttcgagcggcgggaggtcctggactcctccaatatcaaaccaatgaacctgatcggcgtggcaagaggcgaaaacatccccgccgtgatcgccctgaccgaccccgagggctgcccactgagccggtttaaggatagcctgggaaacccaacccacatcctgagaatcggcgagagctataaggagaagcagcggaccatccaggccaagaaggaggtggagcagcggagagccggcggctacagccggaagtacgccagcaaagccaagaatctggcagacgatatggtgagaaacaccgctagagatctgctgtactacgccgtgacccaggatgccatgctgatcttcgccaacctgagccggggcttcggccggcagggcaagcggaccttcatggccgagagacagtacacacggatggaggactggctgaccgccaagctggcctacgagggcctgagcaagacctacctgtccaagacactggcccagtacacctccaagacatgcagcaactgtgggtttaccatcaccagcgccgactacgacagggtgctggagaagctgaagaagacagcaacaggctggatgaccacaattaacggcaaggagctgaaggtggagggccagattacctactacaacagatacaagagacagaacgtagtcaaggacctgtccgtcgagctggatagactgagcgaagaatctgtgaacaacgacatctcctcctggacaaagggcagaagcggagaagctctgagcctcctgaagaaaagattctcccatagacccgtgcaggagaagttcgtgtgcctgaactgcggcttcgagacacacgcagccgagcaagccgccctgaacatcgccagatcctggctgttcctgcggagccaggagtacaagaaataccagacaaacaagacaaccggcaacaccgataagagagccttcgtcgagacctggcagtccttttaccggaagaagcttaaggaggtgtggaaacctgccgtgcggtctggcggatctggcggaggctcctagccacggccccctgagcttcgaggacgtggccatcgccttcaccaaggaggagtggcagcagctggaccccgcccagaggaccctgtacagggacgtgatgctggagaacttcagccacctggtgagcctgggccaccccgtgagcaagcccgacatcatcagcaagctggagcagggcgaggagccctggatcatcaagaggcacatcagcgactggatctgccccgagagggagaccaggggatctggctccggcagcggccccaagaaaaagagaaaagtctaagctgccttctgcggggcttgccttctggccatgcccttcttctctcccttgcacctgtacctcttggtctttgaataaagcctgagtaggaaggctagcaaaaaaaaaaaaaaaaaaaaaaaaaaaaaaaaaaaaaaaaaaaaaaaaaaaaaaaaaaaaaaaaaaaaaaaaaaaaaaaa

SEQ ID NO: 16641 - RNA, 9485 nt, synthetic construct
  source 1..9485: mol_type = other RNA
aggaaataagagagaaaagaagagtaagaagaaatataagagccaccatggcccctaagaagaagcgtaaagtgagccggatggaacgcctcgtctacgaggtgcggcagaagtgcagaaacatcgaggacatctgcatctcctgcggatctctgaacgtgaccctggagcacccactgttcatcggcggcatgtgccagaactgtaaaaactgttttctggagtgtgcctatcaatacgacgatgacggctaccagagctactgcaccatctgttgcggcggaagagaggtgctgatgtgtggaaataacaactgctgccggtgcttctgcgtggaatgcgtggacctgctggtgggccccggcgccgcccaggccgctattaaggaagatccttggaactgctacatgtgcggccacaagggcacatacggcctgctgagacggagagaggactggcctagcagactgcagatgttcttcgccaataaccacgaccaggagttcgacccccctaaggtgtaccctcccgtccccgccgagaagagaaagcccatccgggtcctgagcctgttcgatggcatcgccaccggtctgctggtgctgaaggacctgggcatccaggtggataggtacattgcctccgaggtgtgcgaggactccatcaccgtgggaatggtgcgtcatcagggcaagatcatgtacgtgggcgacgtgcggagcgtgacacagaagcatatccaggagtggggccctttcgacctggtgatcggcggcagcccttgcaatgacctgagcatcgtgaacccagcccggaagggcctgtacgagggaaccggcagactgttcttcgagttttacagactgctgcacgacgcccggcctaaggaaggcgacgaccggcccttcttttggctgttcgagaatgtggtggccatgggagtcagcgacaagcgggatattagccggttcctggagagcaaccccgtgatgatcgatgccaaggaagtgagcgccgcccaccgggccagatacttctggggcaatctgcctggcatgaacagacccctggccagcaccgtgaacgacaagctggagctgcaggagtgcctggagcacggccggatcgccaagttcagcaaggtgagaaccatcaccacccgaagcaacagcatcaaacaaggcaaggaccagcactttcctgtgttcatgaacgagaaggaggacatcctgtggtgtaccgagatggagagagtgttcgggttcccagtccactacacagatgtcagcaacatgtctagactggccagacagagactgctgggaagaagctggtccgtccctgtgatcagacacctgttcgcccctctgaaggagtacttcgcctgcgtgagcagcggcaacagcaacgccaacagccggggccccagcttctctagcggcctggtgccactgtccctgagagggagccacatgggccccatggagatctacaaaaccgtgagcgcctggaagcggcagcctgtgcgcgtgctgagcctgtttcggaatatcgataaagtcctgaaaagcctgggattcctggagagcggctctggctccggcggtggcaccctgaagtacgtggaggatgtgacaaacgtggtcagacgggatgtggagaagtggggccccttcgatctggtgtacggcagcacccaacccctgggcagctcttgtgaccggtgccctggctggtacatgtttcagttccaccggatcctgcagtacgccctgccgagacaggagtcccagcggccattcttttggattttcatggacaacttgctgctgaccgaggatgaccaggaaactaccactcggttcctgcagaccgaagccgtgaccctgcaggacgtgagaggccgggactaccagaacgccatgcgggtgtggtccaacatccctggactgaaaagcaagcacgcacctctgacccctaaagaagaggagtacctgcaggcccaggtgcggagcagaagcaagctggacgcccctaaggtggatctgctggtgaagaattgcctcctgcccctgagagagtacttcaagtatttcagccagaatagtctgcccctgggaggcagcggcggcggcgccctggtgacatttgaggacgtcgccgtgcggttcacccaggaggaatgggctctgctggatccttctcagaaaatcctgtaccgggacgtgatgagagagacataccggaatctgacctccgtgggcatcaactgggaatgttgggaccttgaagcctgcttcagaagcctgggaagaaacctgagagtgcaggtggtgaagagaaagtgcgagctgaccaacagcggcccctgcgccgagggcggcccaagcagcggcgcccctcctcccagcggcggcagcccagccggctccccaacctctaccgaggagggcacctctgagtccgccacccccgagagcggccctggcacctccaccgagcccagcgagggcagcgcacccggcagccctgccggcagccccacctccacagaggagggaaccagcaccgagcccagcgaaggcagcgccccaggcaccagcaccgagcctagtgagcaggagattaaacggatcaacaagatcagaagaagacttgtgaaagacagcaacaccaagaaggccggcaagacaggccccatgaaaaccctgctggttagagtgatgacacccgatctgagagagcggctggaaaacctgagaaagaagcctgaaaatatcccccagcccatcagcaatacatctagagccaacctgaataagctgctgaccgattacaccgaaatgaagaaggcgatcctgcatgtgtactgggaagagttccagaaggaccctgtgggcctgatgagccgggtggcccagcctgccagcaagaagatcgatcagaacaagctgaaacctgagatggacgagaagggcaacctgaccaccgccggctttgcctgctctcagtgtggccagcccctgttcgtgtacaagctggagcaggtgtctgagaagggcaaggcttacaccaactacttcggacggtgcaatgtggccgagcacgaaaagctgatcctgctggcccagctgaagcccgagaaggatagcgacgaagccgtgacatatagcctgggaaagtttgggcagagggccctggatttctacagcattcatgtgaccaaggagtccacccaccccgtgaagcccctggcccagatcgccggaaacagatacgcctccggacctgtgggaaaggccctgagcgacgcatgtatgggcacaatcgcctccttcctgtctaagtaccaggacatcatcatcgaacaccagaaggtggtgaagggcaaccagaagagactggagagcctgcgggagctggccggcaaggaaaacctggaataccctagcgtgaccctgccacctcagcctcacaccaaggagggcgttgatgcctacaacgaagtgatcgcccgggtgcgaatgtgggtgaacctgaacctgtggcagaagctgaagctaagcagagatgatgccaagcctctgctgagactgaagggattcccttcctttcctctggtcgagagacaggccaacgaagtggactggtgggacatggtgtgtaacgtgaagaagctgatcaacgagaaaaaggaggatggcaaggtgttttggcagaatctggctggctacaagagacaggaagccctgagaccatacctgagcagcgaggaagatcggaagaagggaaagaaattcgctcggtaccagctgggcgacctgctgctgcacctggaaaagaagcacggcgaggactggggaaaggtgtacgacgaggcctgggagcggattgacaagaaagtggaaggcctgagcaagcacatcaagctggaagaggaacggagaagcgaggacgcccagagcaaggccgccctgaccgactggctgcgggctaaggccagcttcgtgatcgagggcctgaaggaggccgacaaggacgagttctgcagatgcgagctgaagctgcagaagtggtacggggacctgcggggaaagcccttcgccatcgaagccgagaacagcatcctggacatcagcggcttcagcaagcagtacaactgtgccttcatctggcagaaggacggcgtgaagaagctgaacctgtacctgatcatcaactacttcaagggcggcaagctgcggttcaagaagatcaaacctgaagccttcgaagccaacagattctacaccgtgatcaacaaaaagagcggcgagatcgtgcccatggaggtgaacttcaacttcgacgaccccaacctgatcatcctgcctctggcctttggcaagagacagggcagagaattcatctggaacgacctgctgtccctggaaaccggcagcctgaagctggccaacggaagagtgatcgagaagacactgtacaacagaagaacccggcaggatgagcctgccctgttcgtggccctgaccttcgagcggcgggaggtcctggactcctccaatatcaaaccaatgaacctgatcggcgtggcaagaggcgaaaacatccccgccgtgatcgccctgaccgaccccgagggctgcccactgagccggtttaaggatagcctgggaaacccaacccacatcctgagaatcggcgagagctataaggagaagcagcggaccatccaggccaagaaggaggtggagcagcggagagccggcggctacagccggaagtacgccagcaaagccaagaatctggcagacgatatggtgagaaacaccgctagagatctgctgtactacgccgtgacccaggatgccatgctgatcttcgccaacctgagccggggcttcggccggcagggcaagcggaccttcatggccgagagacagtacacacggatggaggactggctgaccgccaagctggcctacgagggcctgagcaagacctacctgtccaagacactggcccagtacacctccaagacatgcagcaactgtgggtttaccatcaccagcgccgactacgacagggtgctggagaagctgaagaagacagcaacaggctggatgaccacaattaacggcaaggagctgaaggtggagggccagattacctactacaacagatacaagagacagaacgtagtcaaggacctgtccgtcgagctggatagactgagcgaagaatctgtgaacaacgacatctcctcctggacaaagggcagaagcggagaagctctgagcctcctgaagaaaagattctcccatagacccgtgcaggagaagttcgtgtgcctgaactgcggcttcgagacacacgcagccgagcaagccgccctgaacatcgccagatcctggctgttcctgcggagccaggagtacaagaaataccagacaaacaagacaaccggcaacaccgataagagagccttcgtcgagacctggcagtccttttaccggaagaagcttaaggaggtgtggaaacctgccgtgcggtctggcggatctggcggaggctccatgagccagggcagcgtgaccttcagggacgtggccatcgacttcagccaggaggagtggaagtggctgcagcccgcccagagggacctgtacaggtgcgtgatgctggagaactacggccacctggtgagcctgggcctgagcatcagcaagcccgacgtggtgagcctgctggagcagggcaaggagccctggctgggcaagagggaggtgaagagggacctgttcagcgtgagcgagagcggcggcccaagcagcggcgcccctcctcccagcggcggcagcccagccggctccccaacctctaccgaggagggcacctctgagtccgccacccccgagagcggccctggcacctccaccgagcccagcgagggcagcgcacccggcagccctgccggcagccccacctccacagaggagggaaccagcaccgagcccagcgaaggcagcgccccaggcaccagcaccgagcctagtgagcaggagattaaacggatcaacaagatcagaagaagacttgtgaaagacagcaacaccaagaaggccggcaagacaggccccatgaaaaccctgctggttagagtgatgacacccgatctgagagagcggctggaaaacctgagaaagaagcctgaaaatatcccccagcccatcagcaatacatctagagccaacctgaataagctgctgaccgattacaccgaaatgaagaaggcgatcctgcatgtgtactgggaagagttccagaaggaccctgtgggcctgatgagccgggtggcccagcctgccagcaagaagatcgatcagaacaagctgaaacctgagatggacgagaagggcaacctgaccaccgccggctttgcctgctctcagtgtggccagcccctgttcgtgtacaagctggagcaggtgtctgagaagggcaaggcttacaccaactacttcggacggtgcaatgtggccgagcacgaaaagctgatcctgctggcccagctgaagcccgagaaggatagcgacgaagccgtgacatatagcctgggaaagtttgggcagagggccctggatttctacagcattcatgtgaccaaggagtccacccaccccgtgaagcccctggcccagatcgccggaaacagatacgcctccggacctgtgggaaaggccctgagcgacgcatgtatgggcacaatcgcctccttcctgtctaagtaccaggacatcatcatcgaacaccagaaggtggtgaagggcaaccagaagagactggagagcctgcgggagctggccggcaaggaaaacctggaataccctagcgtgaccctgccacctcagcctcacaccaaggagggcgttgatgcctacaacgaagtgatcgcccgggtgcgaatgtgggtgaacctgaacctgtggcagaagctgaagctaagcagagatgatgccaagcctctgctgagactgaagggattcccttcctttcctctggtcgagagacaggccaacgaagtggactggtgggacatggtgtgtaacgtgaagaagctgatcaacgagaaaaaggaggatggcaaggtgttttggcagaatctggctggctacaagagacaggaagccctgagaccatacctgagcagcgaggaagatcggaagaagggaaagaaattcgctcggtaccagctgggcgacctgctgctgcacctggaaaagaagcacggcgaggactggggaaaggtgtacgacgaggcctgggagcggattgacaagaaagtggaaggcctgagcaagcacatcaagctggaagaggaacggagaagcgaggacgcccagagcaaggccgccctgaccgactggctgcgggctaaggccagcttcgtgatcgagggcctgaaggaggccgacaaggacgagttctgcagatgcgagctgaagctgcagaagtggtacggggacctgcggggaaagcccttcgccatcgaagccgagaacagcatcctggacatcagcggcttcagcaagcagtacaactgtgccttcatctggcagaaggacggcgtgaagaagctgaacctgtacctgatcatcaactacttcaagggcggcaagctgcggttcaagaagatcaaacctgaagccttcgaagccaacagattctacaccgtgatcaacaaaaagagcggcgagatcgtgcccatggaggtgaacttcaacttcgacgaccccaacctgatcatcctgcctctggcctttggcaagagacagggcagagaattcatctggaacgacctgctgtccctggaaaccggcagcctgaagctggccaacggaagagtgatcgagaagacactgtacaacagaagaacccggcaggatgagcctgccctgttcgtggccctgaccttcgagcggcgggaggtcctggactcctccaatatcaaaccaatgaacctgatcggcgtggcaagaggcgaaaacatccccgccgtgatcgccctgaccgaccccgagggctgcccactgagccggtttaaggatagcctgggaaacccaacccacatcctgagaatcggcgagagctataaggagaagcagcggaccatccaggccaagaaggaggtggagcagcggagagccggcggctacagccggaagtacgccagcaaagccaagaatctggcagacgatatggtgagaaacaccgctagagatctgctgtactacgccgtgacccaggatgccatgctgatcttcgccaacctgagccggggcttcggccggcagggcaagcggaccttcatggccgagagacagtacacacggatggaggactggctgaccgccaagctggcctacgagggcctgagcaagacctacctgtccaagacactggcccagtacacctccaagacatgcagcaactgtgggtttaccatcaccagcgccgactacgacagggtgctggagaagctgaagaagacagcaacaggctggatgaccacaattaacggcaaggagctgaaggtggagggccagattacctactacaacagatacaagagacagaacgtagtcaaggacctgtccgtcgagctggatagactgagcgaagaatctgtgaacaacgacatctcctcctggacaaagggcagaagcggagaagctctgagcctcctgaagaaaagattctcccatagacccgtgcaggagaagttcgtgtgcctgaactgcggcttcgagacacacgcagccgagcaagccgccctgaacatcgccagatcctggctgttcctgcggagccaggagtacaagaaataccagacaaacaagacaaccggcaacaccgataagagagccttcgtcgagacctggcagtccttttaccggaagaagcttaaggaggtgtggaaacctgccgtgcggtctggcggatctggcggaggctcctatgagccagggcagcgtgaccttcagggacgtggccatcgacttcagccaggaggagtggaagtggctgcagcccgcccagagggacctgtacaggtgcgtgatgctggagaactacggccacctggtgagcctgggcctgagcatcagcaagcccgacgtggtgagcctgctggagcagggcaaggagccctggctgggcaagagggaggtgaagagggacctgttcagcgtgagcgagagcggatctggctccggcagcggccccaagaaaaagagaaaagtctaagctgccttctgcggggcttgccttctggccatgcccttcttctctcccttgcacctgtacctcttggtctttgaataaagcctgagtaggaaggctagcaaaaaaaaaaaaaaaaaaaaaaaaaaaaaaaaaaaaaaaaaaaaaaaaaaaaaaaaaaaaaaaaaaaaaaaaaaaaaaaa

SEQ ID NO: 16642 - RNA, 9485 nt, synthetic construct
  source 1..9485: mol_type = other RNA
aggaaataagagagaaaagaagagtaagaagaaatataagagccaccatggcccctaagaagaagcgtaaagtgagccggatggaacgcctcgtctacgaggtgcggcagaagtgcagaaacatcgaggacatctgcatctcctgcggatctctgaacgtgaccctggagcacccactgttcatcggcggcatgtgccagaactgtaaaaactgttttctggagtgtgcctatcaatacgacgatgacggctaccagagctactgcaccatctgttgcggcggaagagaggtgctgatgtgtggaaataacaactgctgccggtgcttctgcgtggaatgcgtggacctgctggtgggccccggcgccgcccaggccgctattaaggaagatccttggaactgctacatgtgcggccacaagggcacatacggcctgctgagacggagagaggactggcctagcagactgcagatgttcttcgccaataaccacgaccaggagttcgacccccctaaggtgtaccctcccgtccccgccgagaagagaaagcccatccgggtcctgagcctgttcgatggcatcgccaccggtctgctggtgctgaaggacctgggcatccaggtggataggtacattgcctccgaggtgtgcgaggactccatcaccgtgggaatggtgcgtcatcagggcaagatcatgtacgtgggcgacgtgcggagcgtgacacagaagcatatccaggagtggggccctttcgacctggtgatcggcggcagcccttgcaatgacctgagcatcgtgaacccagcccggaagggcctgtacgagggaaccggcagactgttcttcgagttttacagactgctgcacgacgcccggcctaaggaaggcgacgaccggcccttcttttggctgttcgagaatgtggtggccatgggagtcagcgacaagcgggatattagccggttcctggagagcaaccccgtgatgatcgatgccaaggaagtgagcgccgcccaccgggccagatacttctggggcaatctgcctggcatgaacagacccctggccagcaccgtgaacgacaagctggagctgcaggagtgcctggagcacggccggatcgccaagttcagcaaggtgagaaccatcaccacccgaagcaacagcatcaaacaaggcaaggaccagcactttcctgtgttcatgaacgagaaggaggacatcctgtggtgtaccgagatggagagagtgttcgggttcccagtccactacacagatgtcagcaacatgtctagactggccagacagagactgctgggaagaagctggtccgtccctgtgatcagacacctgttcgcccctctgaaggagtacttcgcctgcgtgagcagcggcaacagcaacgccaacagccggggccccagcttctctagcggcctggtgccactgtccctgagagggagccacatgggccccatggagatctacaaaaccgtgagcgcctggaagcggcagcctgtgcgcgtgctgagcctgtttcggaatatcgataaagtcctgaaaagcctgggattcctggagagcggctctggctccggcggtggcaccctgaagtacgtggaggatgtgacaaacgtggtcagacgggatgtggagaagtggggccccttcgatctggtgtacggcagcacccaacccctgggcagctcttgtgaccggtgccctggctggtacatgtttcagttccaccggatcctgcagtacgccctgccgagacaggagtcccagcggccattcttttggattttcatggacaacttgctgctgaccgaggatgaccaggaaactaccactcggttcctgcagaccgaagccgtgaccctgcaggacgtgagaggccgggactaccagaacgccatgcgggtgtggtccaacatccctggactgaaaagcaagcacgcacctctgacccctaaagaagaggagtacctgcaggcccaggtgcggagcagaagcaagctggacgcccctaaggtggatctgctggtgaagaattgcctcctgcccctgagagagtacttcaagtatttcagccagaatagtctgcccctgggaggcagcggcggcggcgccctggtgacatttgaggacgtcgccgtgcggttcacccaggaggaatgggctctgctggatccttctcagaaaatcctgtaccgggacgtgatgagagagacataccggaatctgacctccgtgggcatcaactgggaatgttgggaccttgaagcctgcttcagaagcctgggaagaaacctgagagtgcaggtggtgaagagaaagtgcgagctgaccaacagcggcccctgcgccgagggcggcccaagcagcggcgcccctcctcccagcggcggcagcccagccggctccccaacctctaccgaggagggcacctctgagtccgccacccccgagagcggccctggcacctccaccgagcccagcgagggcagcgcacccggcagccctgccggcagccccacctccacagaggagggaaccagcaccgagcccagcgaaggcagcgccccaggcaccagcaccgagcctagtgagcaggagattaaacggatcaacaagatcagaagaagacttgtgaaagacagcaacaccaagaaggccggcaagacaggccccatgaaaaccctgctggttagagtgatgacacccgatctgagagagcggctggaaaacctgagaaagaagcctgaaaatatcccccagcccatcagcaatacatctagagccaacctgaataagctgctgaccgattacaccgaaatgaagaaggcgatcctgcatgtgtactgggaagagttccagaaggaccctgtgggcctgatgagccgggtggcccagcctgccagcaagaagatcgatcagaacaagctgaaacctgagatggacgagaagggcaacctgaccaccgccggctttgcctgctctcagtgtggccagcccctgttcgtgtacaagctggagcaggtgtctgagaagggcaaggcttacaccaactacttcggacggtgcaatgtggccgagcacgaaaagctgatcctgctggcccagctgaagcccgagaaggatagcgacgaagccgtgacatatagcctgggaaagtttgggcagagggccctggatttctacagcattcatgtgaccaaggagtccacccaccccgtgaagcccctggcccagatcgccggaaacagatacgcctccggacctgtgggaaaggccctgagcgacgcatgtatgggcacaatcgcctccttcctgtctaagtaccaggacatcatcatcgaacaccagaaggtggtgaagggcaaccagaagagactggagagcctgcgggagctggccggcaaggaaaacctggaataccctagcgtgaccctgccacctcagcctcacaccaaggagggcgttgatgcctacaacgaagtgatcgcccgggtgcgaatgtgggtgaacctgaacctgtggcagaagctgaagctaagcagagatgatgccaagcctctgctgagactgaagggattcccttcctttcctctggtcgagagacaggccaacgaagtggactggtgggacatggtgtgtaacgtgaagaagctgatcaacgagaaaaaggaggatggcaaggtgttttggcagaatctggctggctacaagagacaggaagccctgagaccatacctgagcagcgaggaagatcggaagaagggaaagaaattcgctcggtaccagctgggcgacctgctgctgcacctggaaaagaagcacggcgaggactggggaaaggtgtacgacgaggcctgggagcggattgacaagaaagtggaaggcctgagcaagcacatcaagctggaagaggaacggagaagcgaggacgcccagagcaaggccgccctgaccgactggctgcgggctaaggccagcttcgtgatcgagggcctgaaggaggccgacaaggacgagttctgcagatgcgagctgaagctgcagaagtggtacggggacctgcggggaaagcccttcgccatcgaagccgagaacagcatcctggacatcagcggcttcagcaagcagtacaactgtgccttcatctggcagaaggacggcgtgaagaagctgaacctgtacctgatcatcaactacttcaagggcggcaagctgcggttcaagaagatcaaacctgaagccttcgaagccaacagattctacaccgtgatcaacaaaaagagcggcgagatcgtgcccatggaggtgaacttcaacttcgacgaccccaacctgatcatcctgcctctggcctttggcaagagacagggcagagaattcatctggaacgacctgctgtccctggaaaccggcagcctgaagctggccaacggaagagtgatcgagaagacactgtacaacagaagaacccggcaggatgagcctgccctgttcgtggccctgaccttcgagcggcgggaggtcctggactcctccaatatcaaaccaatgaacctgatcggcgtggcaagaggcgaaaacatccccgccgtgatcgccctgaccgaccccgagggctgcccactgagccggtttaaggatagcctgggaaacccaacccacatcctgagaatcggcgagagctataaggagaagcagcggaccatccaggccaagaaggaggtggagcagcggagagccggcggctacagccggaagtacgccagcaaagccaagaatctggcagacgatatggtgagaaacaccgctagagatctgctgtactacgccgtgacccaggatgccatgctgatcttcgccaacctgagccggggcttcggccggcagggcaagcggaccttcatggccgagagacagtacacacggatggaggactggctgaccgccaagctggcctacgagggcctgagcaagacctacctgtccaagacactggcccagtacacctccaagacatgcagcaactgtgggtttaccatcaccagcgccgactacgacagggtgctggagaagctgaagaagacagcaacaggctggatgaccacaattaacggcaaggagctgaaggtggagggccagattacctactacaacagatacaagagacagaacgtagtcaaggacctgtccgtcgagctggatagactgagcgaagaatctgtgaacaacgacatctcctcctggacaaagggcagaagcggagaagctctgagcctcctgaagaaaagattctcccatagacccgtgcaggagaagttcgtgtgcctgaactgcggcttcgagacacacgcagccgagcaagccgccctgaacatcgccagatcctggctgttcctgcggagccaggagtacaagaaataccagacaaacaagacaaccggcaacaccgataagagagccttcgtcgagacctggcagtccttttaccggaagaagcttaaggaggtgtggaaacctgccgtgcggtctggcggatctggcggaggctccccccagggcagcgtgaccttcagggacgtggccgtgaacttcagccaggacgagtggggcaggctggaccccagccagaaggagctgtacagggaggtgatgctggagaactaccacaacctggtgtgcctgggcctggccgccagcaagcccgacgtgatcgaccagctggagaggggcgaggccccctggatgcccggcatcggctgccccgaccagaagatcaggagcgacacccaggagggcggcccaagcagcggcgcccctcctcccagcggcggcagcccagccggctccccaacctctaccgaggagggcacctctgagtccgccacccccgagagcggccctggcacctccaccgagcccagcgagggcagcgcacccggcagccctgccggcagccccacctccacagaggagggaaccagcaccgagcccagcgaaggcagcgccccaggcaccagcaccgagcctagtgagcaggagattaaacggatcaacaagatcagaagaagacttgtgaaagacagcaacaccaagaaggccggcaagacaggccccatgaaaaccctgctggttagagtgatgacacccgatctgagagagcggctggaaaacctgagaaagaagcctgaaaatatcccccagcccatcagcaatacatctagagccaacctgaataagctgctgaccgattacaccgaaatgaagaaggcgatcctgcatgtgtactgggaagagttccagaaggaccctgtgggcctgatgagccgggtggcccagcctgccagcaagaagatcgatcagaacaagctgaaacctgagatggacgagaagggcaacctgaccaccgccggctttgcctgctctcagtgtggccagcccctgttcgtgtacaagctggagcaggtgtctgagaagggcaaggcttacaccaactacttcggacggtgcaatgtggccgagcacgaaaagctgatcctgctggcccagctgaagcccgagaaggatagcgacgaagccgtgacatatagcctgggaaagtttgggcagagggccctggatttctacagcattcatgtgaccaaggagtccacccaccccgtgaagcccctggcccagatcgccggaaacagatacgcctccggacctgtgggaaaggccctgagcgacgcatgtatgggcacaatcgcctccttcctgtctaagtaccaggacatcatcatcgaacaccagaaggtggtgaagggcaaccagaagagactggagagcctgcgggagctggccggcaaggaaaacctggaataccctagcgtgaccctgccacctcagcctcacaccaaggagggcgttgatgcctacaacgaagtgatcgcccgggtgcgaatgtgggtgaacctgaacctgtggcagaagctgaagctaagcagagatgatgccaagcctctgctgagactgaagggattcccttcctttcctctggtcgagagacaggccaacgaagtggactggtgggacatggtgtgtaacgtgaagaagctgatcaacgagaaaaaggaggatggcaaggtgttttggcagaatctggctggctacaagagacaggaagccctgagaccatacctgagcagcgaggaagatcggaagaagggaaagaaattcgctcggtaccagctgggcgacctgctgctgcacctggaaaagaagcacggcgaggactggggaaaggtgtacgacgaggcctgggagcggattgacaagaaagtggaaggcctgagcaagcacatcaagctggaagaggaacggagaagcgaggacgcccagagcaaggccgccctgaccgactggctgcgggctaaggccagcttcgtgatcgagggcctgaaggaggccgacaaggacgagttctgcagatgcgagctgaagctgcagaagtggtacggggacctgcggggaaagcccttcgccatcgaagccgagaacagcatcctggacatcagcggcttcagcaagcagtacaactgtgccttcatctggcagaaggacggcgtgaagaagctgaacctgtacctgatcatcaactacttcaagggcggcaagctgcggttcaagaagatcaaacctgaagccttcgaagccaacagattctacaccgtgatcaacaaaaagagcggcgagatcgtgcccatggaggtgaacttcaacttcgacgaccccaacctgatcatcctgcctctggcctttggcaagagacagggcagagaattcatctggaacgacctgctgtccctggaaaccggcagcctgaagctggccaacggaagagtgatcgagaagacactgtacaacagaagaacccggcaggatgagcctgccctgttcgtggccctgaccttcgagcggcgggaggtcctggactcctccaatatcaaaccaatgaacctgatcggcgtggcaagaggcgaaaacatccccgccgtgatcgccctgaccgaccccgagggctgcccactgagccggtttaaggatagcctgggaaacccaacccacatcctgagaatcggcgagagctataaggagaagcagcggaccatccaggccaagaaggaggtggagcagcggagagccggcggctacagccggaagtacgccagcaaagccaagaatctggcagacgatatggtgagaaacaccgctagagatctgctgtactacgccgtgacccaggatgccatgctgatcttcgccaacctgagccggggcttcggccggcagggcaagcggaccttcatggccgagagacagtacacacggatggaggactggctgaccgccaagctggcctacgagggcctgagcaagacctacctgtccaagacactggcccagtacacctccaagacatgcagcaactgtgggtttaccatcaccagcgccgactacgacagggtgctggagaagctgaagaagacagcaacaggctggatgaccacaattaacggcaaggagctgaaggtggagggccagattacctactacaacagatacaagagacagaacgtagtcaaggacctgtccgtcgagctggatagactgagcgaagaatctgtgaacaacgacatctcctcctggacaaagggcagaagcggagaagctctgagcctcctgaagaaaagattctcccatagacccgtgcaggagaagttcgtgtgcctgaactgcggcttcgagacacacgcagccgagcaagccgccctgaacatcgccagatcctggctgttcctgcggagccaggagtacaagaaataccagacaaacaagacaaccggcaacaccgataagagagccttcgtcgagacctggcagtccttttaccggaagaagcttaaggaggtgtggaaacctgccgtgcggtctggcggatctggcggaggctcctccccagggcagcgtgaccttcagggacgtggccgtgaacttcagccaggacgagtggggcaggctggaccccagccagaaggagctgtacagggaggtgatgctggagaactaccacaacctggtgtgcctgggcctggccgccagcaagcccgacgtgatcgaccagctggagaggggcgaggccccctggatgcccggcatcggctgccccgaccagaagatcaggagcgacacccaggagggatctggctccggcagcggccccaagaaaaagagaaaagtctaagctgccttctgcggggcttgccttctggccatgcccttcttctctcccttgcacctgtacctcttggtctttgaataaagcctgagtaggaaggctagcaaaaaaaaaaaaaaaaaaaaaaaaaaaaaaaaaaaaaaaaaaaaaaaaaaaaaaaaaaaaaaaaaaaaaaaaaaaaaaaa

SEQ ID NO: 16643 - RNA, 9485 nt, synthetic construct
  source 1..9485: mol_type = other RNA
aggaaataagagagaaaagaagagtaagaagaaatataagagccaccatggcccctaagaagaagcgtaaagtgagccggatggaacgcctcgtctacgaggtgcggcagaagtgcagaaacatcgaggacatctgcatctcctgcggatctctgaacgtgaccctggagcacccactgttcatcggcggcatgtgccagaactgtaaaaactgttttctggagtgtgcctatcaatacgacgatgacggctaccagagctactgcaccatctgttgcggcggaagagaggtgctgatgtgtggaaataacaactgctgccggtgcttctgcgtggaatgcgtggacctgctggtgggccccggcgccgcccaggccgctattaaggaagatccttggaactgctacatgtgcggccacaagggcacatacggcctgctgagacggagagaggactggcctagcagactgcagatgttcttcgccaataaccacgaccaggagttcgacccccctaaggtgtaccctcccgtccccgccgagaagagaaagcccatccgggtcctgagcctgttcgatggcatcgccaccggtctgctggtgctgaaggacctgggcatccaggtggataggtacattgcctccgaggtgtgcgaggactccatcaccgtgggaatggtgcgtcatcagggcaagatcatgtacgtgggcgacgtgcggagcgtgacacagaagcatatccaggagtggggccctttcgacctggtgatcggcggcagcccttgcaatgacctgagcatcgtgaacccagcccggaagggcctgtacgagggaaccggcagactgttcttcgagttttacagactgctgcacgacgcccggcctaaggaaggcgacgaccggcccttcttttggctgttcgagaatgtggtggccatgggagtcagcgacaagcgggatattagccggttcctggagagcaaccccgtgatgatcgatgccaaggaagtgagcgccgcccaccgggccagatacttctggggcaatctgcctggcatgaacagacccctggccagcaccgtgaacgacaagctggagctgcaggagtgcctggagcacggccggatcgccaagttcagcaaggtgagaaccatcaccacccgaagcaacagcatcaaacaaggcaaggaccagcactttcctgtgttcatgaacgagaaggaggacatcctgtggtgtaccgagatggagagagtgttcgggttcccagtccactacacagatgtcagcaacatgtctagactggccagacagagactgctgggaagaagctggtccgtccctgtgatcagacacctgttcgcccctctgaaggagtacttcgcctgcgtgagcagcggcaacagcaacgccaacagccggggccccagcttctctagcggcctggtgccactgtccctgagagggagccacatgggccccatggagatctacaaaaccgtgagcgcctggaagcggcagcctgtgcgcgtgctgagcctgtttcggaatatcgataaagtcctgaaaagcctgggattcctggagagcggctctggctccggcggtggcaccctgaagtacgtggaggatgtgacaaacgtggtcagacgggatgtggagaagtggggccccttcgatctggtgtacggcagcacccaacccctgggcagctcttgtgaccggtgccctggctggtacatgtttcagttccaccggatcctgcagtacgccctgccgagacaggagtcccagcggccattcttttggattttcatggacaacttgctgctgaccgaggatgaccaggaaactaccactcggttcctgcagaccgaagccgtgaccctgcaggacgtgagaggccgggactaccagaacgccatgcgggtgtggtccaacatccctggactgaaaagcaagcacgcacctctgacccctaaagaagaggagtacctgcaggcccaggtgcggagcagaagcaagctggacgcccctaaggtggatctgctggtgaagaattgcctcctgcccctgagagagtacttcaagtatttcagccagaatagtctgcccctgggaggcagcggcggcggcgccctggtgacatttgaggacgtcgccgtgcggttcacccaggaggaatgggctctgctggatccttctcagaaaatcctgtaccgggacgtgatgagagagacataccggaatctgacctccgtgggcatcaactgggaatgttgggaccttgaagcctgcttcagaagcctgggaagaaacctgagagtgcaggtggtgaagagaaagtgcgagctgaccaacagcggcccctgcgccgagggcggcccaagcagcggcgcccctcctcccagcggcggcagcccagccggctccccaacctctaccgaggagggcacctctgagtccgccacccccgagagcggccctggcacctccaccgagcccagcgagggcagcgcacccggcagccctgccggcagccccacctccacagaggagggaaccagcaccgagcccagcgaaggcagcgccccaggcaccagcaccgagcctagtgagcaggagattaaacggatcaacaagatcagaagaagacttgtgaaagacagcaacaccaagaaggccggcaagacaggccccatgaaaaccctgctggttagagtgatgacacccgatctgagagagcggctggaaaacctgagaaagaagcctgaaaatatcccccagcccatcagcaatacatctagagccaacctgaataagctgctgaccgattacaccgaaatgaagaaggcgatcctgcatgtgtactgggaagagttccagaaggaccctgtgggcctgatgagccgggtggcccagcctgccagcaagaagatcgatcagaacaagctgaaacctgagatggacgagaagggcaacctgaccaccgccggctttgcctgctctcagtgtggccagcccctgttcgtgtacaagctggagcaggtgtctgagaagggcaaggcttacaccaactacttcggacggtgcaatgtggccgagcacgaaaagctgatcctgctggcccagctgaagcccgagaaggatagcgacgaagccgtgacatatagcctgggaaagtttgggcagagggccctggatttctacagcattcatgtgaccaaggagtccacccaccccgtgaagcccctggcccagatcgccggaaacagatacgcctccggacctgtgggaaaggccctgagcgacgcatgtatgggcacaatcgcctccttcctgtctaagtaccaggacatcatcatcgaacaccagaaggtggtgaagggcaaccagaagagactggagagcctgcgggagctggccggcaaggaaaacctggaataccctagcgtgaccctgccacctcagcctcacaccaaggagggcgttgatgcctacaacgaagtgatcgcccgggtgcgaatgtgggtgaacctgaacctgtggcagaagctgaagctaagcagagatgatgccaagcctctgctgagactgaagggattcccttcctttcctctggtcgagagacaggccaacgaagtggactggtgggacatggtgtgtaacgtgaagaagctgatcaacgagaaaaaggaggatggcaaggtgttttggcagaatctggctggctacaagagacaggaagccctgagaccatacctgagcagcgaggaagatcggaagaagggaaagaaattcgctcggtaccagctgggcgacctgctgctgcacctggaaaagaagcacggcgaggactggggaaaggtgtacgacgaggcctgggagcggattgacaagaaagtggaaggcctgagcaagcacatcaagctggaagaggaacggagaagcgaggacgcccagagcaaggccgccctgaccgactggctgcgggctaaggccagcttcgtgatcgagggcctgaaggaggccgacaaggacgagttctgcagatgcgagctgaagctgcagaagtggtacggggacctgcggggaaagcccttcgccatcgaagccgagaacagcatcctggacatcagcggcttcagcaagcagtacaactgtgccttcatctggcagaaggacggcgtgaagaagctgaacctgtacctgatcatcaactacttcaagggcggcaagctgcggttcaagaagatcaaacctgaagccttcgaagccaacagattctacaccgtgatcaacaaaaagagcggcgagatcgtgcccatggaggtgaacttcaacttcgacgaccccaacctgatcatcctgcctctggcctttggcaagagacagggcagagaattcatctggaacgacctgctgtccctggaaaccggcagcctgaagctggccaacggaagagtgatcgagaagacactgtacaacagaagaacccggcaggatgagcctgccctgttcgtggccctgaccttcgagcggcgggaggtcctggactcctccaatatcaaaccaatgaacctgatcggcgtggcaagaggcgaaaacatccccgccgtgatcgccctgaccgaccccgagggctgcccactgagccggtttaaggatagcctgggaaacccaacccacatcctgagaatcggcgagagctataaggagaagcagcggaccatccaggccaagaaggaggtggagcagcggagagccggcggctacagccggaagtacgccagcaaagccaagaatctggcagacgatatggtgagaaacaccgctagagatctgctgtactacgccgtgacccaggatgccatgctgatcttcgccaacctgagccggggcttcggccggcagggcaagcggaccttcatggccgagagacagtacacacggatggaggactggctgaccgccaagctggcctacgagggcctgagcaagacctacctgtccaagacactggcccagtacacctccaagacatgcagcaactgtgggtttaccatcaccagcgccgactacgacagggtgctggagaagctgaagaagacagcaacaggctggatgaccacaattaacggcaaggagctgaaggtggagggccagattacctactacaacagatacaagagacagaacgtagtcaaggacctgtccgtcgagctggatagactgagcgaagaatctgtgaacaacgacatctcctcctggacaaagggcagaagcggagaagctctgagcctcctgaagaaaagattctcccatagacccgtgcaggagaagttcgtgtgcctgaactgcggcttcgagacacacgcagccgagcaagccgccctgaacatcgccagatcctggctgttcctgcggagccaggagtacaagaaataccagacaaacaagacaaccggcaacaccgataagagagccttcgtcgagacctggcagtccttttaccggaagaagcttaaggaggtgtggaaacctgccgtgcggtctggcggatctggcggaggctccatggacctggtgatgttcagggacgtggccgtggacttcagccaggaggagtgggagtgcctgaacagctaccagaggaacctgtacagggacgtgatcctggagaactacagcaacctggtgagcctggccggctgcagcatcagcaagcccgacgtgatcaccctgctggagcagggcaaggagccctggctggtggtgaggaacgagaagaggaggtggagcctggacctggagagcaggggcggcccaagcagcggcgcccctcctcccagcggcggcagcccagccggctccccaacctctaccgaggagggcacctctgagtccgccacccccgagagcggccctggcacctccaccgagcccagcgagggcagcgcacccggcagccctgccggcagccccacctccacagaggagggaaccagcaccgagcccagcgaaggcagcgccccaggcaccagcaccgagcctagtgagcaggagattaaacggatcaacaagatcagaagaagacttgtgaaagacagcaacaccaagaaggccggcaagacaggccccatgaaaaccctgctggttagagtgatgacacccgatctgagagagcggctggaaaacctgagaaagaagcctgaaaatatcccccagcccatcagcaatacatctagagccaacctgaataagctgctgaccgattacaccgaaatgaagaaggcgatcctgcatgtgtactgggaagagttccagaaggaccctgtgggcctgatgagccgggtggcccagcctgccagcaagaagatcgatcagaacaagctgaaacctgagatggacgagaagggcaacctgaccaccgccggctttgcctgctctcagtgtggccagcccctgttcgtgtacaagctggagcaggtgtctgagaagggcaaggcttacaccaactacttcggacggtgcaatgtggccgagcacgaaaagctgatcctgctggcccagctgaagcccgagaaggatagcgacgaagccgtgacatatagcctgggaaagtttgggcagagggccctggatttctacagcattcatgtgaccaaggagtccacccaccccgtgaagcccctggcccagatcgccggaaacagatacgcctccggacctgtgggaaaggccctgagcgacgcatgtatgggcacaatcgcctccttcctgtctaagtaccaggacatcatcatcgaacaccagaaggtggtgaagggcaaccagaagagactggagagcctgcgggagctggccggcaaggaaaacctggaataccctagcgtgaccctgccacctcagcctcacaccaaggagggcgttgatgcctacaacgaagtgatcgcccgggtgcgaatgtgggtgaacctgaacctgtggcagaagctgaagctaagcagagatgatgccaagcctctgctgagactgaagggattcccttcctttcctctggtcgagagacaggccaacgaagtggactggtgggacatggtgtgtaacgtgaagaagctgatcaacgagaaaaaggaggatggcaaggtgttttggcagaatctggctggctacaagagacaggaagccctgagaccatacctgagcagcgaggaagatcggaagaagggaaagaaattcgctcggtaccagctgggcgacctgctgctgcacctggaaaagaagcacggcgaggactggggaaaggtgtacgacgaggcctgggagcggattgacaagaaagtggaaggcctgagcaagcacatcaagctggaagaggaacggagaagcgaggacgcccagagcaaggccgccctgaccgactggctgcgggctaaggccagcttcgtgatcgagggcctgaaggaggccgacaaggacgagttctgcagatgcgagctgaagctgcagaagtggtacggggacctgcggggaaagcccttcgccatcgaagccgagaacagcatcctggacatcagcggcttcagcaagcagtacaactgtgccttcatctggcagaaggacggcgtgaagaagctgaacctgtacctgatcatcaactacttcaagggcggcaagctgcggttcaagaagatcaaacctgaagccttcgaagccaacagattctacaccgtgatcaacaaaaagagcggcgagatcgtgcccatggaggtgaacttcaacttcgacgaccccaacctgatcatcctgcctctggcctttggcaagagacagggcagagaattcatctggaacgacctgctgtccctggaaaccggcagcctgaagctggccaacggaagagtgatcgagaagacactgtacaacagaagaacccggcaggatgagcctgccctgttcgtggccctgaccttcgagcggcgggaggtcctggactcctccaatatcaaaccaatgaacctgatcggcgtggcaagaggcgaaaacatccccgccgtgatcgccctgaccgaccccgagggctgcccactgagccggtttaaggatagcctgggaaacccaacccacatcctgagaatcggcgagagctataaggagaagcagcggaccatccaggccaagaaggaggtggagcagcggagagccggcggctacagccggaagtacgccagcaaagccaagaatctggcagacgatatggtgagaaacaccgctagagatctgctgtactacgccgtgacccaggatgccatgctgatcttcgccaacctgagccggggcttcggccggcagggcaagcggaccttcatggccgagagacagtacacacggatggaggactggctgaccgccaagctggcctacgagggcctgagcaagacctacctgtccaagacactggcccagtacacctccaagacatgcagcaactgtgggtttaccatcaccagcgccgactacgacagggtgctggagaagctgaagaagacagcaacaggctggatgaccacaattaacggcaaggagctgaaggtggagggccagattacctactacaacagatacaagagacagaacgtagtcaaggacctgtccgtcgagctggatagactgagcgaagaatctgtgaacaacgacatctcctcctggacaaagggcagaagcggagaagctctgagcctcctgaagaaaagattctcccatagacccgtgcaggagaagttcgtgtgcctgaactgcggcttcgagacacacgcagccgagcaagccgccctgaacatcgccagatcctggctgttcctgcggagccaggagtacaagaaataccagacaaacaagacaaccggcaacaccgataagagagccttcgtcgagacctggcagtccttttaccggaagaagcttaaggaggtgtggaaacctgccgtgcggtctggcggatctggcggaggctcctatggacctggtgatgttcagggacgtggccgtggacttcagccaggaggagtgggagtgcctgaacagctaccagaggaacctgtacagggacgtgatcctggagaactacagcaacctggtgagcctggccggctgcagcatcagcaagcccgacgtgatcaccctgctggagcagggcaaggagccctggctggtggtgaggaacgagaagaggaggtggagcctggacctggagagcaggggatctggctccggcagcggccccaagaaaaagagaaaagtctaagctgccttctgcggggcttgccttctggccatgcccttcttctctcccttgcacctgtacctcttggtctttgaataaagcctgagtaggaaggctagcaaaaaaaaaaaaaaaaaaaaaaaaaaaaaaaaaaaaaaaaaaaaaaaaaaaaaaaaaaaaaaaaaaaaaaaaaaaaaaaa

SEQ ID NO: 16644 - RNA, 9485 nt, synthetic construct
  source 1..9485: mol_type = other RNA
aggaaataagagagaaaagaagagtaagaagaaatataagagccaccatggcccctaagaagaagcgtaaagtgagccggatggaacgcctcgtctacgaggtgcggcagaagtgcagaaacatcgaggacatctgcatctcctgcggatctctgaacgtgaccctggagcacccactgttcatcggcggcatgtgccagaactgtaaaaactgttttctggagtgtgcctatcaatacgacgatgacggctaccagagctactgcaccatctgttgcggcggaagagaggtgctgatgtgtggaaataacaactgctgccggtgcttctgcgtggaatgcgtggacctgctggtgggccccggcgccgcccaggccgctattaaggaagatccttggaactgctacatgtgcggccacaagggcacatacggcctgctgagacggagagaggactggcctagcagactgcagatgttcttcgccaataaccacgaccaggagttcgacccccctaaggtgtaccctcccgtccccgccgagaagagaaagcccatccgggtcctgagcctgttcgatggcatcgccaccggtctgctggtgctgaaggacctgggcatccaggtggataggtacattgcctccgaggtgtgcgaggactccatcaccgtgggaatggtgcgtcatcagggcaagatcatgtacgtgggcgacgtgcggagcgtgacacagaagcatatccaggagtggggccctttcgacctggtgatcggcggcagcccttgcaatgacctgagcatcgtgaacccagcccggaagggcctgtacgagggaaccggcagactgttcttcgagttttacagactgctgcacgacgcccggcctaaggaaggcgacgaccggcccttcttttggctgttcgagaatgtggtggccatgggagtcagcgacaagcgggatattagccggttcctggagagcaaccccgtgatgatcgatgccaaggaagtgagcgccgcccaccgggccagatacttctggggcaatctgcctggcatgaacagacccctggccagcaccgtgaacgacaagctggagctgcaggagtgcctggagcacggccggatcgccaagttcagcaaggtgagaaccatcaccacccgaagcaacagcatcaaacaaggcaaggaccagcactttcctgtgttcatgaacgagaaggaggacatcctgtggtgtaccgagatggagagagtgttcgggttcccagtccactacacagatgtcagcaacatgtctagactggccagacagagactgctgggaagaagctggtccgtccctgtgatcagacacctgttcgcccctctgaaggagtacttcgcctgcgtgagcagcggcaacagcaacgccaacagccggggccccagcttctctagcggcctggtgccactgtccctgagagggagccacatgggccccatggagatctacaaaaccgtgagcgcctggaagcggcagcctgtgcgcgtgctgagcctgtttcggaatatcgataaagtcctgaaaagcctgggattcctggagagcggctctggctccggcggtggcaccctgaagtacgtggaggatgtgacaaacgtggtcagacgggatgtggagaagtggggccccttcgatctggtgtacggcagcacccaacccctgggcagctcttgtgaccggtgccctggctggtacatgtttcagttccaccggatcctgcagtacgccctgccgagacaggagtcccagcggccattcttttggattttcatggacaacttgctgctgaccgaggatgaccaggaaactaccactcggttcctgcagaccgaagccgtgaccctgcaggacgtgagaggccgggactaccagaacgccatgcgggtgtggtccaacatccctggactgaaaagcaagcacgcacctctgacccctaaagaagaggagtacctgcaggcccaggtgcggagcagaagcaagctggacgcccctaaggtggatctgctggtgaagaattgcctcctgcccctgagagagtacttcaagtatttcagccagaatagtctgcccctgggaggcagcggcggcggcgccctggtgacatttgaggacgtcgccgtgcggttcacccaggaggaatgggctctgctggatccttctcagaaaatcctgtaccgggacgtgatgagagagacataccggaatctgacctccgtgggcatcaactgggaatgttgggaccttgaagcctgcttcagaagcctgggaagaaacctgagagtgcaggtggtgaagagaaagtgcgagctgaccaacagcggcccctgcgccgagggcggcccaagcagcggcgcccctcctcccagcggcggcagcccagccggctccccaacctctaccgaggagggcacctctgagtccgccacccccgagagcggccctggcacctccaccgagcccagcgagggcagcgcacccggcagccctgccggcagccccacctccacagaggagggaaccagcaccgagcccagcgaaggcagcgccccaggcaccagcaccgagcctagtgagcaggagattaaacggatcaacaagatcagaagaagacttgtgaaagacagcaacaccaagaaggccggcaagacaggccccatgaaaaccctgctggttagagtgatgacacccgatctgagagagcggctggaaaacctgagaaagaagcctgaaaatatcccccagcccatcagcaatacatctagagccaacctgaataagctgctgaccgattacaccgaaatgaagaaggcgatcctgcatgtgtactgggaagagttccagaaggaccctgtgggcctgatgagccgggtggcccagcctgccagcaagaagatcgatcagaacaagctgaaacctgagatggacgagaagggcaacctgaccaccgccggctttgcctgctctcagtgtggccagcccctgttcgtgtacaagctggagcaggtgtctgagaagggcaaggcttacaccaactacttcggacggtgcaatgtggccgagcacgaaaagctgatcctgctggcccagctgaagcccgagaaggatagcgacgaagccgtgacatatagcctgggaaagtttgggcagagggccctggatttctacagcattcatgtgaccaaggagtccacccaccccgtgaagcccctggcccagatcgccggaaacagatacgcctccggacctgtgggaaaggccctgagcgacgcatgtatgggcacaatcgcctccttcctgtctaagtaccaggacatcatcatcgaacaccagaaggtggtgaagggcaaccagaagagactggagagcctgcgggagctggccggcaaggaaaacctggaataccctagcgtgaccctgccacctcagcctcacaccaaggagggcgttgatgcctacaacgaagtgatcgcccgggtgcgaatgtgggtgaacctgaacctgtggcagaagctgaagctaagcagagatgatgccaagcctctgctgagactgaagggattcccttcctttcctctggtcgagagacaggccaacgaagtggactggtgggacatggtgtgtaacgtgaagaagctgatcaacgagaaaaaggaggatggcaaggtgttttggcagaatctggctggctacaagagacaggaagccctgagaccatacctgagcagcgaggaagatcggaagaagggaaagaaattcgctcggtaccagctgggcgacctgctgctgcacctggaaaagaagcacggcgaggactggggaaaggtgtacgacgaggcctgggagcggattgacaagaaagtggaaggcctgagcaagcacatcaagctggaagaggaacggagaagcgaggacgcccagagcaaggccgccctgaccgactggctgcgggctaaggccagcttcgtgatcgagggcctgaaggaggccgacaaggacgagttctgcagatgcgagctgaagctgcagaagtggtacggggacctgcggggaaagcccttcgccatcgaagccgagaacagcatcctggacatcagcggcttcagcaagcagtacaactgtgccttcatctggcagaaggacggcgtgaagaagctgaacctgtacctgatcatcaactacttcaagggcggcaagctgcggttcaagaagatcaaacctgaagccttcgaagccaacagattctacaccgtgatcaacaaaaagagcggcgagatcgtgcccatggaggtgaacttcaacttcgacgaccccaacctgatcatcctgcctctggcctttggcaagagacagggcagagaattcatctggaacgacctgctgtccctggaaaccggcagcctgaagctggccaacggaagagtgatcgagaagacactgtacaacagaagaacccggcaggatgagcctgccctgttcgtggccctgaccttcgagcggcgggaggtcctggactcctccaatatcaaaccaatgaacctgatcggcgtggcaagaggcgaaaacatccccgccgtgatcgccctgaccgaccccgagggctgcccactgagccggtttaaggatagcctgggaaacccaacccacatcctgagaatcggcgagagctataaggagaagcagcggaccatccaggccaagaaggaggtggagcagcggagagccggcggctacagccggaagtacgccagcaaagccaagaatctggcagacgatatggtgagaaacaccgctagagatctgctgtactacgccgtgacccaggatgccatgctgatcttcgccaacctgagccggggcttcggccggcagggcaagcggaccttcatggccgagagacagtacacacggatggaggactggctgaccgccaagctggcctacgagggcctgagcaagacctacctgtccaagacactggcccagtacacctccaagacatgcagcaactgtgggtttaccatcaccagcgccgactacgacagggtgctggagaagctgaagaagacagcaacaggctggatgaccacaattaacggcaaggagctgaaggtggagggccagattacctactacaacagatacaagagacagaacgtagtcaaggacctgtccgtcgagctggatagactgagcgaagaatctgtgaacaacgacatctcctcctggacaaagggcagaagcggagaagctctgagcctcctgaagaaaagattctcccatagacccgtgcaggagaagttcgtgtgcctgaactgcggcttcgagacacacgcagccgagcaagccgccctgaacatcgccagatcctggctgttcctgcggagccaggagtacaagaaataccagacaaacaagacaaccggcaacaccgataagagagccttcgtcgagacctggcagtccttttaccggaagaagcttaaggaggtgtggaaacctgccgtgcggtctggcggatctggcggaggctccagcgtgaccttcgaggacgtggccgtgaacttcagcctggaggagtggaacctgctgaacgaggcccagaggtgcctgtacagggacgtgatgctggagaccctgaccctgatcagcagcctgggcgcccccccccacaccctgttccccgccagggcctgcggccccgaggccccccccagcaggcactgccccaggcccagcctgtgcctgagcctgagccccctgcaccccaccggcgtgggcggcccaagcagcggcgcccctcctcccagcggcggcagcccagccggctccccaacctctaccgaggagggcacctctgagtccgccacccccgagagcggccctggcacctccaccgagcccagcgagggcagcgcacccggcagccctgccggcagccccacctccacagaggagggaaccagcaccgagcccagcgaaggcagcgccccaggcaccagcaccgagcctagtgagcaggagattaaacggatcaacaagatcagaagaagacttgtgaaagacagcaacaccaagaaggccggcaagacaggccccatgaaaaccctgctggttagagtgatgacacccgatctgagagagcggctggaaaacctgagaaagaagcctgaaaatatcccccagcccatcagcaatacatctagagccaacctgaataagctgctgaccgattacaccgaaatgaagaaggcgatcctgcatgtgtactgggaagagttccagaaggaccctgtgggcctgatgagccgggtggcccagcctgccagcaagaagatcgatcagaacaagctgaaacctgagatggacgagaagggcaacctgaccaccgccggctttgcctgctctcagtgtggccagcccctgttcgtgtacaagctggagcaggtgtctgagaagggcaaggcttacaccaactacttcggacggtgcaatgtggccgagcacgaaaagctgatcctgctggcccagctgaagcccgagaaggatagcgacgaagccgtgacatatagcctgggaaagtttgggcagagggccctggatttctacagcattcatgtgaccaaggagtccacccaccccgtgaagcccctggcccagatcgccggaaacagatacgcctccggacctgtgggaaaggccctgagcgacgcatgtatgggcacaatcgcctccttcctgtctaagtaccaggacatcatcatcgaacaccagaaggtggtgaagggcaaccagaagagactggagagcctgcgggagctggccggcaaggaaaacctggaataccctagcgtgaccctgccacctcagcctcacaccaaggagggcgttgatgcctacaacgaagtgatcgcccgggtgcgaatgtgggtgaacctgaacctgtggcagaagctgaagctaagcagagatgatgccaagcctctgctgagactgaagggattcccttcctttcctctggtcgagagacaggccaacgaagtggactggtgggacatggtgtgtaacgtgaagaagctgatcaacgagaaaaaggaggatggcaaggtgttttggcagaatctggctggctacaagagacaggaagccctgagaccatacctgagcagcgaggaagatcggaagaagggaaagaaattcgctcggtaccagctgggcgacctgctgctgcacctggaaaagaagcacggcgaggactggggaaaggtgtacgacgaggcctgggagcggattgacaagaaagtggaaggcctgagcaagcacatcaagctggaagaggaacggagaagcgaggacgcccagagcaaggccgccctgaccgactggctgcgggctaaggccagcttcgtgatcgagggcctgaaggaggccgacaaggacgagttctgcagatgcgagctgaagctgcagaagtggtacggggacctgcggggaaagcccttcgccatcgaagccgagaacagcatcctggacatcagcggcttcagcaagcagtacaactgtgccttcatctggcagaaggacggcgtgaagaagctgaacctgtacctgatcatcaactacttcaagggcggcaagctgcggttcaagaagatcaaacctgaagccttcgaagccaacagattctacaccgtgatcaacaaaaagagcggcgagatcgtgcccatggaggtgaacttcaacttcgacgaccccaacctgatcatcctgcctctggcctttggcaagagacagggcagagaattcatctggaacgacctgctgtccctggaaaccggcagcctgaagctggccaacggaagagtgatcgagaagacactgtacaacagaagaacccggcaggatgagcctgccctgttcgtggccctgaccttcgagcggcgggaggtcctggactcctccaatatcaaaccaatgaacctgatcggcgtggcaagaggcgaaaacatccccgccgtgatcgccctgaccgaccccgagggctgcccactgagccggtttaaggatagcctgggaaacccaacccacatcctgagaatcggcgagagctataaggagaagcagcggaccatccaggccaagaaggaggtggagcagcggagagccggcggctacagccggaagtacgccagcaaagccaagaatctggcagacgatatggtgagaaacaccgctagagatctgctgtactacgccgtgacccaggatgccatgctgatcttcgccaacctgagccggggcttcggccggcagggcaagcggaccttcatggccgagagacagtacacacggatggaggactggctgaccgccaagctggcctacgagggcctgagcaagacctacctgtccaagacactggcccagtacacctccaagacatgcagcaactgtgggtttaccatcaccagcgccgactacgacagggtgctggagaagctgaagaagacagcaacaggctggatgaccacaattaacggcaaggagctgaaggtggagggccagattacctactacaacagatacaagagacagaacgtagtcaaggacctgtccgtcgagctggatagactgagcgaagaatctgtgaacaacgacatctcctcctggacaaagggcagaagcggagaagctctgagcctcctgaagaaaagattctcccatagacccgtgcaggagaagttcgtgtgcctgaactgcggcttcgagacacacgcagccgagcaagccgccctgaacatcgccagatcctggctgttcctgcggagccaggagtacaagaaataccagacaaacaagacaaccggcaacaccgataagagagccttcgtcgagacctggcagtccttttaccggaagaagcttaaggaggtgtggaaacctgccgtgcggtctggcggatctggcggaggctcctagcgtgaccttcgaggacgtggccgtgaacttcagcctggaggagtggaacctgctgaacgaggcccagaggtgcctgtacagggacgtgatgctggagaccctgaccctgatcagcagcctgggcgcccccccccacaccctgttccccgccagggcctgcggccccgaggccccccccagcaggcactgccccaggcccagcctgtgcctgagcctgagccccctgcaccccaccggcgtgggatctggctccggcagcggccccaagaaaaagagaaaagtctaagctgccttctgcggggcttgccttctggccatgcccttcttctctcccttgcacctgtacctcttggtctttgaataaagcctgagtaggaaggctagcaaaaaaaaaaaaaaaaaaaaaaaaaaaaaaaaaaaaaaaaaaaaaaaaaaaaaaaaaaaaaaaaaaaaaaaaaaaaaaaa

SEQ ID NO: 16645 - RNA, 9485 nt, synthetic construct
  source 1..9485: mol_type = other RNA
aggaaataagagagaaaagaagagtaagaagaaatataagagccaccatggcccctaagaagaagcgtaaagtgagccggatggaacgcctcgtctacgaggtgcggcagaagtgcagaaacatcgaggacatctgcatctcctgcggatctctgaacgtgaccctggagcacccactgttcatcggcggcatgtgccagaactgtaaaaactgttttctggagtgtgcctatcaatacgacgatgacggctaccagagctactgcaccatctgttgcggcggaagagaggtgctgatgtgtggaaataacaactgctgccggtgcttctgcgtggaatgcgtggacctgctggtgggccccggcgccgcccaggccgctattaaggaagatccttggaactgctacatgtgcggccacaagggcacatacggcctgctgagacggagagaggactggcctagcagactgcagatgttcttcgccaataaccacgaccaggagttcgacccccctaaggtgtaccctcccgtccccgccgagaagagaaagcccatccgggtcctgagcctgttcgatggcatcgccaccggtctgctggtgctgaaggacctgggcatccaggtggataggtacattgcctccgaggtgtgcgaggactccatcaccgtgggaatggtgcgtcatcagggcaagatcatgtacgtgggcgacgtgcggagcgtgacacagaagcatatccaggagtggggccctttcgacctggtgatcggcggcagcccttgcaatgacctgagcatcgtgaacccagcccggaagggcctgtacgagggaaccggcagactgttcttcgagttttacagactgctgcacgacgcccggcctaaggaaggcgacgaccggcccttcttttggctgttcgagaatgtggtggccatgggagtcagcgacaagcgggatattagccggttcctggagagcaaccccgtgatgatcgatgccaaggaagtgagcgccgcccaccgggccagatacttctggggcaatctgcctggcatgaacagacccctggccagcaccgtgaacgacaagctggagctgcaggagtgcctggagcacggccggatcgccaagttcagcaaggtgagaaccatcaccacccgaagcaacagcatcaaacaaggcaaggaccagcactttcctgtgttcatgaacgagaaggaggacatcctgtggtgtaccgagatggagagagtgttcgggttcccagtccactacacagatgtcagcaacatgtctagactggccagacagagactgctgggaagaagctggtccgtccctgtgatcagacacctgttcgcccctctgaaggagtacttcgcctgcgtgagcagcggcaacagcaacgccaacagccggggccccagcttctctagcggcctggtgccactgtccctgagagggagccacatgggccccatggagatctacaaaaccgtgagcgcctggaagcggcagcctgtgcgcgtgctgagcctgtttcggaatatcgataaagtcctgaaaagcctgggattcctggagagcggctctggctccggcggtggcaccctgaagtacgtggaggatgtgacaaacgtggtcagacgggatgtggagaagtggggccccttcgatctggtgtacggcagcacccaacccctgggcagctcttgtgaccggtgccctggctggtacatgtttcagttccaccggatcctgcagtacgccctgccgagacaggagtcccagcggccattcttttggattttcatggacaacttgctgctgaccgaggatgaccaggaaactaccactcggttcctgcagaccgaagccgtgaccctgcaggacgtgagaggccgggactaccagaacgccatgcgggtgtggtccaacatccctggactgaaaagcaagcacgcacctctgacccctaaagaagaggagtacctgcaggcccaggtgcggagcagaagcaagctggacgcccctaaggtggatctgctggtgaagaattgcctcctgcccctgagagagtacttcaagtatttcagccagaatagtctgcccctgggaggcagcggcggcggcgccctggtgacatttgaggacgtcgccgtgcggttcacccaggaggaatgggctctgctggatccttctcagaaaatcctgtaccgggacgtgatgagagagacataccggaatctgacctccgtgggcatcaactgggaatgttgggaccttgaagcctgcttcagaagcctgggaagaaacctgagagtgcaggtggtgaagagaaagtgcgagctgaccaacagcggcccctgcgccgagggcggcccaagcagcggcgcccctcctcccagcggcggcagcccagccggctccccaacctctaccgaggagggcacctctgagtccgccacccccgagagcggccctggcacctccaccgagcccagcgagggcagcgcacccggcagccctgccggcagccccacctccacagaggagggaaccagcaccgagcccagcgaaggcagcgccccaggcaccagcaccgagcctagtgagcaggagattaaacggatcaacaagatcagaagaagacttgtgaaagacagcaacaccaagaaggccggcaagacaggccccatgaaaaccctgctggttagagtgatgacacccgatctgagagagcggctggaaaacctgagaaagaagcctgaaaatatcccccagcccatcagcaatacatctagagccaacctgaataagctgctgaccgattacaccgaaatgaagaaggcgatcctgcatgtgtactgggaagagttccagaaggaccctgtgggcctgatgagccgggtggcccagcctgccagcaagaagatcgatcagaacaagctgaaacctgagatggacgagaagggcaacctgaccaccgccggctttgcctgctctcagtgtggccagcccctgttcgtgtacaagctggagcaggtgtctgagaagggcaaggcttacaccaactacttcggacggtgcaatgtggccgagcacgaaaagctgatcctgctggcccagctgaagcccgagaaggatagcgacgaagccgtgacatatagcctgggaaagtttgggcagagggccctggatttctacagcattcatgtgaccaaggagtccacccaccccgtgaagcccctggcccagatcgccggaaacagatacgcctccggacctgtgggaaaggccctgagcgacgcatgtatgggcacaatcgcctccttcctgtctaagtaccaggacatcatcatcgaacaccagaaggtggtgaagggcaaccagaagagactggagagcctgcgggagctggccggcaaggaaaacctggaataccctagcgtgaccctgccacctcagcctcacaccaaggagggcgttgatgcctacaacgaagtgatcgcccgggtgcgaatgtgggtgaacctgaacctgtggcagaagctgaagctaagcagagatgatgccaagcctctgctgagactgaagggattcccttcctttcctctggtcgagagacaggccaacgaagtggactggtgggacatggtgtgtaacgtgaagaagctgatcaacgagaaaaaggaggatggcaaggtgttttggcagaatctggctggctacaagagacaggaagccctgagaccatacctgagcagcgaggaagatcggaagaagggaaagaaattcgctcggtaccagctgggcgacctgctgctgcacctggaaaagaagcacggcgaggactggggaaaggtgtacgacgaggcctgggagcggattgacaagaaagtggaaggcctgagcaagcacatcaagctggaagaggaacggagaagcgaggacgcccagagcaaggccgccctgaccgactggctgcgggctaaggccagcttcgtgatcgagggcctgaaggaggccgacaaggacgagttctgcagatgcgagctgaagctgcagaagtggtacggggacctgcggggaaagcccttcgccatcgaagccgagaacagcatcctggacatcagcggcttcagcaagcagtacaactgtgccttcatctggcagaaggacggcgtgaagaagctgaacctgtacctgatcatcaactacttcaagggcggcaagctgcggttcaagaagatcaaacctgaagccttcgaagccaacagattctacaccgtgatcaacaaaaagagcggcgagatcgtgcccatggaggtgaacttcaacttcgacgaccccaacctgatcatcctgcctctggcctttggcaagagacagggcagagaattcatctggaacgacctgctgtccctggaaaccggcagcctgaagctggccaacggaagagtgatcgagaagacactgtacaacagaagaacccggcaggatgagcctgccctgttcgtggccctgaccttcgagcggcgggaggtcctggactcctccaatatcaaaccaatgaacctgatcggcgtggcaagaggcgaaaacatccccgccgtgatcgccctgaccgaccccgagggctgcccactgagccggtttaaggatagcctgggaaacccaacccacatcctgagaatcggcgagagctataaggagaagcagcggaccatccaggccaagaaggaggtggagcagcggagagccggcggctacagccggaagtacgccagcaaagccaagaatctggcagacgatatggtgagaaacaccgctagagatctgctgtactacgccgtgacccaggatgccatgctgatcttcgccaacctgagccggggcttcggccggcagggcaagcggaccttcatggccgagagacagtacacacggatggaggactggctgaccgccaagctggcctacgagggcctgagcaagacctacctgtccaagacactggcccagtacacctccaagacatgcagcaactgtgggtttaccatcaccagcgccgactacgacagggtgctggagaagctgaagaagacagcaacaggctggatgaccacaattaacggcaaggagctgaaggtggagggccagattacctactacaacagatacaagagacagaacgtagtcaaggacctgtccgtcgagctggatagactgagcgaagaatctgtgaacaacgacatctcctcctggacaaagggcagaagcggagaagctctgagcctcctgaagaaaagattctcccatagacccgtgcaggagaagttcgtgtgcctgaactgcggcttcgagacacacgcagccgagcaagccgccctgaacatcgccagatcctggctgttcctgcggagccaggagtacaagaaataccagacaaacaagacaaccggcaacaccgataagagagccttcgtcgagacctggcagtccttttaccggaagaagcttaaggaggtgtggaaacctgccgtgcggtctggcggatctggcggaggctcctgcagcaaggagcccctgtgcctgcaggagcccgtgagcttcgccgacgtggccgtgtacttcagcagggaggagtgggccctgctggaccccgcccagagggccctgtactgggacgtgatgctggagacctacgagtgcatcgccagcctgggcggcgaggacccctggatccccgacgtgcacggcctgaaggacatggccggcgacacctgccccggcgacggcatcgccgacctgaagggcggcccaagcagcggcgcccctcctcccagcggcggcagcccagccggctccccaacctctaccgaggagggcacctctgagtccgccacccccgagagcggccctggcacctccaccgagcccagcgagggcagcgcacccggcagccctgccggcagccccacctccacagaggagggaaccagcaccgagcccagcgaaggcagcgccccaggcaccagcaccgagcctagtgagcaggagattaaacggatcaacaagatcagaagaagacttgtgaaagacagcaacaccaagaaggccggcaagacaggccccatgaaaaccctgctggttagagtgatgacacccgatctgagagagcggctggaaaacctgagaaagaagcctgaaaatatcccccagcccatcagcaatacatctagagccaacctgaataagctgctgaccgattacaccgaaatgaagaaggcgatcctgcatgtgtactgggaagagttccagaaggaccctgtgggcctgatgagccgggtggcccagcctgccagcaagaagatcgatcagaacaagctgaaacctgagatggacgagaagggcaacctgaccaccgccggctttgcctgctctcagtgtggccagcccctgttcgtgtacaagctggagcaggtgtctgagaagggcaaggcttacaccaactacttcggacggtgcaatgtggccgagcacgaaaagctgatcctgctggcccagctgaagcccgagaaggatagcgacgaagccgtgacatatagcctgggaaagtttgggcagagggccctggatttctacagcattcatgtgaccaaggagtccacccaccccgtgaagcccctggcccagatcgccggaaacagatacgcctccggacctgtgggaaaggccctgagcgacgcatgtatgggcacaatcgcctccttcctgtctaagtaccaggacatcatcatcgaacaccagaaggtggtgaagggcaaccagaagagactggagagcctgcgggagctggccggcaaggaaaacctggaataccctagcgtgaccctgccacctcagcctcacaccaaggagggcgttgatgcctacaacgaagtgatcgcccgggtgcgaatgtgggtgaacctgaacctgtggcagaagctgaagctaagcagagatgatgccaagcctctgctgagactgaagggattcccttcctttcctctggtcgagagacaggccaacgaagtggactggtgggacatggtgtgtaacgtgaagaagctgatcaacgagaaaaaggaggatggcaaggtgttttggcagaatctggctggctacaagagacaggaagccctgagaccatacctgagcagcgaggaagatcggaagaagggaaagaaattcgctcggtaccagctgggcgacctgctgctgcacctggaaaagaagcacggcgaggactggggaaaggtgtacgacgaggcctgggagcggattgacaagaaagtggaaggcctgagcaagcacatcaagctggaagaggaacggagaagcgaggacgcccagagcaaggccgccctgaccgactggctgcgggctaaggccagcttcgtgatcgagggcctgaaggaggccgacaaggacgagttctgcagatgcgagctgaagctgcagaagtggtacggggacctgcggggaaagcccttcgccatcgaagccgagaacagcatcctggacatcagcggcttcagcaagcagtacaactgtgccttcatctggcagaaggacggcgtgaagaagctgaacctgtacctgatcatcaactacttcaagggcggcaagctgcggttcaagaagatcaaacctgaagccttcgaagccaacagattctacaccgtgatcaacaaaaagagcggcgagatcgtgcccatggaggtgaacttcaacttcgacgaccccaacctgatcatcctgcctctggcctttggcaagagacagggcagagaattcatctggaacgacctgctgtccctggaaaccggcagcctgaagctggccaacggaagagtgatcgagaagacactgtacaacagaagaacccggcaggatgagcctgccctgttcgtggccctgaccttcgagcggcgggaggtcctggactcctccaatatcaaaccaatgaacctgatcggcgtggcaagaggcgaaaacatccccgccgtgatcgccctgaccgaccccgagggctgcccactgagccggtttaaggatagcctgggaaacccaacccacatcctgagaatcggcgagagctataaggagaagcagcggaccatccaggccaagaaggaggtggagcagcggagagccggcggctacagccggaagtacgccagcaaagccaagaatctggcagacgatatggtgagaaacaccgctagagatctgctgtactacgccgtgacccaggatgccatgctgatcttcgccaacctgagccggggcttcggccggcagggcaagcggaccttcatggccgagagacagtacacacggatggaggactggctgaccgccaagctggcctacgagggcctgagcaagacctacctgtccaagacactggcccagtacacctccaagacatgcagcaactgtgggtttaccatcaccagcgccgactacgacagggtgctggagaagctgaagaagacagcaacaggctggatgaccacaattaacggcaaggagctgaaggtggagggccagattacctactacaacagatacaagagacagaacgtagtcaaggacctgtccgtcgagctggatagactgagcgaagaatctgtgaacaacgacatctcctcctggacaaagggcagaagcggagaagctctgagcctcctgaagaaaagattctcccatagacccgtgcaggagaagttcgtgtgcctgaactgcggcttcgagacacacgcagccgagcaagccgccctgaacatcgccagatcctggctgttcctgcggagccaggagtacaagaaataccagacaaacaagacaaccggcaacaccgataagagagccttcgtcgagacctggcagtccttttaccggaagaagcttaaggaggtgtggaaacctgccgtgcggtctggcggatctggcggaggctccttgcagcaaggagcccctgtgcctgcaggagcccgtgagcttcgccgacgtggccgtgtacttcagcagggaggagtgggccctgctggaccccgcccagagggccctgtactgggacgtgatgctggagacctacgagtgcatcgccagcctgggcggcgaggacccctggatccccgacgtgcacggcctgaaggacatggccggcgacacctgccccggcgacggcatcgccgacctgaagggatctggctccggcagcggccccaagaaaaagagaaaagtctaagctgccttctgcggggcttgccttctggccatgcccttcttctctcccttgcacctgtacctcttggtctttgaataaagcctgagtaggaaggctagcaaaaaaaaaaaaaaaaaaaaaaaaaaaaaaaaaaaaaaaaaaaaaaaaaaaaaaaaaaaaaaaaaaaaaaaaaaaaaaaa

SEQ ID NO: 16646 - RNA, 9485 nt, synthetic construct
  source 1..9485: mol_type = other RNA
aggaaataagagagaaaagaagagtaagaagaaatataagagccaccatggcccctaagaagaagcgtaaagtgagccggatggaacgcctcgtctacgaggtgcggcagaagtgcagaaacatcgaggacatctgcatctcctgcggatctctgaacgtgaccctggagcacccactgttcatcggcggcatgtgccagaactgtaaaaactgttttctggagtgtgcctatcaatacgacgatgacggctaccagagctactgcaccatctgttgcggcggaagagaggtgctgatgtgtggaaataacaactgctgccggtgcttctgcgtggaatgcgtggacctgctggtgggccccggcgccgcccaggccgctattaaggaagatccttggaactgctacatgtgcggccacaagggcacatacggcctgctgagacggagagaggactggcctagcagactgcagatgttcttcgccaataaccacgaccaggagttcgacccccctaaggtgtaccctcccgtccccgccgagaagagaaagcccatccgggtcctgagcctgttcgatggcatcgccaccggtctgctggtgctgaaggacctgggcatccaggtggataggtacattgcctccgaggtgtgcgaggactccatcaccgtgggaatggtgcgtcatcagggcaagatcatgtacgtgggcgacgtgcggagcgtgacacagaagcatatccaggagtggggccctttcgacctggtgatcggcggcagcccttgcaatgacctgagcatcgtgaacccagcccggaagggcctgtacgagggaaccggcagactgttcttcgagttttacagactgctgcacgacgcccggcctaaggaaggcgacgaccggcccttcttttggctgttcgagaatgtggtggccatgggagtcagcgacaagcgggatattagccggttcctggagagcaaccccgtgatgatcgatgccaaggaagtgagcgccgcccaccgggccagatacttctggggcaatctgcctggcatgaacagacccctggccagcaccgtgaacgacaagctggagctgcaggagtgcctggagcacggccggatcgccaagttcagcaaggtgagaaccatcaccacccgaagcaacagcatcaaacaaggcaaggaccagcactttcctgtgttcatgaacgagaaggaggacatcctgtggtgtaccgagatggagagagtgttcgggttcccagtccactacacagatgtcagcaacatgtctagactggccagacagagactgctgggaagaagctggtccgtccctgtgatcagacacctgttcgcccctctgaaggagtacttcgcctgcgtgagcagcggcaacagcaacgccaacagccggggccccagcttctctagcggcctggtgccactgtccctgagagggagccacatgggccccatggagatctacaaaaccgtgagcgcctggaagcggcagcctgtgcgcgtgctgagcctgtttcggaatatcgataaagtcctgaaaagcctgggattcctggagagcggctctggctccggcggtggcaccctgaagtacgtggaggatgtgacaaacgtggtcagacgggatgtggagaagtggggccccttcgatctggtgtacggcagcacccaacccctgggcagctcttgtgaccggtgccctggctggtacatgtttcagttccaccggatcctgcagtacgccctgccgagacaggagtcccagcggccattcttttggattttcatggacaacttgctgctgaccgaggatgaccaggaaactaccactcggttcctgcagaccgaagccgtgaccctgcaggacgtgagaggccgggactaccagaacgccatgcgggtgtggtccaacatccctggactgaaaagcaagcacgcacctctgacccctaaagaagaggagtacctgcaggcccaggtgcggagcagaagcaagctggacgcccctaaggtggatctgctggtgaagaattgcctcctgcccctgagagagtacttcaagtatttcagccagaatagtctgcccctgggaggcagcggcggcggcgccctggtgacatttgaggacgtcgccgtgcggttcacccaggaggaatgggctctgctggatccttctcagaaaatcctgtaccgggacgtgatgagagagacataccggaatctgacctccgtgggcatcaactgggaatgttgggaccttgaagcctgcttcagaagcctgggaagaaacctgagagtgcaggtggtgaagagaaagtgcgagctgaccaacagcggcccctgcgccgagggcggcccaagcagcggcgcccctcctcccagcggcggcagcccagccggctccccaacctctaccgaggagggcacctctgagtccgccacccccgagagcggccctggcacctccaccgagcccagcgagggcagcgcacccggcagccctgccggcagccccacctccacagaggagggaaccagcaccgagcccagcgaaggcagcgccccaggcaccagcaccgagcctagtgagcaggagattaaacggatcaacaagatcagaagaagacttgtgaaagacagcaacaccaagaaggccggcaagacaggccccatgaaaaccctgctggttagagtgatgacacccgatctgagagagcggctggaaaacctgagaaagaagcctgaaaatatcccccagcccatcagcaatacatctagagccaacctgaataagctgctgaccgattacaccgaaatgaagaaggcgatcctgcatgtgtactgggaagagttccagaaggaccctgtgggcctgatgagccgggtggcccagcctgccagcaagaagatcgatcagaacaagctgaaacctgagatggacgagaagggcaacctgaccaccgccggctttgcctgctctcagtgtggccagcccctgttcgtgtacaagctggagcaggtgtctgagaagggcaaggcttacaccaactacttcggacggtgcaatgtggccgagcacgaaaagctgatcctgctggcccagctgaagcccgagaaggatagcgacgaagccgtgacatatagcctgggaaagtttgggcagagggccctggatttctacagcattcatgtgaccaaggagtccacccaccccgtgaagcccctggcccagatcgccggaaacagatacgcctccggacctgtgggaaaggccctgagcgacgcatgtatgggcacaatcgcctccttcctgtctaagtaccaggacatcatcatcgaacaccagaaggtggtgaagggcaaccagaagagactggagagcctgcgggagctggccggcaaggaaaacctggaataccctagcgtgaccctgccacctcagcctcacaccaaggagggcgttgatgcctacaacgaagtgatcgcccgggtgcgaatgtgggtgaacctgaacctgtggcagaagctgaagctaagcagagatgatgccaagcctctgctgagactgaagggattcccttcctttcctctggtcgagagacaggccaacgaagtggactggtgggacatggtgtgtaacgtgaagaagctgatcaacgagaaaaaggaggatggcaaggtgttttggcagaatctggctggctacaagagacaggaagccctgagaccatacctgagcagcgaggaagatcggaagaagggaaagaaattcgctcggtaccagctgggcgacctgctgctgcacctggaaaagaagcacggcgaggactggggaaaggtgtacgacgaggcctgggagcggattgacaagaaagtggaaggcctgagcaagcacatcaagctggaagaggaacggagaagcgaggacgcccagagcaaggccgccctgaccgactggctgcgggctaaggccagcttcgtgatcgagggcctgaaggaggccgacaaggacgagttctgcagatgcgagctgaagctgcagaagtggtacggggacctgcggggaaagcccttcgccatcgaagccgagaacagcatcctggacatcagcggcttcagcaagcagtacaactgtgccttcatctggcagaaggacggcgtgaagaagctgaacctgtacctgatcatcaactacttcaagggcggcaagctgcggttcaagaagatcaaacctgaagccttcgaagccaacagattctacaccgtgatcaacaaaaagagcggcgagatcgtgcccatggaggtgaacttcaacttcgacgaccccaacctgatcatcctgcctctggcctttggcaagagacagggcagagaattcatctggaacgacctgctgtccctggaaaccggcagcctgaagctggccaacggaagagtgatcgagaagacactgtacaacagaagaacccggcaggatgagcctgccctgttcgtggccctgaccttcgagcggcgggaggtcctggactcctccaatatcaaaccaatgaacctgatcggcgtggcaagaggcgaaaacatccccgccgtgatcgccctgaccgaccccgagggctgcccactgagccggtttaaggatagcctgggaaacccaacccacatcctgagaatcggcgagagctataaggagaagcagcggaccatccaggccaagaaggaggtggagcagcggagagccggcggctacagccggaagtacgccagcaaagccaagaatctggcagacgatatggtgagaaacaccgctagagatctgctgtactacgccgtgacccaggatgccatgctgatcttcgccaacctgagccggggcttcggccggcagggcaagcggaccttcatggccgagagacagtacacacggatggaggactggctgaccgccaagctggcctacgagggcctgagcaagacctacctgtccaagacactggcccagtacacctccaagacatgcagcaactgtgggtttaccatcaccagcgccgactacgacagggtgctggagaagctgaagaagacagcaacaggctggatgaccacaattaacggcaaggagctgaaggtggagggccagattacctactacaacagatacaagagacagaacgtagtcaaggacctgtccgtcgagctggatagactgagcgaagaatctgtgaacaacgacatctcctcctggacaaagggcagaagcggagaagctctgagcctcctgaagaaaagattctcccatagacccgtgcaggagaagttcgtgtgcctgaactgcggcttcgagacacacgcagccgagcaagccgccctgaacatcgccagatcctggctgttcctgcggagccaggagtacaagaaataccagacaaacaagacaaccggcaacaccgataagagagccttcgtcgagacctggcagtccttttaccggaagaagcttaaggaggtgtggaaacctgccgtgcggtctggcggatctggcggaggctcctacaggggccccgtgaccttcaaggacatcaccgtggagttcaccagggaggagtggaagctgctggacaccgcccagaggaccctgtacagggaggtgatgcaggagaactacagccacctgatcagcgtgggctactgcgccaacaggcccaacgccatcttcaagctgaagcagggcaaggagccctggatcctggaggtgcagttccccaggcagaagaaccccgaggacctgtgcaacggcggcccaagcagcggcgcccctcctcccagcggcggcagcccagccggctccccaacctctaccgaggagggcacctctgagtccgccacccccgagagcggccctggcacctccaccgagcccagcgagggcagcgcacccggcagccctgccggcagccccacctccacagaggagggaaccagcaccgagcccagcgaaggcagcgccccaggcaccagcaccgagcctagtgagcaggagattaaacggatcaacaagatcagaagaagacttgtgaaagacagcaacaccaagaaggccggcaagacaggccccatgaaaaccctgctggttagagtgatgacacccgatctgagagagcggctggaaaacctgagaaagaagcctgaaaatatcccccagcccatcagcaatacatctagagccaacctgaataagctgctgaccgattacaccgaaatgaagaaggcgatcctgcatgtgtactgggaagagttccagaaggaccctgtgggcctgatgagccgggtggcccagcctgccagcaagaagatcgatcagaacaagctgaaacctgagatggacgagaagggcaacctgaccaccgccggctttgcctgctctcagtgtggccagcccctgttcgtgtacaagctggagcaggtgtctgagaagggcaaggcttacaccaactacttcggacggtgcaatgtggccgagcacgaaaagctgatcctgctggcccagctgaagcccgagaaggatagcgacgaagccgtgacatatagcctgggaaagtttgggcagagggccctggatttctacagcattcatgtgaccaaggagtccacccaccccgtgaagcccctggcccagatcgccggaaacagatacgcctccggacctgtgggaaaggccctgagcgacgcatgtatgggcacaatcgcctccttcctgtctaagtaccaggacatcatcatcgaacaccagaaggtggtgaagggcaaccagaagagactggagagcctgcgggagctggccggcaaggaaaacctggaataccctagcgtgaccctgccacctcagcctcacaccaaggagggcgttgatgcctacaacgaagtgatcgcccgggtgcgaatgtgggtgaacctgaacctgtggcagaagctgaagctaagcagagatgatgccaagcctctgctgagactgaagggattcccttcctttcctctggtcgagagacaggccaacgaagtggactggtgggacatggtgtgtaacgtgaagaagctgatcaacgagaaaaaggaggatggcaaggtgttttggcagaatctggctggctacaagagacaggaagccctgagaccatacctgagcagcgaggaagatcggaagaagggaaagaaattcgctcggtaccagctgggcgacctgctgctgcacctggaaaagaagcacggcgaggactggggaaaggtgtacgacgaggcctgggagcggattgacaagaaagtggaaggcctgagcaagcacatcaagctggaagaggaacggagaagcgaggacgcccagagcaaggccgccctgaccgactggctgcgggctaaggccagcttcgtgatcgagggcctgaaggaggccgacaaggacgagttctgcagatgcgagctgaagctgcagaagtggtacggggacctgcggggaaagcccttcgccatcgaagccgagaacagcatcctggacatcagcggcttcagcaagcagtacaactgtgccttcatctggcagaaggacggcgtgaagaagctgaacctgtacctgatcatcaactacttcaagggcggcaagctgcggttcaagaagatcaaacctgaagccttcgaagccaacagattctacaccgtgatcaacaaaaagagcggcgagatcgtgcccatggaggtgaacttcaacttcgacgaccccaacctgatcatcctgcctctggcctttggcaagagacagggcagagaattcatctggaacgacctgctgtccctggaaaccggcagcctgaagctggccaacggaagagtgatcgagaagacactgtacaacagaagaacccggcaggatgagcctgccctgttcgtggccctgaccttcgagcggcgggaggtcctggactcctccaatatcaaaccaatgaacctgatcggcgtggcaagaggcgaaaacatccccgccgtgatcgccctgaccgaccccgagggctgcccactgagccggtttaaggatagcctgggaaacccaacccacatcctgagaatcggcgagagctataaggagaagcagcggaccatccaggccaagaaggaggtggagcagcggagagccggcggctacagccggaagtacgccagcaaagccaagaatctggcagacgatatggtgagaaacaccgctagagatctgctgtactacgccgtgacccaggatgccatgctgatcttcgccaacctgagccggggcttcggccggcagggcaagcggaccttcatggccgagagacagtacacacggatggaggactggctgaccgccaagctggcctacgagggcctgagcaagacctacctgtccaagacactggcccagtacacctccaagacatgcagcaactgtgggtttaccatcaccagcgccgactacgacagggtgctggagaagctgaagaagacagcaacaggctggatgaccacaattaacggcaaggagctgaaggtggagggccagattacctactacaacagatacaagagacagaacgtagtcaaggacctgtccgtcgagctggatagactgagcgaagaatctgtgaacaacgacatctcctcctggacaaagggcagaagcggagaagctctgagcctcctgaagaaaagattctcccatagacccgtgcaggagaagttcgtgtgcctgaactgcggcttcgagacacacgcagccgagcaagccgccctgaacatcgccagatcctggctgttcctgcggagccaggagtacaagaaataccagacaaacaagacaaccggcaacaccgataagagagccttcgtcgagacctggcagtccttttaccggaagaagcttaaggaggtgtggaaacctgccgtgcggtctggcggatctggcggaggctccttacaggggccccgtgaccttcaaggacatcaccgtggagttcaccagggaggagtggaagctgctggacaccgcccagaggaccctgtacagggaggtgatgcaggagaactacagccacctgatcagcgtgggctactgcgccaacaggcccaacgccatcttcaagctgaagcagggcaaggagccctggatcctggaggtgcagttccccaggcagaagaaccccgaggacctgtgcaacggatctggctccggcagcggccccaagaaaaagagaaaagtctaagctgccttctgcggggcttgccttctggccatgcccttcttctctcccttgcacctgtacctcttggtctttgaataaagcctgagtaggaaggctagcaaaaaaaaaaaaaaaaaaaaaaaaaaaaaaaaaaaaaaaaaaaaaaaaaaaaaaaaaaaaaaaaaaaaaaaaaaaaaaaa

SEQ ID NO: 16647 - RNA, 9485 nt, synthetic construct
  source 1..9485: mol_type = other RNA
aggaaataagagagaaaagaagagtaagaagaaatataagagccaccatggcccctaagaagaagcgtaaagtgagccggatggaacgcctcgtctacgaggtgcggcagaagtgcagaaacatcgaggacatctgcatctcctgcggatctctgaacgtgaccctggagcacccactgttcatcggcggcatgtgccagaactgtaaaaactgttttctggagtgtgcctatcaatacgacgatgacggctaccagagctactgcaccatctgttgcggcggaagagaggtgctgatgtgtggaaataacaactgctgccggtgcttctgcgtggaatgcgtggacctgctggtgggccccggcgccgcccaggccgctattaaggaagatccttggaactgctacatgtgcggccacaagggcacatacggcctgctgagacggagagaggactggcctagcagactgcagatgttcttcgccaataaccacgaccaggagttcgacccccctaaggtgtaccctcccgtccccgccgagaagagaaagcccatccgggtcctgagcctgttcgatggcatcgccaccggtctgctggtgctgaaggacctgggcatccaggtggataggtacattgcctccgaggtgtgcgaggactccatcaccgtgggaatggtgcgtcatcagggcaagatcatgtacgtgggcgacgtgcggagcgtgacacagaagcatatccaggagtggggccctttcgacctggtgatcggcggcagcccttgcaatgacctgagcatcgtgaacccagcccggaagggcctgtacgagggaaccggcagactgttcttcgagttttacagactgctgcacgacgcccggcctaaggaaggcgacgaccggcccttcttttggctgttcgagaatgtggtggccatgggagtcagcgacaagcgggatattagccggttcctggagagcaaccccgtgatgatcgatgccaaggaagtgagcgccgcccaccgggccagatacttctggggcaatctgcctggcatgaacagacccctggccagcaccgtgaacgacaagctggagctgcaggagtgcctggagcacggccggatcgccaagttcagcaaggtgagaaccatcaccacccgaagcaacagcatcaaacaaggcaaggaccagcactttcctgtgttcatgaacgagaaggaggacatcctgtggtgtaccgagatggagagagtgttcgggttcccagtccactacacagatgtcagcaacatgtctagactggccagacagagactgctgggaagaagctggtccgtccctgtgatcagacacctgttcgcccctctgaaggagtacttcgcctgcgtgagcagcggcaacagcaacgccaacagccggggccccagcttctctagcggcctggtgccactgtccctgagagggagccacatgggccccatggagatctacaaaaccgtgagcgcctggaagcggcagcctgtgcgcgtgctgagcctgtttcggaatatcgataaagtcctgaaaagcctgggattcctggagagcggctctggctccggcggtggcaccctgaagtacgtggaggatgtgacaaacgtggtcagacgggatgtggagaagtggggccccttcgatctggtgtacggcagcacccaacccctgggcagctcttgtgaccggtgccctggctggtacatgtttcagttccaccggatcctgcagtacgccctgccgagacaggagtcccagcggccattcttttggattttcatggacaacttgctgctgaccgaggatgaccaggaaactaccactcggttcctgcagaccgaagccgtgaccctgcaggacgtgagaggccgggactaccagaacgccatgcgggtgtggtccaacatccctggactgaaaagcaagcacgcacctctgacccctaaagaagaggagtacctgcaggcccaggtgcggagcagaagcaagctggacgcccctaaggtggatctgctggtgaagaattgcctcctgcccctgagagagtacttcaagtatttcagccagaatagtctgcccctgggaggcagcggcggcggcgccctggtgacatttgaggacgtcgccgtgcggttcacccaggaggaatgggctctgctggatccttctcagaaaatcctgtaccgggacgtgatgagagagacataccggaatctgacctccgtgggcatcaactgggaatgttgggaccttgaagcctgcttcagaagcctgggaagaaacctgagagtgcaggtggtgaagagaaagtgcgagctgaccaacagcggcccctgcgccgagggcggcccaagcagcggcgcccctcctcccagcggcggcagcccagccggctccccaacctctaccgaggagggcacctctgagtccgccacccccgagagcggccctggcacctccaccgagcccagcgagggcagcgcacccggcagccctgccggcagccccacctccacagaggagggaaccagcaccgagcccagcgaaggcagcgccccaggcaccagcaccgagcctagtgagcaggagattaaacggatcaacaagatcagaagaagacttgtgaaagacagcaacaccaagaaggccggcaagacaggccccatgaaaaccctgctggttagagtgatgacacccgatctgagagagcggctggaaaacctgagaaagaagcctgaaaatatcccccagcccatcagcaatacatctagagccaacctgaataagctgctgaccgattacaccgaaatgaagaaggcgatcctgcatgtgtactgggaagagttccagaaggaccctgtgggcctgatgagccgggtggcccagcctgccagcaagaagatcgatcagaacaagctgaaacctgagatggacgagaagggcaacctgaccaccgccggctttgcctgctctcagtgtggccagcccctgttcgtgtacaagctggagcaggtgtctgagaagggcaaggcttacaccaactacttcggacggtgcaatgtggccgagcacgaaaagctgatcctgctggcccagctgaagcccgagaaggatagcgacgaagccgtgacatatagcctgggaaagtttgggcagagggccctggatttctacagcattcatgtgaccaaggagtccacccaccccgtgaagcccctggcccagatcgccggaaacagatacgcctccggacctgtgggaaaggccctgagcgacgcatgtatgggcacaatcgcctccttcctgtctaagtaccaggacatcatcatcgaacaccagaaggtggtgaagggcaaccagaagagactggagagcctgcgggagctggccggcaaggaaaacctggaataccctagcgtgaccctgccacctcagcctcacaccaaggagggcgttgatgcctacaacgaagtgatcgcccgggtgcgaatgtgggtgaacctgaacctgtggcagaagctgaagctaagcagagatgatgccaagcctctgctgagactgaagggattcccttcctttcctctggtcgagagacaggccaacgaagtggactggtgggacatggtgtgtaacgtgaagaagctgatcaacgagaaaaaggaggatggcaaggtgttttggcagaatctggctggctacaagagacaggaagccctgagaccatacctgagcagcgaggaagatcggaagaagggaaagaaattcgctcggtaccagctgggcgacctgctgctgcacctggaaaagaagcacggcgaggactggggaaaggtgtacgacgaggcctgggagcggattgacaagaaagtggaaggcctgagcaagcacatcaagctggaagaggaacggagaagcgaggacgcccagagcaaggccgccctgaccgactggctgcgggctaaggccagcttcgtgatcgagggcctgaaggaggccgacaaggacgagttctgcagatgcgagctgaagctgcagaagtggtacggggacctgcggggaaagcccttcgccatcgaagccgagaacagcatcctggacatcagcggcttcagcaagcagtacaactgtgccttcatctggcagaaggacggcgtgaagaagctgaacctgtacctgatcatcaactacttcaagggcggcaagctgcggttcaagaagatcaaacctgaagccttcgaagccaacagattctacaccgtgatcaacaaaaagagcggcgagatcgtgcccatggaggtgaacttcaacttcgacgaccccaacctgatcatcctgcctctggcctttggcaagagacagggcagagaattcatctggaacgacctgctgtccctggaaaccggcagcctgaagctggccaacggaagagtgatcgagaagacactgtacaacagaagaacccggcaggatgagcctgccctgttcgtggccctgaccttcgagcggcgggaggtcctggactcctccaatatcaaaccaatgaacctgatcggcgtggcaagaggcgaaaacatccccgccgtgatcgccctgaccgaccccgagggctgcccactgagccggtttaaggatagcctgggaaacccaacccacatcctgagaatcggcgagagctataaggagaagcagcggaccatccaggccaagaaggaggtggagcagcggagagccggcggctacagccggaagtacgccagcaaagccaagaatctggcagacgatatggtgagaaacaccgctagagatctgctgtactacgccgtgacccaggatgccatgctgatcttcgccaacctgagccggggcttcggccggcagggcaagcggaccttcatggccgagagacagtacacacggatggaggactggctgaccgccaagctggcctacgagggcctgagcaagacctacctgtccaagacactggcccagtacacctccaagacatgcagcaactgtgggtttaccatcaccagcgccgactacgacagggtgctggagaagctgaagaagacagcaacaggctggatgaccacaattaacggcaaggagctgaaggtggagggccagattacctactacaacagatacaagagacagaacgtagtcaaggacctgtccgtcgagctggatagactgagcgaagaatctgtgaacaacgacatctcctcctggacaaagggcagaagcggagaagctctgagcctcctgaagaaaagattctcccatagacccgtgcaggagaagttcgtgtgcctgaactgcggcttcgagacacacgcagccgagcaagccgccctgaacatcgccagatcctggctgttcctgcggagccaggagtacaagaaataccagacaaacaagacaaccggcaacaccgataagagagccttcgtcgagacctggcagtccttttaccggaagaagcttaaggaggtgtggaaacctgccgtgcggtctggcggatctggcggaggctccaacagcggcctgctgaccttcagggacgtggccatcgagttcagcctggaggagtggcagtgcctggacaccgcccagaagaacctgtacaggaacgtgatgctggagaactacaggaacctggccttcctgggcgtggccgtgagcaagcccgacctgatcacctgcctggagaaggacaaggagccctggaacatgaagaggcacgagatggtggacgagccccccggcatctgcccccacggcggcccaagcagcggcgcccctcctcccagcggcggcagcccagccggctccccaacctctaccgaggagggcacctctgagtccgccacccccgagagcggccctggcacctccaccgagcccagcgagggcagcgcacccggcagccctgccggcagccccacctccacagaggagggaaccagcaccgagcccagcgaaggcagcgccccaggcaccagcaccgagcctagtgagcaggagattaaacggatcaacaagatcagaagaagacttgtgaaagacagcaacaccaagaaggccggcaagacaggccccatgaaaaccctgctggttagagtgatgacacccgatctgagagagcggctggaaaacctgagaaagaagcctgaaaatatcccccagcccatcagcaatacatctagagccaacctgaataagctgctgaccgattacaccgaaatgaagaaggcgatcctgcatgtgtactgggaagagttccagaaggaccctgtgggcctgatgagccgggtggcccagcctgccagcaagaagatcgatcagaacaagctgaaacctgagatggacgagaagggcaacctgaccaccgccggctttgcctgctctcagtgtggccagcccctgttcgtgtacaagctggagcaggtgtctgagaagggcaaggcttacaccaactacttcggacggtgcaatgtggccgagcacgaaaagctgatcctgctggcccagctgaagcccgagaaggatagcgacgaagccgtgacatatagcctgggaaagtttgggcagagggccctggatttctacagcattcatgtgaccaaggagtccacccaccccgtgaagcccctggcccagatcgccggaaacagatacgcctccggacctgtgggaaaggccctgagcgacgcatgtatgggcacaatcgcctccttcctgtctaagtaccaggacatcatcatcgaacaccagaaggtggtgaagggcaaccagaagagactggagagcctgcgggagctggccggcaaggaaaacctggaataccctagcgtgaccctgccacctcagcctcacaccaaggagggcgttgatgcctacaacgaagtgatcgcccgggtgcgaatgtgggtgaacctgaacctgtggcagaagctgaagctaagcagagatgatgccaagcctctgctgagactgaagggattcccttcctttcctctggtcgagagacaggccaacgaagtggactggtgggacatggtgtgtaacgtgaagaagctgatcaacgagaaaaaggaggatggcaaggtgttttggcagaatctggctggctacaagagacaggaagccctgagaccatacctgagcagcgaggaagatcggaagaagggaaagaaattcgctcggtaccagctgggcgacctgctgctgcacctggaaaagaagcacggcgaggactggggaaaggtgtacgacgaggcctgggagcggattgacaagaaagtggaaggcctgagcaagcacatcaagctggaagaggaacggagaagcgaggacgcccagagcaaggccgccctgaccgactggctgcgggctaaggccagcttcgtgatcgagggcctgaaggaggccgacaaggacgagttctgcagatgcgagctgaagctgcagaagtggtacggggacctgcggggaaagcccttcgccatcgaagccgagaacagcatcctggacatcagcggcttcagcaagcagtacaactgtgccttcatctggcagaaggacggcgtgaagaagctgaacctgtacctgatcatcaactacttcaagggcggcaagctgcggttcaagaagatcaaacctgaagccttcgaagccaacagattctacaccgtgatcaacaaaaagagcggcgagatcgtgcccatggaggtgaacttcaacttcgacgaccccaacctgatcatcctgcctctggcctttggcaagagacagggcagagaattcatctggaacgacctgctgtccctggaaaccggcagcctgaagctggccaacggaagagtgatcgagaagacactgtacaacagaagaacccggcaggatgagcctgccctgttcgtggccctgaccttcgagcggcgggaggtcctggactcctccaatatcaaaccaatgaacctgatcggcgtggcaagaggcgaaaacatccccgccgtgatcgccctgaccgaccccgagggctgcccactgagccggtttaaggatagcctgggaaacccaacccacatcctgagaatcggcgagagctataaggagaagcagcggaccatccaggccaagaaggaggtggagcagcggagagccggcggctacagccggaagtacgccagcaaagccaagaatctggcagacgatatggtgagaaacaccgctagagatctgctgtactacgccgtgacccaggatgccatgctgatcttcgccaacctgagccggggcttcggccggcagggcaagcggaccttcatggccgagagacagtacacacggatggaggactggctgaccgccaagctggcctacgagggcctgagcaagacctacctgtccaagacactggcccagtacacctccaagacatgcagcaactgtgggtttaccatcaccagcgccgactacgacagggtgctggagaagctgaagaagacagcaacaggctggatgaccacaattaacggcaaggagctgaaggtggagggccagattacctactacaacagatacaagagacagaacgtagtcaaggacctgtccgtcgagctggatagactgagcgaagaatctgtgaacaacgacatctcctcctggacaaagggcagaagcggagaagctctgagcctcctgaagaaaagattctcccatagacccgtgcaggagaagttcgtgtgcctgaactgcggcttcgagacacacgcagccgagcaagccgccctgaacatcgccagatcctggctgttcctgcggagccaggagtacaagaaataccagacaaacaagacaaccggcaacaccgataagagagccttcgtcgagacctggcagtccttttaccggaagaagcttaaggaggtgtggaaacctgccgtgcggtctggcggatctggcggaggctcctaacagcggcctgctgaccttcagggacgtggccatcgagttcagcctggaggagtggcagtgcctggacaccgcccagaagaacctgtacaggaacgtgatgctggagaactacaggaacctggccttcctgggcgtggccgtgagcaagcccgacctgatcacctgcctggagaaggacaaggagccctggaacatgaagaggcacgagatggtggacgagccccccggcatctgcccccacggatctggctccggcagcggccccaagaaaaagagaaaagtctaagctgccttctgcggggcttgccttctggccatgcccttcttctctcccttgcacctgtacctcttggtctttgaataaagcctgagtaggaaggctagcaaaaaaaaaaaaaaaaaaaaaaaaaaaaaaaaaaaaaaaaaaaaaaaaaaaaaaaaaaaaaaaaaaaaaaaaaaaaaaaa

SEQ ID NO: 16648 - RNA, 9485 nt, synthetic construct
  source 1..9485: mol_type = other RNA
aggaaataagagagaaaagaagagtaagaagaaatataagagccaccatggcccctaagaagaagcgtaaagtgagccggatggaacgcctcgtctacgaggtgcggcagaagtgcagaaacatcgaggacatctgcatctcctgcggatctctgaacgtgaccctggagcacccactgttcatcggcggcatgtgccagaactgtaaaaactgttttctggagtgtgcctatcaatacgacgatgacggctaccagagctactgcaccatctgttgcggcggaagagaggtgctgatgtgtggaaataacaactgctgccggtgcttctgcgtggaatgcgtggacctgctggtgggccccggcgccgcccaggccgctattaaggaagatccttggaactgctacatgtgcggccacaagggcacatacggcctgctgagacggagagaggactggcctagcagactgcagatgttcttcgccaataaccacgaccaggagttcgacccccctaaggtgtaccctcccgtccccgccgagaagagaaagcccatccgggtcctgagcctgttcgatggcatcgccaccggtctgctggtgctgaaggacctgggcatccaggtggataggtacattgcctccgaggtgtgcgaggactccatcaccgtgggaatggtgcgtcatcagggcaagatcatgtacgtgggcgacgtgcggagcgtgacacagaagcatatccaggagtggggccctttcgacctggtgatcggcggcagcccttgcaatgacctgagcatcgtgaacccagcccggaagggcctgtacgagggaaccggcagactgttcttcgagttttacagactgctgcacgacgcccggcctaaggaaggcgacgaccggcccttcttttggctgttcgagaatgtggtggccatgggagtcagcgacaagcgggatattagccggttcctggagagcaaccccgtgatgatcgatgccaaggaagtgagcgccgcccaccgggccagatacttctggggcaatctgcctggcatgaacagacccctggccagcaccgtgaacgacaagctggagctgcaggagtgcctggagcacggccggatcgccaagttcagcaaggtgagaaccatcaccacccgaagcaacagcatcaaacaaggcaaggaccagcactttcctgtgttcatgaacgagaaggaggacatcctgtggtgtaccgagatggagagagtgttcgggttcccagtccactacacagatgtcagcaacatgtctagactggccagacagagactgctgggaagaagctggtccgtccctgtgatcagacacctgttcgcccctctgaaggagtacttcgcctgcgtgagcagcggcaacagcaacgccaacagccggggccccagcttctctagcggcctggtgccactgtccctgagagggagccacatgggccccatggagatctacaaaaccgtgagcgcctggaagcggcagcctgtgcgcgtgctgagcctgtttcggaatatcgataaagtcctgaaaagcctgggattcctggagagcggctctggctccggcggtggcaccctgaagtacgtggaggatgtgacaaacgtggtcagacgggatgtggagaagtggggccccttcgatctggtgtacggcagcacccaacccctgggcagctcttgtgaccggtgccctggctggtacatgtttcagttccaccggatcctgcagtacgccctgccgagacaggagtcccagcggccattcttttggattttcatggacaacttgctgctgaccgaggatgaccaggaaactaccactcggttcctgcagaccgaagccgtgaccctgcaggacgtgagaggccgggactaccagaacgccatgcgggtgtggtccaacatccctggactgaaaagcaagcacgcacctctgacccctaaagaagaggagtacctgcaggcccaggtgcggagcagaagcaagctggacgcccctaaggtggatctgctggtgaagaattgcctcctgcccctgagagagtacttcaagtatttcagccagaatagtctgcccctgggaggcagcggcggcggcgccctggtgacatttgaggacgtcgccgtgcggttcacccaggaggaatgggctctgctggatccttctcagaaaatcctgtaccgggacgtgatgagagagacataccggaatctgacctccgtgggcatcaactgggaatgttgggaccttgaagcctgcttcagaagcctgggaagaaacctgagagtgcaggtggtgaagagaaagtgcgagctgaccaacagcggcccctgcgccgagggcggcccaagcagcggcgcccctcctcccagcggcggcagcccagccggctccccaacctctaccgaggagggcacctctgagtccgccacccccgagagcggccctggcacctccaccgagcccagcgagggcagcgcacccggcagccctgccggcagccccacctccacagaggagggaaccagcaccgagcccagcgaaggcagcgccccaggcaccagcaccgagcctagtgagcaggagattaaacggatcaacaagatcagaagaagacttgtgaaagacagcaacaccaagaaggccggcaagacaggccccatgaaaaccctgctggttagagtgatgacacccgatctgagagagcggctggaaaacctgagaaagaagcctgaaaatatcccccagcccatcagcaatacatctagagccaacctgaataagctgctgaccgattacaccgaaatgaagaaggcgatcctgcatgtgtactgggaagagttccagaaggaccctgtgggcctgatgagccgggtggcccagcctgccagcaagaagatcgatcagaacaagctgaaacctgagatggacgagaagggcaacctgaccaccgccggctttgcctgctctcagtgtggccagcccctgttcgtgtacaagctggagcaggtgtctgagaagggcaaggcttacaccaactacttcggacggtgcaatgtggccgagcacgaaaagctgatcctgctggcccagctgaagcccgagaaggatagcgacgaagccgtgacatatagcctgggaaagtttgggcagagggccctggatttctacagcattcatgtgaccaaggagtccacccaccccgtgaagcccctggcccagatcgccggaaacagatacgcctccggacctgtgggaaaggccctgagcgacgcatgtatgggcacaatcgcctccttcctgtctaagtaccaggacatcatcatcgaacaccagaaggtggtgaagggcaaccagaagagactggagagcctgcgggagctggccggcaaggaaaacctggaataccctagcgtgaccctgccacctcagcctcacaccaaggagggcgttgatgcctacaacgaagtgatcgcccgggtgcgaatgtgggtgaacctgaacctgtggcagaagctgaagctaagcagagatgatgccaagcctctgctgagactgaagggattcccttcctttcctctggtcgagagacaggccaacgaagtggactggtgggacatggtgtgtaacgtgaagaagctgatcaacgagaaaaaggaggatggcaaggtgttttggcagaatctggctggctacaagagacaggaagccctgagaccatacctgagcagcgaggaagatcggaagaagggaaagaaattcgctcggtaccagctgggcgacctgctgctgcacctggaaaagaagcacggcgaggactggggaaaggtgtacgacgaggcctgggagcggattgacaagaaagtggaaggcctgagcaagcacatcaagctggaagaggaacggagaagcgaggacgcccagagcaaggccgccctgaccgactggctgcgggctaaggccagcttcgtgatcgagggcctgaaggaggccgacaaggacgagttctgcagatgcgagctgaagctgcagaagtggtacggggacctgcggggaaagcccttcgccatcgaagccgagaacagcatcctggacatcagcggcttcagcaagcagtacaactgtgccttcatctggcagaaggacggcgtgaagaagctgaacctgtacctgatcatcaactacttcaagggcggcaagctgcggttcaagaagatcaaacctgaagccttcgaagccaacagattctacaccgtgatcaacaaaaagagcggcgagatcgtgcccatggaggtgaacttcaacttcgacgaccccaacctgatcatcctgcctctggcctttggcaagagacagggcagagaattcatctggaacgacctgctgtccctggaaaccggcagcctgaagctggccaacggaagagtgatcgagaagacactgtacaacagaagaacccggcaggatgagcctgccctgttcgtggccctgaccttcgagcggcgggaggtcctggactcctccaatatcaaaccaatgaacctgatcggcgtggcaagaggcgaaaacatccccgccgtgatcgccctgaccgaccccgagggctgcccactgagccggtttaaggatagcctgggaaacccaacccacatcctgagaatcggcgagagctataaggagaagcagcggaccatccaggccaagaaggaggtggagcagcggagagccggcggctacagccggaagtacgccagcaaagccaagaatctggcagacgatatggtgagaaacaccgctagagatctgctgtactacgccgtgacccaggatgccatgctgatcttcgccaacctgagccggggcttcggccggcagggcaagcggaccttcatggccgagagacagtacacacggatggaggactggctgaccgccaagctggcctacgagggcctgagcaagacctacctgtccaagacactggcccagtacacctccaagacatgcagcaactgtgggtttaccatcaccagcgccgactacgacagggtgctggagaagctgaagaagacagcaacaggctggatgaccacaattaacggcaaggagctgaaggtggagggccagattacctactacaacagatacaagagacagaacgtagtcaaggacctgtccgtcgagctggatagactgagcgaagaatctgtgaacaacgacatctcctcctggacaaagggcagaagcggagaagctctgagcctcctgaagaaaagattctcccatagacccgtgcaggagaagttcgtgtgcctgaactgcggcttcgagacacacgcagccgagcaagccgccctgaacatcgccagatcctggctgttcctgcggagccaggagtacaagaaataccagacaaacaagacaaccggcaacaccgataagagagccttcgtcgagacctggcagtccttttaccggaagaagcttaaggaggtgtggaaacctgccgtgcggtctggcggatctggcggaggctccagccacggccccctgagcttcgaggacgtggccgtggccttcaccaaggaggagtggcagcagctggaccccgcccagaggaccctgtacagggacgtgatgctggagaacttcagccacgtgatcagcctgggccaccccgtgagcaagcccgacgtgatcagcaagctggagcagggcgaggagccctggatcatcaagagggacgtgagcgactggatctaccccgagagggagaccaggggcggcccaagcagcggcgcccctcctcccagcggcggcagcccagccggctccccaacctctaccgaggagggcacctctgagtccgccacccccgagagcggccctggcacctccaccgagcccagcgagggcagcgcacccggcagccctgccggcagccccacctccacagaggagggaaccagcaccgagcccagcgaaggcagcgccccaggcaccagcaccgagcctagtgagcaggagattaaacggatcaacaagatcagaagaagacttgtgaaagacagcaacaccaagaaggccggcaagacaggccccatgaaaaccctgctggttagagtgatgacacccgatctgagagagcggctggaaaacctgagaaagaagcctgaaaatatcccccagcccatcagcaatacatctagagccaacctgaataagctgctgaccgattacaccgaaatgaagaaggcgatcctgcatgtgtactgggaagagttccagaaggaccctgtgggcctgatgagccgggtggcccagcctgccagcaagaagatcgatcagaacaagctgaaacctgagatggacgagaagggcaacctgaccaccgccggctttgcctgctctcagtgtggccagcccctgttcgtgtacaagctggagcaggtgtctgagaagggcaaggcttacaccaactacttcggacggtgcaatgtggccgagcacgaaaagctgatcctgctggcccagctgaagcccgagaaggatagcgacgaagccgtgacatatagcctgggaaagtttgggcagagggccctggatttctacagcattcatgtgaccaaggagtccacccaccccgtgaagcccctggcccagatcgccggaaacagatacgcctccggacctgtgggaaaggccctgagcgacgcatgtatgggcacaatcgcctccttcctgtctaagtaccaggacatcatcatcgaacaccagaaggtggtgaagggcaaccagaagagactggagagcctgcgggagctggccggcaaggaaaacctggaataccctagcgtgaccctgccacctcagcctcacaccaaggagggcgttgatgcctacaacgaagtgatcgcccgggtgcgaatgtgggtgaacctgaacctgtggcagaagctgaagctaagcagagatgatgccaagcctctgctgagactgaagggattcccttcctttcctctggtcgagagacaggccaacgaagtggactggtgggacatggtgtgtaacgtgaagaagctgatcaacgagaaaaaggaggatggcaaggtgttttggcagaatctggctggctacaagagacaggaagccctgagaccatacctgagcagcgaggaagatcggaagaagggaaagaaattcgctcggtaccagctgggcgacctgctgctgcacctggaaaagaagcacggcgaggactggggaaaggtgtacgacgaggcctgggagcggattgacaagaaagtggaaggcctgagcaagcacatcaagctggaagaggaacggagaagcgaggacgcccagagcaaggccgccctgaccgactggctgcgggctaaggccagcttcgtgatcgagggcctgaaggaggccgacaaggacgagttctgcagatgcgagctgaagctgcagaagtggtacggggacctgcggggaaagcccttcgccatcgaagccgagaacagcatcctggacatcagcggcttcagcaagcagtacaactgtgccttcatctggcagaaggacggcgtgaagaagctgaacctgtacctgatcatcaactacttcaagggcggcaagctgcggttcaagaagatcaaacctgaagccttcgaagccaacagattctacaccgtgatcaacaaaaagagcggcgagatcgtgcccatggaggtgaacttcaacttcgacgaccccaacctgatcatcctgcctctggcctttggcaagagacagggcagagaattcatctggaacgacctgctgtccctggaaaccggcagcctgaagctggccaacggaagagtgatcgagaagacactgtacaacagaagaacccggcaggatgagcctgccctgttcgtggccctgaccttcgagcggcgggaggtcctggactcctccaatatcaaaccaatgaacctgatcggcgtggcaagaggcgaaaacatccccgccgtgatcgccctgaccgaccccgagggctgcccactgagccggtttaaggatagcctgggaaacccaacccacatcctgagaatcggcgagagctataaggagaagcagcggaccatccaggccaagaaggaggtggagcagcggagagccggcggctacagccggaagtacgccagcaaagccaagaatctggcagacgatatggtgagaaacaccgctagagatctgctgtactacgccgtgacccaggatgccatgctgatcttcgccaacctgagccggggcttcggccggcagggcaagcggaccttcatggccgagagacagtacacacggatggaggactggctgaccgccaagctggcctacgagggcctgagcaagacctacctgtccaagacactggcccagtacacctccaagacatgcagcaactgtgggtttaccatcaccagcgccgactacgacagggtgctggagaagctgaagaagacagcaacaggctggatgaccacaattaacggcaaggagctgaaggtggagggccagattacctactacaacagatacaagagacagaacgtagtcaaggacctgtccgtcgagctggatagactgagcgaagaatctgtgaacaacgacatctcctcctggacaaagggcagaagcggagaagctctgagcctcctgaagaaaagattctcccatagacccgtgcaggagaagttcgtgtgcctgaactgcggcttcgagacacacgcagccgagcaagccgccctgaacatcgccagatcctggctgttcctgcggagccaggagtacaagaaataccagacaaacaagacaaccggcaacaccgataagagagccttcgtcgagacctggcagtccttttaccggaagaagcttaaggaggtgtggaaacctgccgtgcggtctggcggatctggcggaggctcctagccacggccccctgagcttcgaggacgtggccgtggccttcaccaaggaggagtggcagcagctggaccccgcccagaggaccctgtacagggacgtgatgctggagaacttcagccacgtgatcagcctgggccaccccgtgagcaagcccgacgtgatcagcaagctggagcagggcgaggagccctggatcatcaagagggacgtgagcgactggatctaccccgagagggagaccaggggatctggctccggcagcggccccaagaaaaagagaaaagtctaagctgccttctgcggggcttgccttctggccatgcccttcttctctcccttgcacctgtacctcttggtctttgaataaagcctgagtaggaaggctagcaaaaaaaaaaaaaaaaaaaaaaaaaaaaaaaaaaaaaaaaaaaaaaaaaaaaaaaaaaaaaaaaaaaaaaaaaaaaaaaa

SEQ ID NO: 16649 - RNA, 9485 nt, synthetic construct
  source 1..9485: mol_type = other RNA
aggaaataagagagaaaagaagagtaagaagaaatataagagccaccatggcccctaagaagaagcgtaaagtgagccggatggaacgcctcgtctacgaggtgcggcagaagtgcagaaacatcgaggacatctgcatctcctgcggatctctgaacgtgaccctggagcacccactgttcatcggcggcatgtgccagaactgtaaaaactgttttctggagtgtgcctatcaatacgacgatgacggctaccagagctactgcaccatctgttgcggcggaagagaggtgctgatgtgtggaaataacaactgctgccggtgcttctgcgtggaatgcgtggacctgctggtgggccccggcgccgcccaggccgctattaaggaagatccttggaactgctacatgtgcggccacaagggcacatacggcctgctgagacggagagaggactggcctagcagactgcagatgttcttcgccaataaccacgaccaggagttcgacccccctaaggtgtaccctcccgtccccgccgagaagagaaagcccatccgggtcctgagcctgttcgatggcatcgccaccggtctgctggtgctgaaggacctgggcatccaggtggataggtacattgcctccgaggtgtgcgaggactccatcaccgtgggaatggtgcgtcatcagggcaagatcatgtacgtgggcgacgtgcggagcgtgacacagaagcatatccaggagtggggccctttcgacctggtgatcggcggcagcccttgcaatgacctgagcatcgtgaacccagcccggaagggcctgtacgagggaaccggcagactgttcttcgagttttacagactgctgcacgacgcccggcctaaggaaggcgacgaccggcccttcttttggctgttcgagaatgtggtggccatgggagtcagcgacaagcgggatattagccggttcctggagagcaaccccgtgatgatcgatgccaaggaagtgagcgccgcccaccgggccagatacttctggggcaatctgcctggcatgaacagacccctggccagcaccgtgaacgacaagctggagctgcaggagtgcctggagcacggccggatcgccaagttcagcaaggtgagaaccatcaccacccgaagcaacagcatcaaacaaggcaaggaccagcactttcctgtgttcatgaacgagaaggaggacatcctgtggtgtaccgagatggagagagtgttcgggttcccagtccactacacagatgtcagcaacatgtctagactggccagacagagactgctgggaagaagctggtccgtccctgtgatcagacacctgttcgcccctctgaaggagtacttcgcctgcgtgagcagcggcaacagcaacgccaacagccggggccccagcttctctagcggcctggtgccactgtccctgagagggagccacatgggccccatggagatctacaaaaccgtgagcgcctggaagcggcagcctgtgcgcgtgctgagcctgtttcggaatatcgataaagtcctgaaaagcctgggattcctggagagcggctctggctccggcggtggcaccctgaagtacgtggaggatgtgacaaacgtggtcagacgggatgtggagaagtggggccccttcgatctggtgtacggcagcacccaacccctgggcagctcttgtgaccggtgccctggctggtacatgtttcagttccaccggatcctgcagtacgccctgccgagacaggagtcccagcggccattcttttggattttcatggacaacttgctgctgaccgaggatgaccaggaaactaccactcggttcctgcagaccgaagccgtgaccctgcaggacgtgagaggccgggactaccagaacgccatgcgggtgtggtccaacatccctggactgaaaagcaagcacgcacctctgacccctaaagaagaggagtacctgcaggcccaggtgcggagcagaagcaagctggacgcccctaaggtggatctgctggtgaagaattgcctcctgcccctgagagagtacttcaagtatttcagccagaatagtctgcccctgggaggcagcggcggcggcgccctggtgacatttgaggacgtcgccgtgcggttcacccaggaggaatgggctctgctggatccttctcagaaaatcctgtaccgggacgtgatgagagagacataccggaatctgacctccgtgggcatcaactgggaatgttgggaccttgaagcctgcttcagaagcctgggaagaaacctgagagtgcaggtggtgaagagaaagtgcgagctgaccaacagcggcccctgcgccgagggcggcccaagcagcggcgcccctcctcccagcggcggcagcccagccggctccccaacctctaccgaggagggcacctctgagtccgccacccccgagagcggccctggcacctccaccgagcccagcgagggcagcgcacccggcagccctgccggcagccccacctccacagaggagggaaccagcaccgagcccagcgaaggcagcgccccaggcaccagcaccgagcctagtgagcaggagattaaacggatcaacaagatcagaagaagacttgtgaaagacagcaacaccaagaaggccggcaagacaggccccatgaaaaccctgctggttagagtgatgacacccgatctgagagagcggctggaaaacctgagaaagaagcctgaaaatatcccccagcccatcagcaatacatctagagccaacctgaataagctgctgaccgattacaccgaaatgaagaaggcgatcctgcatgtgtactgggaagagttccagaaggaccctgtgggcctgatgagccgggtggcccagcctgccagcaagaagatcgatcagaacaagctgaaacctgagatggacgagaagggcaacctgaccaccgccggctttgcctgctctcagtgtggccagcccctgttcgtgtacaagctggagcaggtgtctgagaagggcaaggcttacaccaactacttcggacggtgcaatgtggccgagcacgaaaagctgatcctgctggcccagctgaagcccgagaaggatagcgacgaagccgtgacatatagcctgggaaagtttgggcagagggccctggatttctacagcattcatgtgaccaaggagtccacccaccccgtgaagcccctggcccagatcgccggaaacagatacgcctccggacctgtgggaaaggccctgagcgacgcatgtatgggcacaatcgcctccttcctgtctaagtaccaggacatcatcatcgaacaccagaaggtggtgaagggcaaccagaagagactggagagcctgcgggagctggccggcaaggaaaacctggaataccctagcgtgaccctgccacctcagcctcacaccaaggagggcgttgatgcctacaacgaagtgatcgcccgggtgcgaatgtgggtgaacctgaacctgtggcagaagctgaagctaagcagagatgatgccaagcctctgctgagactgaagggattcccttcctttcctctggtcgagagacaggccaacgaagtggactggtgggacatggtgtgtaacgtgaagaagctgatcaacgagaaaaaggaggatggcaaggtgttttggcagaatctggctggctacaagagacaggaagccctgagaccatacctgagcagcgaggaagatcggaagaagggaaagaaattcgctcggtaccagctgggcgacctgctgctgcacctggaaaagaagcacggcgaggactggggaaaggtgtacgacgaggcctgggagcggattgacaagaaagtggaaggcctgagcaagcacatcaagctggaagaggaacggagaagcgaggacgcccagagcaaggccgccctgaccgactggctgcgggctaaggccagcttcgtgatcgagggcctgaaggaggccgacaaggacgagttctgcagatgcgagctgaagctgcagaagtggtacggggacctgcggggaaagcccttcgccatcgaagccgagaacagcatcctggacatcagcggcttcagcaagcagtacaactgtgccttcatctggcagaaggacggcgtgaagaagctgaacctgtacctgatcatcaactacttcaagggcggcaagctgcggttcaagaagatcaaacctgaagccttcgaagccaacagattctacaccgtgatcaacaaaaagagcggcgagatcgtgcccatggaggtgaacttcaacttcgacgaccccaacctgatcatcctgcctctggcctttggcaagagacagggcagagaattcatctggaacgacctgctgtccctggaaaccggcagcctgaagctggccaacggaagagtgatcgagaagacactgtacaacagaagaacccggcaggatgagcctgccctgttcgtggccctgaccttcgagcggcgggaggtcctggactcctccaatatcaaaccaatgaacctgatcggcgtggcaagaggcgaaaacatccccgccgtgatcgccctgaccgaccccgagggctgcccactgagccggtttaaggatagcctgggaaacccaacccacatcctgagaatcggcgagagctataaggagaagcagcggaccatccaggccaagaaggaggtggagcagcggagagccggcggctacagccggaagtacgccagcaaagccaagaatctggcagacgatatggtgagaaacaccgctagagatctgctgtactacgccgtgacccaggatgccatgctgatcttcgccaacctgagccggggcttcggccggcagggcaagcggaccttcatggccgagagacagtacacacggatggaggactggctgaccgccaagctggcctacgagggcctgagcaagacctacctgtccaagacactggcccagtacacctccaagacatgcagcaactgtgggtttaccatcaccagcgccgactacgacagggtgctggagaagctgaagaagacagcaacaggctggatgaccacaattaacggcaaggagctgaaggtggagggccagattacctactacaacagatacaagagacagaacgtagtcaaggacctgtccgtcgagctggatagactgagcgaagaatctgtgaacaacgacatctcctcctggacaaagggcagaagcggagaagctctgagcctcctgaagaaaagattctcccatagacccgtgcaggagaagttcgtgtgcctgaactgcggcttcgagacacacgcagccgagcaagccgccctgaacatcgccagatcctggctgttcctgcggagccaggagtacaagaaataccagacaaacaagacaaccggcaacaccgataagagagccttcgtcgagacctggcagtccttttaccggaagaagcttaaggaggtgtggaaacctgccgtgcggtctggcggatctggcggaggctcccagcagggcagcgtgaccttcagggacgtggccgtggacttcaccctggaggagtggggccacctggaccccttccagaaggagctgtacagggacgtgatgctggagaacttcaggaacctggtgtgcctgggcctgaccgtgagcaagcccgacgtgatccaccagctggagcagggcgaggccccctggatccccgagggcgagagccccaggaacagcttcgccggctgcgccagcgacggcggcccaagcagcggcgcccctcctcccagcggcggcagcccagccggctccccaacctctaccgaggagggcacctctgagtccgccacccccgagagcggccctggcacctccaccgagcccagcgagggcagcgcacccggcagccctgccggcagccccacctccacagaggagggaaccagcaccgagcccagcgaaggcagcgccccaggcaccagcaccgagcctagtgagcaggagattaaacggatcaacaagatcagaagaagacttgtgaaagacagcaacaccaagaaggccggcaagacaggccccatgaaaaccctgctggttagagtgatgacacccgatctgagagagcggctggaaaacctgagaaagaagcctgaaaatatcccccagcccatcagcaatacatctagagccaacctgaataagctgctgaccgattacaccgaaatgaagaaggcgatcctgcatgtgtactgggaagagttccagaaggaccctgtgggcctgatgagccgggtggcccagcctgccagcaagaagatcgatcagaacaagctgaaacctgagatggacgagaagggcaacctgaccaccgccggctttgcctgctctcagtgtggccagcccctgttcgtgtacaagctggagcaggtgtctgagaagggcaaggcttacaccaactacttcggacggtgcaatgtggccgagcacgaaaagctgatcctgctggcccagctgaagcccgagaaggatagcgacgaagccgtgacatatagcctgggaaagtttgggcagagggccctggatttctacagcattcatgtgaccaaggagtccacccaccccgtgaagcccctggcccagatcgccggaaacagatacgcctccggacctgtgggaaaggccctgagcgacgcatgtatgggcacaatcgcctccttcctgtctaagtaccaggacatcatcatcgaacaccagaaggtggtgaagggcaaccagaagagactggagagcctgcgggagctggccggcaaggaaaacctggaataccctagcgtgaccctgccacctcagcctcacaccaaggagggcgttgatgcctacaacgaagtgatcgcccgggtgcgaatgtgggtgaacctgaacctgtggcagaagctgaagctaagcagagatgatgccaagcctctgctgagactgaagggattcccttcctttcctctggtcgagagacaggccaacgaagtggactggtgggacatggtgtgtaacgtgaagaagctgatcaacgagaaaaaggaggatggcaaggtgttttggcagaatctggctggctacaagagacaggaagccctgagaccatacctgagcagcgaggaagatcggaagaagggaaagaaattcgctcggtaccagctgggcgacctgctgctgcacctggaaaagaagcacggcgaggactggggaaaggtgtacgacgaggcctgggagcggattgacaagaaagtggaaggcctgagcaagcacatcaagctggaagaggaacggagaagcgaggacgcccagagcaaggccgccctgaccgactggctgcgggctaaggccagcttcgtgatcgagggcctgaaggaggccgacaaggacgagttctgcagatgcgagctgaagctgcagaagtggtacggggacctgcggggaaagcccttcgccatcgaagccgagaacagcatcctggacatcagcggcttcagcaagcagtacaactgtgccttcatctggcagaaggacggcgtgaagaagctgaacctgtacctgatcatcaactacttcaagggcggcaagctgcggttcaagaagatcaaacctgaagccttcgaagccaacagattctacaccgtgatcaacaaaaagagcggcgagatcgtgcccatggaggtgaacttcaacttcgacgaccccaacctgatcatcctgcctctggcctttggcaagagacagggcagagaattcatctggaacgacctgctgtccctggaaaccggcagcctgaagctggccaacggaagagtgatcgagaagacactgtacaacagaagaacccggcaggatgagcctgccctgttcgtggccctgaccttcgagcggcgggaggtcctggactcctccaatatcaaaccaatgaacctgatcggcgtggcaagaggcgaaaacatccccgccgtgatcgccctgaccgaccccgagggctgcccactgagccggtttaaggatagcctgggaaacccaacccacatcctgagaatcggcgagagctataaggagaagcagcggaccatccaggccaagaaggaggtggagcagcggagagccggcggctacagccggaagtacgccagcaaagccaagaatctggcagacgatatggtgagaaacaccgctagagatctgctgtactacgccgtgacccaggatgccatgctgatcttcgccaacctgagccggggcttcggccggcagggcaagcggaccttcatggccgagagacagtacacacggatggaggactggctgaccgccaagctggcctacgagggcctgagcaagacctacctgtccaagacactggcccagtacacctccaagacatgcagcaactgtgggtttaccatcaccagcgccgactacgacagggtgctggagaagctgaagaagacagcaacaggctggatgaccacaattaacggcaaggagctgaaggtggagggccagattacctactacaacagatacaagagacagaacgtagtcaaggacctgtccgtcgagctggatagactgagcgaagaatctgtgaacaacgacatctcctcctggacaaagggcagaagcggagaagctctgagcctcctgaagaaaagattctcccatagacccgtgcaggagaagttcgtgtgcctgaactgcggcttcgagacacacgcagccgagcaagccgccctgaacatcgccagatcctggctgttcctgcggagccaggagtacaagaaataccagacaaacaagacaaccggcaacaccgataagagagccttcgtcgagacctggcagtccttttaccggaagaagcttaaggaggtgtggaaacctgccgtgcggtctggcggatctggcggaggctcctcagcagggcagcgtgaccttcagggacgtggccgtggacttcaccctggaggagtggggccacctggaccccttccagaaggagctgtacagggacgtgatgctggagaacttcaggaacctggtgtgcctgggcctgaccgtgagcaagcccgacgtgatccaccagctggagcagggcgaggccccctggatccccgagggcgagagccccaggaacagcttcgccggctgcgccagcgacggatctggctccggcagcggccccaagaaaaagagaaaagtctaagctgccttctgcggggcttgccttctggccatgcccttcttctctcccttgcacctgtacctcttggtctttgaataaagcctgagtaggaaggctagcaaaaaaaaaaaaaaaaaaaaaaaaaaaaaaaaaaaaaaaaaaaaaaaaaaaaaaaaaaaaaaaaaaaaaaaaaaaaaaaa

SEQ ID NO: 16650 - RNA, 9683 nt, synthetic construct
  source 1..9683: mol_type = other RNA
aggaaataagagagaaaagaagagtaagaagaaatataagagccaccatggcccctaagaagaagcgtaaagtgagccggatggaacgcctcgtctacgaggtgcggcagaagtgcagaaacatcgaggacatctgcatctcctgcggatctctgaacgtgaccctggagcacccactgttcatcggcggcatgtgccagaactgtaaaaactgttttctggagtgtgcctatcaatacgacgatgacggctaccagagctactgcaccatctgttgcggcggaagagaggtgctgatgtgtggaaataacaactgctgccggtgcttctgcgtggaatgcgtggacctgctggtgggccccggcgccgcccaggccgctattaaggaagatccttggaactgctacatgtgcggccacaagggcacatacggcctgctgagacggagagaggactggcctagcagactgcagatgttcttcgccaataaccacgaccaggagttcgacccccctaaggtgtaccctcccgtccccgccgagaagagaaagcccatccgggtcctgagcctgttcgatggcatcgccaccggtctgctggtgctgaaggacctgggcatccaggtggataggtacattgcctccgaggtgtgcgaggactccatcaccgtgggaatggtgcgtcatcagggcaagatcatgtacgtgggcgacgtgcggagcgtgacacagaagcatatccaggagtggggccctttcgacctggtgatcggcggcagcccttgcaatgacctgagcatcgtgaacccagcccggaagggcctgtacgagggaaccggcagactgttcttcgagttttacagactgctgcacgacgcccggcctaaggaaggcgacgaccggcccttcttttggctgttcgagaatgtggtggccatgggagtcagcgacaagcgggatattagccggttcctggagagcaaccccgtgatgatcgatgccaaggaagtgagcgccgcccaccgggccagatacttctggggcaatctgcctggcatgaacagacccctggccagcaccgtgaacgacaagctggagctgcaggagtgcctggagcacggccggatcgccaagttcagcaaggtgagaaccatcaccacccgaagcaacagcatcaaacaaggcaaggaccagcactttcctgtgttcatgaacgagaaggaggacatcctgtggtgtaccgagatggagagagtgttcgggttcccagtccactacacagatgtcagcaacatgtctagactggccagacagagactgctgggaagaagctggtccgtccctgtgatcagacacctgttcgcccctctgaaggagtacttcgcctgcgtgagcagcggcaacagcaacgccaacagccggggccccagcttctctagcggcctggtgccactgtccctgagagggagccacatgggccccatggagatctacaaaaccgtgagcgcctggaagcggcagcctgtgcgcgtgctgagcctgtttcggaatatcgataaagtcctgaaaagcctgggattcctggagagcggctctggctccggcggtggcaccctgaagtacgtggaggatgtgacaaacgtggtcagacgggatgtggagaagtggggccccttcgatctggtgtacggcagcacccaacccctgggcagctcttgtgaccggtgccctggctggtacatgtttcagttccaccggatcctgcagtacgccctgccgagacaggagtcccagcggccattcttttggattttcatggacaacttgctgctgaccgaggatgaccaggaaactaccactcggttcctgcagaccgaagccgtgaccctgcaggacgtgagaggccgggactaccagaacgccatgcgggtgtggtccaacatccctggactgaaaagcaagcacgcacctctgacccctaaagaagaggagtacctgcaggcccaggtgcggagcagaagcaagctggacgcccctaaggtggatctgctggtgaagaattgcctcctgcccctgagagagtacttcaagtatttcagccagaatagtctgcccctgggaggcagcggcggcggcgccctggtgacatttgaggacgtcgccgtgcggttcacccaggaggaatgggctctgctggatccttctcagaaaatcctgtaccgggacgtgatgagagagacataccggaatctgacctccgtgggcatcaactgggaatgttgggaccttgaagcctgcttcagaagcctgggaagaaacctgagagtgcaggtggtgaagagaaagtgcgagctgaccaacagcggcccctgcgccgagggcggcccaagcagcggcgcccctcctcccagcggcggcagcccagccggctccccaacctctaccgaggagggcacctctgagtccgccacccccgagagcggccctggcacctccaccgagcccagcgagggcagcgcacccggcagccctgccggcagccccacctccacagaggagggaaccagcaccgagcccagcgaaggcagcgccccaggcaccagcaccgagcctagtgagcaggagattaaacggatcaacaagatcagaagaagacttgtgaaagacagcaacaccaagaaggccggcaagacaggccccatgaaaaccctgctggttagagtgatgacacccgatctgagagagcggctggaaaacctgagaaagaagcctgaaaatatcccccagcccatcagcaatacatctagagccaacctgaataagctgctgaccgattacaccgaaatgaagaaggcgatcctgcatgtgtactgggaagagttccagaaggaccctgtgggcctgatgagccgggtggcccagcctgccagcaagaagatcgatcagaacaagctgaaacctgagatggacgagaagggcaacctgaccaccgccggctttgcctgctctcagtgtggccagcccctgttcgtgtacaagctggagcaggtgtctgagaagggcaaggcttacaccaactacttcggacggtgcaatgtggccgagcacgaaaagctgatcctgctggcccagctgaagcccgagaaggatagcgacgaagccgtgacatatagcctgggaaagtttgggcagagggccctggatttctacagcattcatgtgaccaaggagtccacccaccccgtgaagcccctggcccagatcgccggaaacagatacgcctccggacctgtgggaaaggccctgagcgacgcatgtatgggcacaatcgcctccttcctgtctaagtaccaggacatcatcatcgaacaccagaaggtggtgaagggcaaccagaagagactggagagcctgcgggagctggccggcaaggaaaacctggaataccctagcgtgaccctgccacctcagcctcacaccaaggagggcgttgatgcctacaacgaagtgatcgcccgggtgcgaatgtgggtgaacctgaacctgtggcagaagctgaagctaagcagagatgatgccaagcctctgctgagactgaagggattcccttcctttcctctggtcgagagacaggccaacgaagtggactggtgggacatggtgtgtaacgtgaagaagctgatcaacgagaaaaaggaggatggcaaggtgttttggcagaatctggctggctacaagagacaggaagccctgagaccatacctgagcagcgaggaagatcggaagaagggaaagaaattcgctcggtaccagctgggcgacctgctgctgcacctggaaaagaagcacggcgaggactggggaaaggtgtacgacgaggcctgggagcggattgacaagaaagtggaaggcctgagcaagcacatcaagctggaagaggaacggagaagcgaggacgcccagagcaaggccgccctgaccgactggctgcgggctaaggccagcttcgtgatcgagggcctgaaggaggccgacaaggacgagttctgcagatgcgagctgaagctgcagaagtggtacggggacctgcggggaaagcccttcgccatcgaagccgagaacagcatcctggacatcagcggcttcagcaagcagtacaactgtgccttcatctggcagaaggacggcgtgaagaagctgaacctgtacctgatcatcaactacttcaagggcggcaagctgcggttcaagaagatcaaacctgaagccttcgaagccaacagattctacaccgtgatcaacaaaaagagcggcgagatcgtgcccatggaggtgaacttcaacttcgacgaccccaacctgatcatcctgcctctggcctttggcaagagacagggcagagaattcatctggaacgacctgctgtccctggaaaccggcagcctgaagctggccaacggaagagtgatcgagaagacactgtacaacagaagaacccggcaggatgagcctgccctgttcgtggccctgaccttcgagcggcgggaggtcctggactcctccaatatcaaaccaatgaacctgatcggcgtggcaagaggcgaaaacatccccgccgtgatcgccctgaccgaccccgagggctgcccactgagccggtttaaggatagcctgggaaacccaacccacatcctgagaatcggcgagagctataaggagaagcagcggaccatccaggccaagaaggaggtggagcagcggagagccggcggctacagccggaagtacgccagcaaagccaagaatctggcagacgatatggtgagaaacaccgctagagatctgctgtactacgccgtgacccaggatgccatgctgatcttcgccaacctgagccggggcttcggccggcagggcaagcggaccttcatggccgagagacagtacacacggatggaggactggctgaccgccaagctggcctacgagggcctgagcaagacctacctgtccaagacactggcccagtacacctccaagacatgcagcaactgtgggtttaccatcaccagcgccgactacgacagggtgctggagaagctgaagaagacagcaacaggctggatgaccacaattaacggcaaggagctgaaggtggagggccagattacctactacaacagatacaagagacagaacgtagtcaaggacctgtccgtcgagctggatagactgagcgaagaatctgtgaacaacgacatctcctcctggacaaagggcagaagcggagaagctctgagcctcctgaagaaaagattctcccatagacccgtgcaggagaagttcgtgtgcctgaactgcggcttcgagacacacgcagccgagcaagccgccctgaacatcgccagatcctggctgttcctgcggagccaggagtacaagaaataccagacaaacaagacaaccggcaacaccgataagagagccttcgtcgagacctggcagtccttttaccggaagaagcttaaggaggtgtggaaacctgccgtgcggtctggcggatctggcggaggctccgtgaccttcgaggacatcgccgtgtacttcagcagggaggagtggggcctgctggacgaggcccagaggtgcctgtaccacgacgtgatgctggagaacttcagcctgatgaccagcgtgggctgcctgcacggcatcggcgccgaggaggcccccagcgagcagatcgtgagcgtggagaccgtgagccaggccaggacccccaagcccagcagcagcatccccaacgcccacagctgcgagatgtgcatcctggtgatgaaggacatcctgtacctgaccgagcaccagggcaccctgccctggcagaagccctacaccagcgccgccagcggcaagtggggcggcccaagcagcggcgcccctcctcccagcggcggcagcccagccggctccccaacctctaccgaggagggcacctctgagtccgccacccccgagagcggccctggcacctccaccgagcccagcgagggcagcgcacccggcagccctgccggcagccccacctccacagaggagggaaccagcaccgagcccagcgaaggcagcgccccaggcaccagcaccgagcctagtgagcaggagattaaacggatcaacaagatcagaagaagacttgtgaaagacagcaacaccaagaaggccggcaagacaggccccatgaaaaccctgctggttagagtgatgacacccgatctgagagagcggctggaaaacctgagaaagaagcctgaaaatatcccccagcccatcagcaatacatctagagccaacctgaataagctgctgaccgattacaccgaaatgaagaaggcgatcctgcatgtgtactgggaagagttccagaaggaccctgtgggcctgatgagccgggtggcccagcctgccagcaagaagatcgatcagaacaagctgaaacctgagatggacgagaagggcaacctgaccaccgccggctttgcctgctctcagtgtggccagcccctgttcgtgtacaagctggagcaggtgtctgagaagggcaaggcttacaccaactacttcggacggtgcaatgtggccgagcacgaaaagctgatcctgctggcccagctgaagcccgagaaggatagcgacgaagccgtgacatatagcctgggaaagtttgggcagagggccctggatttctacagcattcatgtgaccaaggagtccacccaccccgtgaagcccctggcccagatcgccggaaacagatacgcctccggacctgtgggaaaggccctgagcgacgcatgtatgggcacaatcgcctccttcctgtctaagtaccaggacatcatcatcgaacaccagaaggtggtgaagggcaaccagaagagactggagagcctgcgggagctggccggcaaggaaaacctggaataccctagcgtgaccctgccacctcagcctcacaccaaggagggcgttgatgcctacaacgaagtgatcgcccgggtgcgaatgtgggtgaacctgaacctgtggcagaagctgaagctaagcagagatgatgccaagcctctgctgagactgaagggattcccttcctttcctctggtcgagagacaggccaacgaagtggactggtgggacatggtgtgtaacgtgaagaagctgatcaacgagaaaaaggaggatggcaaggtgttttggcagaatctggctggctacaagagacaggaagccctgagaccatacctgagcagcgaggaagatcggaagaagggaaagaaattcgctcggtaccagctgggcgacctgctgctgcacctggaaaagaagcacggcgaggactggggaaaggtgtacgacgaggcctgggagcggattgacaagaaagtggaaggcctgagcaagcacatcaagctggaagaggaacggagaagcgaggacgcccagagcaaggccgccctgaccgactggctgcgggctaaggccagcttcgtgatcgagggcctgaaggaggccgacaaggacgagttctgcagatgcgagctgaagctgcagaagtggtacggggacctgcggggaaagcccttcgccatcgaagccgagaacagcatcctggacatcagcggcttcagcaagcagtacaactgtgccttcatctggcagaaggacggcgtgaagaagctgaacctgtacctgatcatcaactacttcaagggcggcaagctgcggttcaagaagatcaaacctgaagccttcgaagccaacagattctacaccgtgatcaacaaaaagagcggcgagatcgtgcccatggaggtgaacttcaacttcgacgaccccaacctgatcatcctgcctctggcctttggcaagagacagggcagagaattcatctggaacgacctgctgtccctggaaaccggcagcctgaagctggccaacggaagagtgatcgagaagacactgtacaacagaagaacccggcaggatgagcctgccctgttcgtggccctgaccttcgagcggcgggaggtcctggactcctccaatatcaaaccaatgaacctgatcggcgtggcaagaggcgaaaacatccccgccgtgatcgccctgaccgaccccgagggctgcccactgagccggtttaaggatagcctgggaaacccaacccacatcctgagaatcggcgagagctataaggagaagcagcggaccatccaggccaagaaggaggtggagcagcggagagccggcggctacagccggaagtacgccagcaaagccaagaatctggcagacgatatggtgagaaacaccgctagagatctgctgtactacgccgtgacccaggatgccatgctgatcttcgccaacctgagccggggcttcggccggcagggcaagcggaccttcatggccgagagacagtacacacggatggaggactggctgaccgccaagctggcctacgagggcctgagcaagacctacctgtccaagacactggcccagtacacctccaagacatgcagcaactgtgggtttaccatcaccagcgccgactacgacagggtgctggagaagctgaagaagacagcaacaggctggatgaccacaattaacggcaaggagctgaaggtggagggccagattacctactacaacagatacaagagacagaacgtagtcaaggacctgtccgtcgagctggatagactgagcgaagaatctgtgaacaacgacatctcctcctggacaaagggcagaagcggagaagctctgagcctcctgaagaaaagattctcccatagacccgtgcaggagaagttcgtgtgcctgaactgcggcttcgagacacacgcagccgagcaagccgccctgaacatcgccagatcctggctgttcctgcggagccaggagtacaagaaataccagacaaacaagacaaccggcaacaccgataagagagccttcgtcgagacctggcagtccttttaccggaagaagcttaaggaggtgtggaaacctgccgtgcggtctggcggatctggcggaggctcctgtgaccttcgaggacatcgccgtgtacttcagcagggaggagtggggcctgctggacgaggcccagaggtgcctgtaccacgacgtgatgctggagaacttcagcctgatgaccagcgtgggctgcctgcacggcatcggcgccgaggaggcccccagcgagcagatcgtgagcgtggagaccgtgagccaggccaggacccccaagcccagcagcagcatccccaacgcccacagctgcgagatgtgcatcctggtgatgaaggacatcctgtacctgaccgagcaccagggcaccctgccctggcagaagccctacaccagcgccgccagcggcaagtggggatctggctccggcagcggccccaagaaaaagagaaaagtctaagctgccttctgcggggcttgccttctggccatgcccttcttctctcccttgcacctgtacctcttggtctttgaataaagcctgagtaggaaggctagcaaaaaaaaaaaaaaaaaaaaaaaaaaaaaaaaaaaaaaaaaaaaaaaaaaaaaaaaaaaaaaaaaaaaaaaaaaaaaaaa

SEQ ID NO: 16651 - RNA, 9485 nt, synthetic construct
  source 1..9485: mol_type = other RNA
aggaaataagagagaaaagaagagtaagaagaaatataagagccaccatggcccctaagaagaagcgtaaagtgagccggatggaacgcctcgtctacgaggtgcggcagaagtgcagaaacatcgaggacatctgcatctcctgcggatctctgaacgtgaccctggagcacccactgttcatcggcggcatgtgccagaactgtaaaaactgttttctggagtgtgcctatcaatacgacgatgacggctaccagagctactgcaccatctgttgcggcggaagagaggtgctgatgtgtggaaataacaactgctgccggtgcttctgcgtggaatgcgtggacctgctggtgggccccggcgccgcccaggccgctattaaggaagatccttggaactgctacatgtgcggccacaagggcacatacggcctgctgagacggagagaggactggcctagcagactgcagatgttcttcgccaataaccacgaccaggagttcgacccccctaaggtgtaccctcccgtccccgccgagaagagaaagcccatccgggtcctgagcctgttcgatggcatcgccaccggtctgctggtgctgaaggacctgggcatccaggtggataggtacattgcctccgaggtgtgcgaggactccatcaccgtgggaatggtgcgtcatcagggcaagatcatgtacgtgggcgacgtgcggagcgtgacacagaagcatatccaggagtggggccctttcgacctggtgatcggcggcagcccttgcaatgacctgagcatcgtgaacccagcccggaagggcctgtacgagggaaccggcagactgttcttcgagttttacagactgctgcacgacgcccggcctaaggaaggcgacgaccggcccttcttttggctgttcgagaatgtggtggccatgggagtcagcgacaagcgggatattagccggttcctggagagcaaccccgtgatgatcgatgccaaggaagtgagcgccgcccaccgggccagatacttctggggcaatctgcctggcatgaacagacccctggccagcaccgtgaacgacaagctggagctgcaggagtgcctggagcacggccggatcgccaagttcagcaaggtgagaaccatcaccacccgaagcaacagcatcaaacaaggcaaggaccagcactttcctgtgttcatgaacgagaaggaggacatcctgtggtgtaccgagatggagagagtgttcgggttcccagtccactacacagatgtcagcaacatgtctagactggccagacagagactgctgggaagaagctggtccgtccctgtgatcagacacctgttcgcccctctgaaggagtacttcgcctgcgtgagcagcggcaacagcaacgccaacagccggggccccagcttctctagcggcctggtgccactgtccctgagagggagccacatgggccccatggagatctacaaaaccgtgagcgcctggaagcggcagcctgtgcgcgtgctgagcctgtttcggaatatcgataaagtcctgaaaagcctgggattcctggagagcggctctggctccggcggtggcaccctgaagtacgtggaggatgtgacaaacgtggtcagacgggatgtggagaagtggggccccttcgatctggtgtacggcagcacccaacccctgggcagctcttgtgaccggtgccctggctggtacatgtttcagttccaccggatcctgcagtacgccctgccgagacaggagtcccagcggccattcttttggattttcatggacaacttgctgctgaccgaggatgaccaggaaactaccactcggttcctgcagaccgaagccgtgaccctgcaggacgtgagaggccgggactaccagaacgccatgcgggtgtggtccaacatccctggactgaaaagcaagcacgcacctctgacccctaaagaagaggagtacctgcaggcccaggtgcggagcagaagcaagctggacgcccctaaggtggatctgctggtgaagaattgcctcctgcccctgagagagtacttcaagtatttcagccagaatagtctgcccctgggaggcagcggcggcggcgccctggtgacatttgaggacgtcgccgtgcggttcacccaggaggaatgggctctgctggatccttctcagaaaatcctgtaccgggacgtgatgagagagacataccggaatctgacctccgtgggcatcaactgggaatgttgggaccttgaagcctgcttcagaagcctgggaagaaacctgagagtgcaggtggtgaagagaaagtgcgagctgaccaacagcggcccctgcgccgagggcggcccaagcagcggcgcccctcctcccagcggcggcagcccagccggctccccaacctctaccgaggagggcacctctgagtccgccacccccgagagcggccctggcacctccaccgagcccagcgagggcagcgcacccggcagccctgccggcagccccacctccacagaggagggaaccagcaccgagcccagcgaaggcagcgccccaggcaccagcaccgagcctagtgagcaggagattaaacggatcaacaagatcagaagaagacttgtgaaagacagcaacaccaagaaggccggcaagacaggccccatgaaaaccctgctggttagagtgatgacacccgatctgagagagcggctggaaaacctgagaaagaagcctgaaaatatcccccagcccatcagcaatacatctagagccaacctgaataagctgctgaccgattacaccgaaatgaagaaggcgatcctgcatgtgtactgggaagagttccagaaggaccctgtgggcctgatgagccgggtggcccagcctgccagcaagaagatcgatcagaacaagctgaaacctgagatggacgagaagggcaacctgaccaccgccggctttgcctgctctcagtgtggccagcccctgttcgtgtacaagctggagcaggtgtctgagaagggcaaggcttacaccaactacttcggacggtgcaatgtggccgagcacgaaaagctgatcctgctggcccagctgaagcccgagaaggatagcgacgaagccgtgacatatagcctgggaaagtttgggcagagggccctggatttctacagcattcatgtgaccaaggagtccacccaccccgtgaagcccctggcccagatcgccggaaacagatacgcctccggacctgtgggaaaggccctgagcgacgcatgtatgggcacaatcgcctccttcctgtctaagtaccaggacatcatcatcgaacaccagaaggtggtgaagggcaaccagaagagactggagagcctgcgggagctggccggcaaggaaaacctggaataccctagcgtgaccctgccacctcagcctcacaccaaggagggcgttgatgcctacaacgaagtgatcgcccgggtgcgaatgtgggtgaacctgaacctgtggcagaagctgaagctaagcagagatgatgccaagcctctgctgagactgaagggattcccttcctttcctctggtcgagagacaggccaacgaagtggactggtgggacatggtgtgtaacgtgaagaagctgatcaacgagaaaaaggaggatggcaaggtgttttggcagaatctggctggctacaagagacaggaagccctgagaccatacctgagcagcgaggaagatcggaagaagggaaagaaattcgctcggtaccagctgggcgacctgctgctgcacctggaaaagaagcacggcgaggactggggaaaggtgtacgacgaggcctgggagcggattgacaagaaagtggaaggcctgagcaagcacatcaagctggaagaggaacggagaagcgaggacgcccagagcaaggccgccctgaccgactggctgcgggctaaggccagcttcgtgatcgagggcctgaaggaggccgacaaggacgagttctgcagatgcgagctgaagctgcagaagtggtacggggacctgcggggaaagcccttcgccatcgaagccgagaacagcatcctggacatcagcggcttcagcaagcagtacaactgtgccttcatctggcagaaggacggcgtgaagaagctgaacctgtacctgatcatcaactacttcaagggcggcaagctgcggttcaagaagatcaaacctgaagccttcgaagccaacagattctacaccgtgatcaacaaaaagagcggcgagatcgtgcccatggaggtgaacttcaacttcgacgaccccaacctgatcatcctgcctctggcctttggcaagagacagggcagagaattcatctggaacgacctgctgtccctggaaaccggcagcctgaagctggccaacggaagagtgatcgagaagacactgtacaacagaagaacccggcaggatgagcctgccctgttcgtggccctgaccttcgagcggcgggaggtcctggactcctccaatatcaaaccaatgaacctgatcggcgtggcaagaggcgaaaacatccccgccgtgatcgccctgaccgaccccgagggctgcccactgagccggtttaaggatagcctgggaaacccaacccacatcctgagaatcggcgagagctataaggagaagcagcggaccatccaggccaagaaggaggtggagcagcggagagccggcggctacagccggaagtacgccagcaaagccaagaatctggcagacgatatggtgagaaacaccgctagagatctgctgtactacgccgtgacccaggatgccatgctgatcttcgccaacctgagccggggcttcggccggcagggcaagcggaccttcatggccgagagacagtacacacggatggaggactggctgaccgccaagctggcctacgagggcctgagcaagacctacctgtccaagacactggcccagtacacctccaagacatgcagcaactgtgggtttaccatcaccagcgccgactacgacagggtgctggagaagctgaagaagacagcaacaggctggatgaccacaattaacggcaaggagctgaaggtggagggccagattacctactacaacagatacaagagacagaacgtagtcaaggacctgtccgtcgagctggatagactgagcgaagaatctgtgaacaacgacatctcctcctggacaaagggcagaagcggagaagctctgagcctcctgaagaaaagattctcccatagacccgtgcaggagaagttcgtgtgcctgaactgcggcttcgagacacacgcagccgagcaagccgccctgaacatcgccagatcctggctgttcctgcggagccaggagtacaagaaataccagacaaacaagacaaccggcaacaccgataagagagccttcgtcgagacctggcagtccttttaccggaagaagcttaaggaggtgtggaaacctgccgtgcggtctggcggatctggcggaggctcctggcaggagagcctgaccttcaaggacgtggccgtggacttcacccaggaggagtggggcctgctggaccacagccagaagaggctgtacaaggaggtgatgctggagaacagccagaacctgctgagcctgggcatcccccccctgagggaggacctgatcagccacctggaggagggcgaggccagctggatcctggacaggaagggccccaggaagagctgccccgacgccgagaccaggggcggcccaagcagcggcgcccctcctcccagcggcggcagcccagccggctccccaacctctaccgaggagggcacctctgagtccgccacccccgagagcggccctggcacctccaccgagcccagcgagggcagcgcacccggcagccctgccggcagccccacctccacagaggagggaaccagcaccgagcccagcgaaggcagcgccccaggcaccagcaccgagcctagtgagcaggagattaaacggatcaacaagatcagaagaagacttgtgaaagacagcaacaccaagaaggccggcaagacaggccccatgaaaaccctgctggttagagtgatgacacccgatctgagagagcggctggaaaacctgagaaagaagcctgaaaatatcccccagcccatcagcaatacatctagagccaacctgaataagctgctgaccgattacaccgaaatgaagaaggcgatcctgcatgtgtactgggaagagttccagaaggaccctgtgggcctgatgagccgggtggcccagcctgccagcaagaagatcgatcagaacaagctgaaacctgagatggacgagaagggcaacctgaccaccgccggctttgcctgctctcagtgtggccagcccctgttcgtgtacaagctggagcaggtgtctgagaagggcaaggcttacaccaactacttcggacggtgcaatgtggccgagcacgaaaagctgatcctgctggcccagctgaagcccgagaaggatagcgacgaagccgtgacatatagcctgggaaagtttgggcagagggccctggatttctacagcattcatgtgaccaaggagtccacccaccccgtgaagcccctggcccagatcgccggaaacagatacgcctccggacctgtgggaaaggccctgagcgacgcatgtatgggcacaatcgcctccttcctgtctaagtaccaggacatcatcatcgaacaccagaaggtggtgaagggcaaccagaagagactggagagcctgcgggagctggccggcaaggaaaacctggaataccctagcgtgaccctgccacctcagcctcacaccaaggagggcgttgatgcctacaacgaagtgatcgcccgggtgcgaatgtgggtgaacctgaacctgtggcagaagctgaagctaagcagagatgatgccaagcctctgctgagactgaagggattcccttcctttcctctggtcgagagacaggccaacgaagtggactggtgggacatggtgtgtaacgtgaagaagctgatcaacgagaaaaaggaggatggcaaggtgttttggcagaatctggctggctacaagagacaggaagccctgagaccatacctgagcagcgaggaagatcggaagaagggaaagaaattcgctcggtaccagctgggcgacctgctgctgcacctggaaaagaagcacggcgaggactggggaaaggtgtacgacgaggcctgggagcggattgacaagaaagtggaaggcctgagcaagcacatcaagctggaagaggaacggagaagcgaggacgcccagagcaaggccgccctgaccgactggctgcgggctaaggccagcttcgtgatcgagggcctgaaggaggccgacaaggacgagttctgcagatgcgagctgaagctgcagaagtggtacggggacctgcggggaaagcccttcgccatcgaagccgagaacagcatcctggacatcagcggcttcagcaagcagtacaactgtgccttcatctggcagaaggacggcgtgaagaagctgaacctgtacctgatcatcaactacttcaagggcggcaagctgcggttcaagaagatcaaacctgaagccttcgaagccaacagattctacaccgtgatcaacaaaaagagcggcgagatcgtgcccatggaggtgaacttcaacttcgacgaccccaacctgatcatcctgcctctggcctttggcaagagacagggcagagaattcatctggaacgacctgctgtccctggaaaccggcagcctgaagctggccaacggaagagtgatcgagaagacactgtacaacagaagaacccggcaggatgagcctgccctgttcgtggccctgaccttcgagcggcgggaggtcctggactcctccaatatcaaaccaatgaacctgatcggcgtggcaagaggcgaaaacatccccgccgtgatcgccctgaccgaccccgagggctgcccactgagccggtttaaggatagcctgggaaacccaacccacatcctgagaatcggcgagagctataaggagaagcagcggaccatccaggccaagaaggaggtggagcagcggagagccggcggctacagccggaagtacgccagcaaagccaagaatctggcagacgatatggtgagaaacaccgctagagatctgctgtactacgccgtgacccaggatgccatgctgatcttcgccaacctgagccggggcttcggccggcagggcaagcggaccttcatggccgagagacagtacacacggatggaggactggctgaccgccaagctggcctacgagggcctgagcaagacctacctgtccaagacactggcccagtacacctccaagacatgcagcaactgtgggtttaccatcaccagcgccgactacgacagggtgctggagaagctgaagaagacagcaacaggctggatgaccacaattaacggcaaggagctgaaggtggagggccagattacctactacaacagatacaagagacagaacgtagtcaaggacctgtccgtcgagctggatagactgagcgaagaatctgtgaacaacgacatctcctcctggacaaagggcagaagcggagaagctctgagcctcctgaagaaaagattctcccatagacccgtgcaggagaagttcgtgtgcctgaactgcggcttcgagacacacgcagccgagcaagccgccctgaacatcgccagatcctggctgttcctgcggagccaggagtacaagaaataccagacaaacaagacaaccggcaacaccgataagagagccttcgtcgagacctggcagtccttttaccggaagaagcttaaggaggtgtggaaacctgccgtgcggtctggcggatctggcggaggctccttggcaggagagcctgaccttcaaggacgtggccgtggacttcacccaggaggagtggggcctgctggaccacagccagaagaggctgtacaaggaggtgatgctggagaacagccagaacctgctgagcctgggcatcccccccctgagggaggacctgatcagccacctggaggagggcgaggccagctggatcctggacaggaagggccccaggaagagctgccccgacgccgagaccaggggatctggctccggcagcggccccaagaaaaagagaaaagtctaagctgccttctgcggggcttgccttctggccatgcccttcttctctcccttgcacctgtacctcttggtctttgaataaagcctgagtaggaaggctagcaaaaaaaaaaaaaaaaaaaaaaaaaaaaaaaaaaaaaaaaaaaaaaaaaaaaaaaaaaaaaaaaaaaaaaaaaaaaaaaa

SEQ ID NO: 16652 - RNA, 9485 nt, synthetic construct
  source 1..9485: mol_type = other RNA
aggaaataagagagaaaagaagagtaagaagaaatataagagccaccatggcccctaagaagaagcgtaaagtgagccggatggaacgcctcgtctacgaggtgcggcagaagtgcagaaacatcgaggacatctgcatctcctgcggatctctgaacgtgaccctggagcacccactgttcatcggcggcatgtgccagaactgtaaaaactgttttctggagtgtgcctatcaatacgacgatgacggctaccagagctactgcaccatctgttgcggcggaagagaggtgctgatgtgtggaaataacaactgctgccggtgcttctgcgtggaatgcgtggacctgctggtgggccccggcgccgcccaggccgctattaaggaagatccttggaactgctacatgtgcggccacaagggcacatacggcctgctgagacggagagaggactggcctagcagactgcagatgttcttcgccaataaccacgaccaggagttcgacccccctaaggtgtaccctcccgtccccgccgagaagagaaagcccatccgggtcctgagcctgttcgatggcatcgccaccggtctgctggtgctgaaggacctgggcatccaggtggataggtacattgcctccgaggtgtgcgaggactccatcaccgtgggaatggtgcgtcatcagggcaagatcatgtacgtgggcgacgtgcggagcgtgacacagaagcatatccaggagtggggccctttcgacctggtgatcggcggcagcccttgcaatgacctgagcatcgtgaacccagcccggaagggcctgtacgagggaaccggcagactgttcttcgagttttacagactgctgcacgacgcccggcctaaggaaggcgacgaccggcccttcttttggctgttcgagaatgtggtggccatgggagtcagcgacaagcgggatattagccggttcctggagagcaaccccgtgatgatcgatgccaaggaagtgagcgccgcccaccgggccagatacttctggggcaatctgcctggcatgaacagacccctggccagcaccgtgaacgacaagctggagctgcaggagtgcctggagcacggccggatcgccaagttcagcaaggtgagaaccatcaccacccgaagcaacagcatcaaacaaggcaaggaccagcactttcctgtgttcatgaacgagaaggaggacatcctgtggtgtaccgagatggagagagtgttcgggttcccagtccactacacagatgtcagcaacatgtctagactggccagacagagactgctgggaagaagctggtccgtccctgtgatcagacacctgttcgcccctctgaaggagtacttcgcctgcgtgagcagcggcaacagcaacgccaacagccggggccccagcttctctagcggcctggtgccactgtccctgagagggagccacatgggccccatggagatctacaaaaccgtgagcgcctggaagcggcagcctgtgcgcgtgctgagcctgtttcggaatatcgataaagtcctgaaaagcctgggattcctggagagcggctctggctccggcggtggcaccctgaagtacgtggaggatgtgacaaacgtggtcagacgggatgtggagaagtggggccccttcgatctggtgtacggcagcacccaacccctgggcagctcttgtgaccggtgccctggctggtacatgtttcagttccaccggatcctgcagtacgccctgccgagacaggagtcccagcggccattcttttggattttcatggacaacttgctgctgaccgaggatgaccaggaaactaccactcggttcctgcagaccgaagccgtgaccctgcaggacgtgagaggccgggactaccagaacgccatgcgggtgtggtccaacatccctggactgaaaagcaagcacgcacctctgacccctaaagaagaggagtacctgcaggcccaggtgcggagcagaagcaagctggacgcccctaaggtggatctgctggtgaagaattgcctcctgcccctgagagagtacttcaagtatttcagccagaatagtctgcccctgggaggcagcggcggcggcgccctggtgacatttgaggacgtcgccgtgcggttcacccaggaggaatgggctctgctggatccttctcagaaaatcctgtaccgggacgtgatgagagagacataccggaatctgacctccgtgggcatcaactgggaatgttgggaccttgaagcctgcttcagaagcctgggaagaaacctgagagtgcaggtggtgaagagaaagtgcgagctgaccaacagcggcccctgcgccgagggcggcccaagcagcggcgcccctcctcccagcggcggcagcccagccggctccccaacctctaccgaggagggcacctctgagtccgccacccccgagagcggccctggcacctccaccgagcccagcgagggcagcgcacccggcagccctgccggcagccccacctccacagaggagggaaccagcaccgagcccagcgaaggcagcgccccaggcaccagcaccgagcctagtgagcaggagattaaacggatcaacaagatcagaagaagacttgtgaaagacagcaacaccaagaaggccggcaagacaggccccatgaaaaccctgctggttagagtgatgacacccgatctgagagagcggctggaaaacctgagaaagaagcctgaaaatatcccccagcccatcagcaatacatctagagccaacctgaataagctgctgaccgattacaccgaaatgaagaaggcgatcctgcatgtgtactgggaagagttccagaaggaccctgtgggcctgatgagccgggtggcccagcctgccagcaagaagatcgatcagaacaagctgaaacctgagatggacgagaagggcaacctgaccaccgccggctttgcctgctctcagtgtggccagcccctgttcgtgtacaagctggagcaggtgtctgagaagggcaaggcttacaccaactacttcggacggtgcaatgtggccgagcacgaaaagctgatcctgctggcccagctgaagcccgagaaggatagcgacgaagccgtgacatatagcctgggaaagtttgggcagagggccctggatttctacagcattcatgtgaccaaggagtccacccaccccgtgaagcccctggcccagatcgccggaaacagatacgcctccggacctgtgggaaaggccctgagcgacgcatgtatgggcacaatcgcctccttcctgtctaagtaccaggacatcatcatcgaacaccagaaggtggtgaagggcaaccagaagagactggagagcctgcgggagctggccggcaaggaaaacctggaataccctagcgtgaccctgccacctcagcctcacaccaaggagggcgttgatgcctacaacgaagtgatcgcccgggtgcgaatgtgggtgaacctgaacctgtggcagaagctgaagctaagcagagatgatgccaagcctctgctgagactgaagggattcccttcctttcctctggtcgagagacaggccaacgaagtggactggtgggacatggtgtgtaacgtgaagaagctgatcaacgagaaaaaggaggatggcaaggtgttttggcagaatctggctggctacaagagacaggaagccctgagaccatacctgagcagcgaggaagatcggaagaagggaaagaaattcgctcggtaccagctgggcgacctgctgctgcacctggaaaagaagcacggcgaggactggggaaaggtgtacgacgaggcctgggagcggattgacaagaaagtggaaggcctgagcaagcacatcaagctggaagaggaacggagaagcgaggacgcccagagcaaggccgccctgaccgactggctgcgggctaaggccagcttcgtgatcgagggcctgaaggaggccgacaaggacgagttctgcagatgcgagctgaagctgcagaagtggtacggggacctgcggggaaagcccttcgccatcgaagccgagaacagcatcctggacatcagcggcttcagcaagcagtacaactgtgccttcatctggcagaaggacggcgtgaagaagctgaacctgtacctgatcatcaactacttcaagggcggcaagctgcggttcaagaagatcaaacctgaagccttcgaagccaacagattctacaccgtgatcaacaaaaagagcggcgagatcgtgcccatggaggtgaacttcaacttcgacgaccccaacctgatcatcctgcctctggcctttggcaagagacagggcagagaattcatctggaacgacctgctgtccctggaaaccggcagcctgaagctggccaacggaagagtgatcgagaagacactgtacaacagaagaacccggcaggatgagcctgccctgttcgtggccctgaccttcgagcggcgggaggtcctggactcctccaatatcaaaccaatgaacctgatcggcgtggcaagaggcgaaaacatccccgccgtgatcgccctgaccgaccccgagggctgcccactgagccggtttaaggatagcctgggaaacccaacccacatcctgagaatcggcgagagctataaggagaagcagcggaccatccaggccaagaaggaggtggagcagcggagagccggcggctacagccggaagtacgccagcaaagccaagaatctggcagacgatatggtgagaaacaccgctagagatctgctgtactacgccgtgacccaggatgccatgctgatcttcgccaacctgagccggggcttcggccggcagggcaagcggaccttcatggccgagagacagtacacacggatggaggactggctgaccgccaagctggcctacgagggcctgagcaagacctacctgtccaagacactggcccagtacacctccaagacatgcagcaactgtgggtttaccatcaccagcgccgactacgacagggtgctggagaagctgaagaagacagcaacaggctggatgaccacaattaacggcaaggagctgaaggtggagggccagattacctactacaacagatacaagagacagaacgtagtcaaggacctgtccgtcgagctggatagactgagcgaagaatctgtgaacaacgacatctcctcctggacaaagggcagaagcggagaagctctgagcctcctgaagaaaagattctcccatagacccgtgcaggagaagttcgtgtgcctgaactgcggcttcgagacacacgcagccgagcaagccgccctgaacatcgccagatcctggctgttcctgcggagccaggagtacaagaaataccagacaaacaagacaaccggcaacaccgataagagagccttcgtcgagacctggcagtccttttaccggaagaagcttaaggaggtgtggaaacctgccgtgcggtctggcggatctggcggaggctccagccagggcagcctgagcttcagggacgtgaccgtgggcttcacctgggaggagtggcagcagctggaccccgcccagagggccctgtacagggacgtgatgctggagacctacagccacctgctgagcgtgggctactgcatccccaagcccgaggtgatcctgaagctggagcagggcgaggagccctggatcctggaggaggagagcagcagccagagcgtgcccgagctgatcaacagcggcggcccaagcagcggcgcccctcctcccagcggcggcagcccagccggctccccaacctctaccgaggagggcacctctgagtccgccacccccgagagcggccctggcacctccaccgagcccagcgagggcagcgcacccggcagccctgccggcagccccacctccacagaggagggaaccagcaccgagcccagcgaaggcagcgccccaggcaccagcaccgagcctagtgagcaggagattaaacggatcaacaagatcagaagaagacttgtgaaagacagcaacaccaagaaggccggcaagacaggccccatgaaaaccctgctggttagagtgatgacacccgatctgagagagcggctggaaaacctgagaaagaagcctgaaaatatcccccagcccatcagcaatacatctagagccaacctgaataagctgctgaccgattacaccgaaatgaagaaggcgatcctgcatgtgtactgggaagagttccagaaggaccctgtgggcctgatgagccgggtggcccagcctgccagcaagaagatcgatcagaacaagctgaaacctgagatggacgagaagggcaacctgaccaccgccggctttgcctgctctcagtgtggccagcccctgttcgtgtacaagctggagcaggtgtctgagaagggcaaggcttacaccaactacttcggacggtgcaatgtggccgagcacgaaaagctgatcctgctggcccagctgaagcccgagaaggatagcgacgaagccgtgacatatagcctgggaaagtttgggcagagggccctggatttctacagcattcatgtgaccaaggagtccacccaccccgtgaagcccctggcccagatcgccggaaacagatacgcctccggacctgtgggaaaggccctgagcgacgcatgtatgggcacaatcgcctccttcctgtctaagtaccaggacatcatcatcgaacaccagaaggtggtgaagggcaaccagaagagactggagagcctgcgggagctggccggcaaggaaaacctggaataccctagcgtgaccctgccacctcagcctcacaccaaggagggcgttgatgcctacaacgaagtgatcgcccgggtgcgaatgtgggtgaacctgaacctgtggcagaagctgaagctaagcagagatgatgccaagcctctgctgagactgaagggattcccttcctttcctctggtcgagagacaggccaacgaagtggactggtgggacatggtgtgtaacgtgaagaagctgatcaacgagaaaaaggaggatggcaaggtgttttggcagaatctggctggctacaagagacaggaagccctgagaccatacctgagcagcgaggaagatcggaagaagggaaagaaattcgctcggtaccagctgggcgacctgctgctgcacctggaaaagaagcacggcgaggactggggaaaggtgtacgacgaggcctgggagcggattgacaagaaagtggaaggcctgagcaagcacatcaagctggaagaggaacggagaagcgaggacgcccagagcaaggccgccctgaccgactggctgcgggctaaggccagcttcgtgatcgagggcctgaaggaggccgacaaggacgagttctgcagatgcgagctgaagctgcagaagtggtacggggacctgcggggaaagcccttcgccatcgaagccgagaacagcatcctggacatcagcggcttcagcaagcagtacaactgtgccttcatctggcagaaggacggcgtgaagaagctgaacctgtacctgatcatcaactacttcaagggcggcaagctgcggttcaagaagatcaaacctgaagccttcgaagccaacagattctacaccgtgatcaacaaaaagagcggcgagatcgtgcccatggaggtgaacttcaacttcgacgaccccaacctgatcatcctgcctctggcctttggcaagagacagggcagagaattcatctggaacgacctgctgtccctggaaaccggcagcctgaagctggccaacggaagagtgatcgagaagacactgtacaacagaagaacccggcaggatgagcctgccctgttcgtggccctgaccttcgagcggcgggaggtcctggactcctccaatatcaaaccaatgaacctgatcggcgtggcaagaggcgaaaacatccccgccgtgatcgccctgaccgaccccgagggctgcccactgagccggtttaaggatagcctgggaaacccaacccacatcctgagaatcggcgagagctataaggagaagcagcggaccatccaggccaagaaggaggtggagcagcggagagccggcggctacagccggaagtacgccagcaaagccaagaatctggcagacgatatggtgagaaacaccgctagagatctgctgtactacgccgtgacccaggatgccatgctgatcttcgccaacctgagccggggcttcggccggcagggcaagcggaccttcatggccgagagacagtacacacggatggaggactggctgaccgccaagctggcctacgagggcctgagcaagacctacctgtccaagacactggcccagtacacctccaagacatgcagcaactgtgggtttaccatcaccagcgccgactacgacagggtgctggagaagctgaagaagacagcaacaggctggatgaccacaattaacggcaaggagctgaaggtggagggccagattacctactacaacagatacaagagacagaacgtagtcaaggacctgtccgtcgagctggatagactgagcgaagaatctgtgaacaacgacatctcctcctggacaaagggcagaagcggagaagctctgagcctcctgaagaaaagattctcccatagacccgtgcaggagaagttcgtgtgcctgaactgcggcttcgagacacacgcagccgagcaagccgccctgaacatcgccagatcctggctgttcctgcggagccaggagtacaagaaataccagacaaacaagacaaccggcaacaccgataagagagccttcgtcgagacctggcagtccttttaccggaagaagcttaaggaggtgtggaaacctgccgtgcggtctggcggatctggcggaggctcctagccagggcagcctgagcttcagggacgtgaccgtgggcttcacctgggaggagtggcagcagctggaccccgcccagagggccctgtacagggacgtgatgctggagacctacagccacctgctgagcgtgggctactgcatccccaagcccgaggtgatcctgaagctggagcagggcgaggagccctggatcctggaggaggagagcagcagccagagcgtgcccgagctgatcaacagcggatctggctccggcagcggccccaagaaaaagagaaaagtctaagctgccttctgcggggcttgccttctggccatgcccttcttctctcccttgcacctgtacctcttggtctttgaataaagcctgagtaggaaggctagcaaaaaaaaaaaaaaaaaaaaaaaaaaaaaaaaaaaaaaaaaaaaaaaaaaaaaaaaaaaaaaaaaaaaaaaaaaaaaaaa

SEQ ID NO: 16653 - RNA, 9485 nt, synthetic construct
  source 1..9485: mol_type = other RNA
aggaaataagagagaaaagaagagtaagaagaaatataagagccaccatggcccctaagaagaagcgtaaagtgagccggatggaacgcctcgtctacgaggtgcggcagaagtgcagaaacatcgaggacatctgcatctcctgcggatctctgaacgtgaccctggagcacccactgttcatcggcggcatgtgccagaactgtaaaaactgttttctggagtgtgcctatcaatacgacgatgacggctaccagagctactgcaccatctgttgcggcggaagagaggtgctgatgtgtggaaataacaactgctgccggtgcttctgcgtggaatgcgtggacctgctggtgggccccggcgccgcccaggccgctattaaggaagatccttggaactgctacatgtgcggccacaagggcacatacggcctgctgagacggagagaggactggcctagcagactgcagatgttcttcgccaataaccacgaccaggagttcgacccccctaaggtgtaccctcccgtccccgccgagaagagaaagcccatccgggtcctgagcctgttcgatggcatcgccaccggtctgctggtgctgaaggacctgggcatccaggtggataggtacattgcctccgaggtgtgcgaggactccatcaccgtgggaatggtgcgtcatcagggcaagatcatgtacgtgggcgacgtgcggagcgtgacacagaagcatatccaggagtggggccctttcgacctggtgatcggcggcagcccttgcaatgacctgagcatcgtgaacccagcccggaagggcctgtacgagggaaccggcagactgttcttcgagttttacagactgctgcacgacgcccggcctaaggaaggcgacgaccggcccttcttttggctgttcgagaatgtggtggccatgggagtcagcgacaagcgggatattagccggttcctggagagcaaccccgtgatgatcgatgccaaggaagtgagcgccgcccaccgggccagatacttctggggcaatctgcctggcatgaacagacccctggccagcaccgtgaacgacaagctggagctgcaggagtgcctggagcacggccggatcgccaagttcagcaaggtgagaaccatcaccacccgaagcaacagcatcaaacaaggcaaggaccagcactttcctgtgttcatgaacgagaaggaggacatcctgtggtgtaccgagatggagagagtgttcgggttcccagtccactacacagatgtcagcaacatgtctagactggccagacagagactgctgggaagaagctggtccgtccctgtgatcagacacctgttcgcccctctgaaggagtacttcgcctgcgtgagcagcggcaacagcaacgccaacagccggggccccagcttctctagcggcctggtgccactgtccctgagagggagccacatgggccccatggagatctacaaaaccgtgagcgcctggaagcggcagcctgtgcgcgtgctgagcctgtttcggaatatcgataaagtcctgaaaagcctgggattcctggagagcggctctggctccggcggtggcaccctgaagtacgtggaggatgtgacaaacgtggtcagacgggatgtggagaagtggggccccttcgatctggtgtacggcagcacccaacccctgggcagctcttgtgaccggtgccctggctggtacatgtttcagttccaccggatcctgcagtacgccctgccgagacaggagtcccagcggccattcttttggattttcatggacaacttgctgctgaccgaggatgaccaggaaactaccactcggttcctgcagaccgaagccgtgaccctgcaggacgtgagaggccgggactaccagaacgccatgcgggtgtggtccaacatccctggactgaaaagcaagcacgcacctctgacccctaaagaagaggagtacctgcaggcccaggtgcggagcagaagcaagctggacgcccctaaggtggatctgctggtgaagaattgcctcctgcccctgagagagtacttcaagtatttcagccagaatagtctgcccctgggaggcagcggcggcggcgccctggtgacatttgaggacgtcgccgtgcggttcacccaggaggaatgggctctgctggatccttctcagaaaatcctgtaccgggacgtgatgagagagacataccggaatctgacctccgtgggcatcaactgggaatgttgggaccttgaagcctgcttcagaagcctgggaagaaacctgagagtgcaggtggtgaagagaaagtgcgagctgaccaacagcggcccctgcgccgagggcggcccaagcagcggcgcccctcctcccagcggcggcagcccagccggctccccaacctctaccgaggagggcacctctgagtccgccacccccgagagcggccctggcacctccaccgagcccagcgagggcagcgcacccggcagccctgccggcagccccacctccacagaggagggaaccagcaccgagcccagcgaaggcagcgccccaggcaccagcaccgagcctagtgagcaggagattaaacggatcaacaagatcagaagaagacttgtgaaagacagcaacaccaagaaggccggcaagacaggccccatgaaaaccctgctggttagagtgatgacacccgatctgagagagcggctggaaaacctgagaaagaagcctgaaaatatcccccagcccatcagcaatacatctagagccaacctgaataagctgctgaccgattacaccgaaatgaagaaggcgatcctgcatgtgtactgggaagagttccagaaggaccctgtgggcctgatgagccgggtggcccagcctgccagcaagaagatcgatcagaacaagctgaaacctgagatggacgagaagggcaacctgaccaccgccggctttgcctgctctcagtgtggccagcccctgttcgtgtacaagctggagcaggtgtctgagaagggcaaggcttacaccaactacttcggacggtgcaatgtggccgagcacgaaaagctgatcctgctggcccagctgaagcccgagaaggatagcgacgaagccgtgacatatagcctgggaaagtttgggcagagggccctggatttctacagcattcatgtgaccaaggagtccacccaccccgtgaagcccctggcccagatcgccggaaacagatacgcctccggacctgtgggaaaggccctgagcgacgcatgtatgggcacaatcgcctccttcctgtctaagtaccaggacatcatcatcgaacaccagaaggtggtgaagggcaaccagaagagactggagagcctgcgggagctggccggcaaggaaaacctggaataccctagcgtgaccctgccacctcagcctcacaccaaggagggcgttgatgcctacaacgaagtgatcgcccgggtgcgaatgtgggtgaacctgaacctgtggcagaagctgaagctaagcagagatgatgccaagcctctgctgagactgaagggattcccttcctttcctctggtcgagagacaggccaacgaagtggactggtgggacatggtgtgtaacgtgaagaagctgatcaacgagaaaaaggaggatggcaaggtgttttggcagaatctggctggctacaagagacaggaagccctgagaccatacctgagcagcgaggaagatcggaagaagggaaagaaattcgctcggtaccagctgggcgacctgctgctgcacctggaaaagaagcacggcgaggactggggaaaggtgtacgacgaggcctgggagcggattgacaagaaagtggaaggcctgagcaagcacatcaagctggaagaggaacggagaagcgaggacgcccagagcaaggccgccctgaccgactggctgcgggctaaggccagcttcgtgatcgagggcctgaaggaggccgacaaggacgagttctgcagatgcgagctgaagctgcagaagtggtacggggacctgcggggaaagcccttcgccatcgaagccgagaacagcatcctggacatcagcggcttcagcaagcagtacaactgtgccttcatctggcagaaggacggcgtgaagaagctgaacctgtacctgatcatcaactacttcaagggcggcaagctgcggttcaagaagatcaaacctgaagccttcgaagccaacagattctacaccgtgatcaacaaaaagagcggcgagatcgtgcccatggaggtgaacttcaacttcgacgaccccaacctgatcatcctgcctctggcctttggcaagagacagggcagagaattcatctggaacgacctgctgtccctggaaaccggcagcctgaagctggccaacggaagagtgatcgagaagacactgtacaacagaagaacccggcaggatgagcctgccctgttcgtggccctgaccttcgagcggcgggaggtcctggactcctccaatatcaaaccaatgaacctgatcggcgtggcaagaggcgaaaacatccccgccgtgatcgccctgaccgaccccgagggctgcccactgagccggtttaaggatagcctgggaaacccaacccacatcctgagaatcggcgagagctataaggagaagcagcggaccatccaggccaagaaggaggtggagcagcggagagccggcggctacagccggaagtacgccagcaaagccaagaatctggcagacgatatggtgagaaacaccgctagagatctgctgtactacgccgtgacccaggatgccatgctgatcttcgccaacctgagccggggcttcggccggcagggcaagcggaccttcatggccgagagacagtacacacggatggaggactggctgaccgccaagctggcctacgagggcctgagcaagacctacctgtccaagacactggcccagtacacctccaagacatgcagcaactgtgggtttaccatcaccagcgccgactacgacagggtgctggagaagctgaagaagacagcaacaggctggatgaccacaattaacggcaaggagctgaaggtggagggccagattacctactacaacagatacaagagacagaacgtagtcaaggacctgtccgtcgagctggatagactgagcgaagaatctgtgaacaacgacatctcctcctggacaaagggcagaagcggagaagctctgagcctcctgaagaaaagattctcccatagacccgtgcaggagaagttcgtgtgcctgaactgcggcttcgagacacacgcagccgagcaagccgccctgaacatcgccagatcctggctgttcctgcggagccaggagtacaagaaataccagacaaacaagacaaccggcaacaccgataagagagccttcgtcgagacctggcagtccttttaccggaagaagcttaaggaggtgtggaaacctgccgtgcggtctggcggatctggcggaggctccatggccggcgaggccgaggcccagctggaccccagcctgcagggcctggtgatgttcgaggacgtgaccgtgtacttcagcagggaggagtggggcctgctgaacgtgacccagaagggcctgtacagggacgtgatgctggagaacttcgccctggtgagcagcctgggcctggcccccagcaggagccccgtgttcacccagctggaggacgacgagcagagctgggtgcccagctgggtgggcggcccaagcagcggcgcccctcctcccagcggcggcagcccagccggctccccaacctctaccgaggagggcacctctgagtccgccacccccgagagcggccctggcacctccaccgagcccagcgagggcagcgcacccggcagccctgccggcagccccacctccacagaggagggaaccagcaccgagcccagcgaaggcagcgccccaggcaccagcaccgagcctagtgagcaggagattaaacggatcaacaagatcagaagaagacttgtgaaagacagcaacaccaagaaggccggcaagacaggccccatgaaaaccctgctggttagagtgatgacacccgatctgagagagcggctggaaaacctgagaaagaagcctgaaaatatcccccagcccatcagcaatacatctagagccaacctgaataagctgctgaccgattacaccgaaatgaagaaggcgatcctgcatgtgtactgggaagagttccagaaggaccctgtgggcctgatgagccgggtggcccagcctgccagcaagaagatcgatcagaacaagctgaaacctgagatggacgagaagggcaacctgaccaccgccggctttgcctgctctcagtgtggccagcccctgttcgtgtacaagctggagcaggtgtctgagaagggcaaggcttacaccaactacttcggacggtgcaatgtggccgagcacgaaaagctgatcctgctggcccagctgaagcccgagaaggatagcgacgaagccgtgacatatagcctgggaaagtttgggcagagggccctggatttctacagcattcatgtgaccaaggagtccacccaccccgtgaagcccctggcccagatcgccggaaacagatacgcctccggacctgtgggaaaggccctgagcgacgcatgtatgggcacaatcgcctccttcctgtctaagtaccaggacatcatcatcgaacaccagaaggtggtgaagggcaaccagaagagactggagagcctgcgggagctggccggcaaggaaaacctggaataccctagcgtgaccctgccacctcagcctcacaccaaggagggcgttgatgcctacaacgaagtgatcgcccgggtgcgaatgtgggtgaacctgaacctgtggcagaagctgaagctaagcagagatgatgccaagcctctgctgagactgaagggattcccttcctttcctctggtcgagagacaggccaacgaagtggactggtgggacatggtgtgtaacgtgaagaagctgatcaacgagaaaaaggaggatggcaaggtgttttggcagaatctggctggctacaagagacaggaagccctgagaccatacctgagcagcgaggaagatcggaagaagggaaagaaattcgctcggtaccagctgggcgacctgctgctgcacctggaaaagaagcacggcgaggactggggaaaggtgtacgacgaggcctgggagcggattgacaagaaagtggaaggcctgagcaagcacatcaagctggaagaggaacggagaagcgaggacgcccagagcaaggccgccctgaccgactggctgcgggctaaggccagcttcgtgatcgagggcctgaaggaggccgacaaggacgagttctgcagatgcgagctgaagctgcagaagtggtacggggacctgcggggaaagcccttcgccatcgaagccgagaacagcatcctggacatcagcggcttcagcaagcagtacaactgtgccttcatctggcagaaggacggcgtgaagaagctgaacctgtacctgatcatcaactacttcaagggcggcaagctgcggttcaagaagatcaaacctgaagccttcgaagccaacagattctacaccgtgatcaacaaaaagagcggcgagatcgtgcccatggaggtgaacttcaacttcgacgaccccaacctgatcatcctgcctctggcctttggcaagagacagggcagagaattcatctggaacgacctgctgtccctggaaaccggcagcctgaagctggccaacggaagagtgatcgagaagacactgtacaacagaagaacccggcaggatgagcctgccctgttcgtggccctgaccttcgagcggcgggaggtcctggactcctccaatatcaaaccaatgaacctgatcggcgtggcaagaggcgaaaacatccccgccgtgatcgccctgaccgaccccgagggctgcccactgagccggtttaaggatagcctgggaaacccaacccacatcctgagaatcggcgagagctataaggagaagcagcggaccatccaggccaagaaggaggtggagcagcggagagccggcggctacagccggaagtacgccagcaaagccaagaatctggcagacgatatggtgagaaacaccgctagagatctgctgtactacgccgtgacccaggatgccatgctgatcttcgccaacctgagccggggcttcggccggcagggcaagcggaccttcatggccgagagacagtacacacggatggaggactggctgaccgccaagctggcctacgagggcctgagcaagacctacctgtccaagacactggcccagtacacctccaagacatgcagcaactgtgggtttaccatcaccagcgccgactacgacagggtgctggagaagctgaagaagacagcaacaggctggatgaccacaattaacggcaaggagctgaaggtggagggccagattacctactacaacagatacaagagacagaacgtagtcaaggacctgtccgtcgagctggatagactgagcgaagaatctgtgaacaacgacatctcctcctggacaaagggcagaagcggagaagctctgagcctcctgaagaaaagattctcccatagacccgtgcaggagaagttcgtgtgcctgaactgcggcttcgagacacacgcagccgagcaagccgccctgaacatcgccagatcctggctgttcctgcggagccaggagtacaagaaataccagacaaacaagacaaccggcaacaccgataagagagccttcgtcgagacctggcagtccttttaccggaagaagcttaaggaggtgtggaaacctgccgtgcggtctggcggatctggcggaggctcctatggccggcgaggccgaggcccagctggaccccagcctgcagggcctggtgatgttcgaggacgtgaccgtgtacttcagcagggaggagtggggcctgctgaacgtgacccagaagggcctgtacagggacgtgatgctggagaacttcgccctggtgagcagcctgggcctggcccccagcaggagccccgtgttcacccagctggaggacgacgagcagagctgggtgcccagctgggtgggatctggctccggcagcggccccaagaaaaagagaaaagtctaagctgccttctgcggggcttgccttctggccatgcccttcttctctcccttgcacctgtacctcttggtctttgaataaagcctgagtaggaaggctagcaaaaaaaaaaaaaaaaaaaaaaaaaaaaaaaaaaaaaaaaaaaaaaaaaaaaaaaaaaaaaaaaaaaaaaaaaaaaaaaa

SEQ ID NO: 16654 - RNA, 9485 nt, synthetic construct
  source 1..9485: mol_type = other RNA
aggaaataagagagaaaagaagagtaagaagaaatataagagccaccatggcccctaagaagaagcgtaaagtgagccggatggaacgcctcgtctacgaggtgcggcagaagtgcagaaacatcgaggacatctgcatctcctgcggatctctgaacgtgaccctggagcacccactgttcatcggcggcatgtgccagaactgtaaaaactgttttctggagtgtgcctatcaatacgacgatgacggctaccagagctactgcaccatctgttgcggcggaagagaggtgctgatgtgtggaaataacaactgctgccggtgcttctgcgtggaatgcgtggacctgctggtgggccccggcgccgcccaggccgctattaaggaagatccttggaactgctacatgtgcggccacaagggcacatacggcctgctgagacggagagaggactggcctagcagactgcagatgttcttcgccaataaccacgaccaggagttcgacccccctaaggtgtaccctcccgtccccgccgagaagagaaagcccatccgggtcctgagcctgttcgatggcatcgccaccggtctgctggtgctgaaggacctgggcatccaggtggataggtacattgcctccgaggtgtgcgaggactccatcaccgtgggaatggtgcgtcatcagggcaagatcatgtacgtgggcgacgtgcggagcgtgacacagaagcatatccaggagtggggccctttcgacctggtgatcggcggcagcccttgcaatgacctgagcatcgtgaacccagcccggaagggcctgtacgagggaaccggcagactgttcttcgagttttacagactgctgcacgacgcccggcctaaggaaggcgacgaccggcccttcttttggctgttcgagaatgtggtggccatgggagtcagcgacaagcgggatattagccggttcctggagagcaaccccgtgatgatcgatgccaaggaagtgagcgccgcccaccgggccagatacttctggggcaatctgcctggcatgaacagacccctggccagcaccgtgaacgacaagctggagctgcaggagtgcctggagcacggccggatcgccaagttcagcaaggtgagaaccatcaccacccgaagcaacagcatcaaacaaggcaaggaccagcactttcctgtgttcatgaacgagaaggaggacatcctgtggtgtaccgagatggagagagtgttcgggttcccagtccactacacagatgtcagcaacatgtctagactggccagacagagactgctgggaagaagctggtccgtccctgtgatcagacacctgttcgcccctctgaaggagtacttcgcctgcgtgagcagcggcaacagcaacgccaacagccggggccccagcttctctagcggcctggtgccactgtccctgagagggagccacatgggccccatggagatctacaaaaccgtgagcgcctggaagcggcagcctgtgcgcgtgctgagcctgtttcggaatatcgataaagtcctgaaaagcctgggattcctggagagcggctctggctccggcggtggcaccctgaagtacgtggaggatgtgacaaacgtggtcagacgggatgtggagaagtggggccccttcgatctggtgtacggcagcacccaacccctgggcagctcttgtgaccggtgccctggctggtacatgtttcagttccaccggatcctgcagtacgccctgccgagacaggagtcccagcggccattcttttggattttcatggacaacttgctgctgaccgaggatgaccaggaaactaccactcggttcctgcagaccgaagccgtgaccctgcaggacgtgagaggccgggactaccagaacgccatgcgggtgtggtccaacatccctggactgaaaagcaagcacgcacctctgacccctaaagaagaggagtacctgcaggcccaggtgcggagcagaagcaagctggacgcccctaaggtggatctgctggtgaagaattgcctcctgcccctgagagagtacttcaagtatttcagccagaatagtctgcccctgggaggcagcggcggcggcgccctggtgacatttgaggacgtcgccgtgcggttcacccaggaggaatgggctctgctggatccttctcagaaaatcctgtaccgggacgtgatgagagagacataccggaatctgacctccgtgggcatcaactgggaatgttgggaccttgaagcctgcttcagaagcctgggaagaaacctgagagtgcaggtggtgaagagaaagtgcgagctgaccaacagcggcccctgcgccgagggcggcccaagcagcggcgcccctcctcccagcggcggcagcccagccggctccccaacctctaccgaggagggcacctctgagtccgccacccccgagagcggccctggcacctccaccgagcccagcgagggcagcgcacccggcagccctgccggcagccccacctccacagaggagggaaccagcaccgagcccagcgaaggcagcgccccaggcaccagcaccgagcctagtgagcaggagattaaacggatcaacaagatcagaagaagacttgtgaaagacagcaacaccaagaaggccggcaagacaggccccatgaaaaccctgctggttagagtgatgacacccgatctgagagagcggctggaaaacctgagaaagaagcctgaaaatatcccccagcccatcagcaatacatctagagccaacctgaataagctgctgaccgattacaccgaaatgaagaaggcgatcctgcatgtgtactgggaagagttccagaaggaccctgtgggcctgatgagccgggtggcccagcctgccagcaagaagatcgatcagaacaagctgaaacctgagatggacgagaagggcaacctgaccaccgccggctttgcctgctctcagtgtggccagcccctgttcgtgtacaagctggagcaggtgtctgagaagggcaaggcttacaccaactacttcggacggtgcaatgtggccgagcacgaaaagctgatcctgctggcccagctgaagcccgagaaggatagcgacgaagccgtgacatatagcctgggaaagtttgggcagagggccctggatttctacagcattcatgtgaccaaggagtccacccaccccgtgaagcccctggcccagatcgccggaaacagatacgcctccggacctgtgggaaaggccctgagcgacgcatgtatgggcacaatcgcctccttcctgtctaagtaccaggacatcatcatcgaacaccagaaggtggtgaagggcaaccagaagagactggagagcctgcgggagctggccggcaaggaaaacctggaataccctagcgtgaccctgccacctcagcctcacaccaaggagggcgttgatgcctacaacgaagtgatcgcccgggtgcgaatgtgggtgaacctgaacctgtggcagaagctgaagctaagcagagatgatgccaagcctctgctgagactgaagggattcccttcctttcctctggtcgagagacaggccaacgaagtggactggtgggacatggtgtgtaacgtgaagaagctgatcaacgagaaaaaggaggatggcaaggtgttttggcagaatctggctggctacaagagacaggaagccctgagaccatacctgagcagcgaggaagatcggaagaagggaaagaaattcgctcggtaccagctgggcgacctgctgctgcacctggaaaagaagcacggcgaggactggggaaaggtgtacgacgaggcctgggagcggattgacaagaaagtggaaggcctgagcaagcacatcaagctggaagaggaacggagaagcgaggacgcccagagcaaggccgccctgaccgactggctgcgggctaaggccagcttcgtgatcgagggcctgaaggaggccgacaaggacgagttctgcagatgcgagctgaagctgcagaagtggtacggggacctgcggggaaagcccttcgccatcgaagccgagaacagcatcctggacatcagcggcttcagcaagcagtacaactgtgccttcatctggcagaaggacggcgtgaagaagctgaacctgtacctgatcatcaactacttcaagggcggcaagctgcggttcaagaagatcaaacctgaagccttcgaagccaacagattctacaccgtgatcaacaaaaagagcggcgagatcgtgcccatggaggtgaacttcaacttcgacgaccccaacctgatcatcctgcctctggcctttggcaagagacagggcagagaattcatctggaacgacctgctgtccctggaaaccggcagcctgaagctggccaacggaagagtgatcgagaagacactgtacaacagaagaacccggcaggatgagcctgccctgttcgtggccctgaccttcgagcggcgggaggtcctggactcctccaatatcaaaccaatgaacctgatcggcgtggcaagaggcgaaaacatccccgccgtgatcgccctgaccgaccccgagggctgcccactgagccggtttaaggatagcctgggaaacccaacccacatcctgagaatcggcgagagctataaggagaagcagcggaccatccaggccaagaaggaggtggagcagcggagagccggcggctacagccggaagtacgccagcaaagccaagaatctggcagacgatatggtgagaaacaccgctagagatctgctgtactacgccgtgacccaggatgccatgctgatcttcgccaacctgagccggggcttcggccggcagggcaagcggaccttcatggccgagagacagtacacacggatggaggactggctgaccgccaagctggcctacgagggcctgagcaagacctacctgtccaagacactggcccagtacacctccaagacatgcagcaactgtgggtttaccatcaccagcgccgactacgacagggtgctggagaagctgaagaagacagcaacaggctggatgaccacaattaacggcaaggagctgaaggtggagggccagattacctactacaacagatacaagagacagaacgtagtcaaggacctgtccgtcgagctggatagactgagcgaagaatctgtgaacaacgacatctcctcctggacaaagggcagaagcggagaagctctgagcctcctgaagaaaagattctcccatagacccgtgcaggagaagttcgtgtgcctgaactgcggcttcgagacacacgcagccgagcaagccgccctgaacatcgccagatcctggctgttcctgcggagccaggagtacaagaaataccagacaaacaagacaaccggcaacaccgataagagagccttcgtcgagacctggcagtccttttaccggaagaagcttaaggaggtgtggaaacctgccgtgcggtctggcggatctggcggaggctccatggagctgctgagcttcgaggacgtggccatgtacttcaccagggaggagtggggccacctggactggggccagaaggacctgtacagggacgtgatgctggagaactacaggaacatggtgctgctgggcttccagttccccaagcccgaggtgatctgccagctggagaactgggacgagcagtggatcctggacctgcccagggccggcagcaggaaggccagcggcagcgcctgccccggcggcccaagcagcggcgcccctcctcccagcggcggcagcccagccggctccccaacctctaccgaggagggcacctctgagtccgccacccccgagagcggccctggcacctccaccgagcccagcgagggcagcgcacccggcagccctgccggcagccccacctccacagaggagggaaccagcaccgagcccagcgaaggcagcgccccaggcaccagcaccgagcctagtgagcaggagattaaacggatcaacaagatcagaagaagacttgtgaaagacagcaacaccaagaaggccggcaagacaggccccatgaaaaccctgctggttagagtgatgacacccgatctgagagagcggctggaaaacctgagaaagaagcctgaaaatatcccccagcccatcagcaatacatctagagccaacctgaataagctgctgaccgattacaccgaaatgaagaaggcgatcctgcatgtgtactgggaagagttccagaaggaccctgtgggcctgatgagccgggtggcccagcctgccagcaagaagatcgatcagaacaagctgaaacctgagatggacgagaagggcaacctgaccaccgccggctttgcctgctctcagtgtggccagcccctgttcgtgtacaagctggagcaggtgtctgagaagggcaaggcttacaccaactacttcggacggtgcaatgtggccgagcacgaaaagctgatcctgctggcccagctgaagcccgagaaggatagcgacgaagccgtgacatatagcctgggaaagtttgggcagagggccctggatttctacagcattcatgtgaccaaggagtccacccaccccgtgaagcccctggcccagatcgccggaaacagatacgcctccggacctgtgggaaaggccctgagcgacgcatgtatgggcacaatcgcctccttcctgtctaagtaccaggacatcatcatcgaacaccagaaggtggtgaagggcaaccagaagagactggagagcctgcgggagctggccggcaaggaaaacctggaataccctagcgtgaccctgccacctcagcctcacaccaaggagggcgttgatgcctacaacgaagtgatcgcccgggtgcgaatgtgggtgaacctgaacctgtggcagaagctgaagctaagcagagatgatgccaagcctctgctgagactgaagggattcccttcctttcctctggtcgagagacaggccaacgaagtggactggtgggacatggtgtgtaacgtgaagaagctgatcaacgagaaaaaggaggatggcaaggtgttttggcagaatctggctggctacaagagacaggaagccctgagaccatacctgagcagcgaggaagatcggaagaagggaaagaaattcgctcggtaccagctgggcgacctgctgctgcacctggaaaagaagcacggcgaggactggggaaaggtgtacgacgaggcctgggagcggattgacaagaaagtggaaggcctgagcaagcacatcaagctggaagaggaacggagaagcgaggacgcccagagcaaggccgccctgaccgactggctgcgggctaaggccagcttcgtgatcgagggcctgaaggaggccgacaaggacgagttctgcagatgcgagctgaagctgcagaagtggtacggggacctgcggggaaagcccttcgccatcgaagccgagaacagcatcctggacatcagcggcttcagcaagcagtacaactgtgccttcatctggcagaaggacggcgtgaagaagctgaacctgtacctgatcatcaactacttcaagggcggcaagctgcggttcaagaagatcaaacctgaagccttcgaagccaacagattctacaccgtgatcaacaaaaagagcggcgagatcgtgcccatggaggtgaacttcaacttcgacgaccccaacctgatcatcctgcctctggcctttggcaagagacagggcagagaattcatctggaacgacctgctgtccctggaaaccggcagcctgaagctggccaacggaagagtgatcgagaagacactgtacaacagaagaacccggcaggatgagcctgccctgttcgtggccctgaccttcgagcggcgggaggtcctggactcctccaatatcaaaccaatgaacctgatcggcgtggcaagaggcgaaaacatccccgccgtgatcgccctgaccgaccccgagggctgcccactgagccggtttaaggatagcctgggaaacccaacccacatcctgagaatcggcgagagctataaggagaagcagcggaccatccaggccaagaaggaggtggagcagcggagagccggcggctacagccggaagtacgccagcaaagccaagaatctggcagacgatatggtgagaaacaccgctagagatctgctgtactacgccgtgacccaggatgccatgctgatcttcgccaacctgagccggggcttcggccggcagggcaagcggaccttcatggccgagagacagtacacacggatggaggactggctgaccgccaagctggcctacgagggcctgagcaagacctacctgtccaagacactggcccagtacacctccaagacatgcagcaactgtgggtttaccatcaccagcgccgactacgacagggtgctggagaagctgaagaagacagcaacaggctggatgaccacaattaacggcaaggagctgaaggtggagggccagattacctactacaacagatacaagagacagaacgtagtcaaggacctgtccgtcgagctggatagactgagcgaagaatctgtgaacaacgacatctcctcctggacaaagggcagaagcggagaagctctgagcctcctgaagaaaagattctcccatagacccgtgcaggagaagttcgtgtgcctgaactgcggcttcgagacacacgcagccgagcaagccgccctgaacatcgccagatcctggctgttcctgcggagccaggagtacaagaaataccagacaaacaagacaaccggcaacaccgataagagagccttcgtcgagacctggcagtccttttaccggaagaagcttaaggaggtgtggaaacctgccgtgcggtctggcggatctggcggaggctcctatggagctgctgagcttcgaggacgtggccatgtacttcaccagggaggagtggggccacctggactggggccagaaggacctgtacagggacgtgatgctggagaactacaggaacatggtgctgctgggcttccagttccccaagcccgaggtgatctgccagctggagaactgggacgagcagtggatcctggacctgcccagggccggcagcaggaaggccagcggcagcgcctgccccggatctggctccggcagcggccccaagaaaaagagaaaagtctaagctgccttctgcggggcttgccttctggccatgcccttcttctctcccttgcacctgtacctcttggtctttgaataaagcctgagtaggaaggctagcaaaaaaaaaaaaaaaaaaaaaaaaaaaaaaaaaaaaaaaaaaaaaaaaaaaaaaaaaaaaaaaaaaaaaaaaaaaaaaaa

SEQ ID NO: 16655 - RNA, 9485 nt, synthetic construct
  source 1..9485: mol_type = other RNA
aggaaataagagagaaaagaagagtaagaagaaatataagagccaccatggcccctaagaagaagcgtaaagtgagccggatggaacgcctcgtctacgaggtgcggcagaagtgcagaaacatcgaggacatctgcatctcctgcggatctctgaacgtgaccctggagcacccactgttcatcggcggcatgtgccagaactgtaaaaactgttttctggagtgtgcctatcaatacgacgatgacggctaccagagctactgcaccatctgttgcggcggaagagaggtgctgatgtgtggaaataacaactgctgccggtgcttctgcgtggaatgcgtggacctgctggtgggccccggcgccgcccaggccgctattaaggaagatccttggaactgctacatgtgcggccacaagggcacatacggcctgctgagacggagagaggactggcctagcagactgcagatgttcttcgccaataaccacgaccaggagttcgacccccctaaggtgtaccctcccgtccccgccgagaagagaaagcccatccgggtcctgagcctgttcgatggcatcgccaccggtctgctggtgctgaaggacctgggcatccaggtggataggtacattgcctccgaggtgtgcgaggactccatcaccgtgggaatggtgcgtcatcagggcaagatcatgtacgtgggcgacgtgcggagcgtgacacagaagcatatccaggagtggggccctttcgacctggtgatcggcggcagcccttgcaatgacctgagcatcgtgaacccagcccggaagggcctgtacgagggaaccggcagactgttcttcgagttttacagactgctgcacgacgcccggcctaaggaaggcgacgaccggcccttcttttggctgttcgagaatgtggtggccatgggagtcagcgacaagcgggatattagccggttcctggagagcaaccccgtgatgatcgatgccaaggaagtgagcgccgcccaccgggccagatacttctggggcaatctgcctggcatgaacagacccctggccagcaccgtgaacgacaagctggagctgcaggagtgcctggagcacggccggatcgccaagttcagcaaggtgagaaccatcaccacccgaagcaacagcatcaaacaaggcaaggaccagcactttcctgtgttcatgaacgagaaggaggacatcctgtggtgtaccgagatggagagagtgttcgggttcccagtccactacacagatgtcagcaacatgtctagactggccagacagagactgctgggaagaagctggtccgtccctgtgatcagacacctgttcgcccctctgaaggagtacttcgcctgcgtgagcagcggcaacagcaacgccaacagccggggccccagcttctctagcggcctggtgccactgtccctgagagggagccacatgggccccatggagatctacaaaaccgtgagcgcctggaagcggcagcctgtgcgcgtgctgagcctgtttcggaatatcgataaagtcctgaaaagcctgggattcctggagagcggctctggctccggcggtggcaccctgaagtacgtggaggatgtgacaaacgtggtcagacgggatgtggagaagtggggccccttcgatctggtgtacggcagcacccaacccctgggcagctcttgtgaccggtgccctggctggtacatgtttcagttccaccggatcctgcagtacgccctgccgagacaggagtcccagcggccattcttttggattttcatggacaacttgctgctgaccgaggatgaccaggaaactaccactcggttcctgcagaccgaagccgtgaccctgcaggacgtgagaggccgggactaccagaacgccatgcgggtgtggtccaacatccctggactgaaaagcaagcacgcacctctgacccctaaagaagaggagtacctgcaggcccaggtgcggagcagaagcaagctggacgcccctaaggtggatctgctggtgaagaattgcctcctgcccctgagagagtacttcaagtatttcagccagaatagtctgcccctgggaggcagcggcggcggcgccctggtgacatttgaggacgtcgccgtgcggttcacccaggaggaatgggctctgctggatccttctcagaaaatcctgtaccgggacgtgatgagagagacataccggaatctgacctccgtgggcatcaactgggaatgttgggaccttgaagcctgcttcagaagcctgggaagaaacctgagagtgcaggtggtgaagagaaagtgcgagctgaccaacagcggcccctgcgccgagggcggcccaagcagcggcgcccctcctcccagcggcggcagcccagccggctccccaacctctaccgaggagggcacctctgagtccgccacccccgagagcggccctggcacctccaccgagcccagcgagggcagcgcacccggcagccctgccggcagccccacctccacagaggagggaaccagcaccgagcccagcgaaggcagcgccccaggcaccagcaccgagcctagtgagcaggagattaaacggatcaacaagatcagaagaagacttgtgaaagacagcaacaccaagaaggccggcaagacaggccccatgaaaaccctgctggttagagtgatgacacccgatctgagagagcggctggaaaacctgagaaagaagcctgaaaatatcccccagcccatcagcaatacatctagagccaacctgaataagctgctgaccgattacaccgaaatgaagaaggcgatcctgcatgtgtactgggaagagttccagaaggaccctgtgggcctgatgagccgggtggcccagcctgccagcaagaagatcgatcagaacaagctgaaacctgagatggacgagaagggcaacctgaccaccgccggctttgcctgctctcagtgtggccagcccctgttcgtgtacaagctggagcaggtgtctgagaagggcaaggcttacaccaactacttcggacggtgcaatgtggccgagcacgaaaagctgatcctgctggcccagctgaagcccgagaaggatagcgacgaagccgtgacatatagcctgggaaagtttgggcagagggccctggatttctacagcattcatgtgaccaaggagtccacccaccccgtgaagcccctggcccagatcgccggaaacagatacgcctccggacctgtgggaaaggccctgagcgacgcatgtatgggcacaatcgcctccttcctgtctaagtaccaggacatcatcatcgaacaccagaaggtggtgaagggcaaccagaagagactggagagcctgcgggagctggccggcaaggaaaacctggaataccctagcgtgaccctgccacctcagcctcacaccaaggagggcgttgatgcctacaacgaagtgatcgcccgggtgcgaatgtgggtgaacctgaacctgtggcagaagctgaagctaagcagagatgatgccaagcctctgctgagactgaagggattcccttcctttcctctggtcgagagacaggccaacgaagtggactggtgggacatggtgtgtaacgtgaagaagctgatcaacgagaaaaaggaggatggcaaggtgttttggcagaatctggctggctacaagagacaggaagccctgagaccatacctgagcagcgaggaagatcggaagaagggaaagaaattcgctcggtaccagctgggcgacctgctgctgcacctggaaaagaagcacggcgaggactggggaaaggtgtacgacgaggcctgggagcggattgacaagaaagtggaaggcctgagcaagcacatcaagctggaagaggaacggagaagcgaggacgcccagagcaaggccgccctgaccgactggctgcgggctaaggccagcttcgtgatcgagggcctgaaggaggccgacaaggacgagttctgcagatgcgagctgaagctgcagaagtggtacggggacctgcggggaaagcccttcgccatcgaagccgagaacagcatcctggacatcagcggcttcagcaagcagtacaactgtgccttcatctggcagaaggacggcgtgaagaagctgaacctgtacctgatcatcaactacttcaagggcggcaagctgcggttcaagaagatcaaacctgaagccttcgaagccaacagattctacaccgtgatcaacaaaaagagcggcgagatcgtgcccatggaggtgaacttcaacttcgacgaccccaacctgatcatcctgcctctggcctttggcaagagacagggcagagaattcatctggaacgacctgctgtccctggaaaccggcagcctgaagctggccaacggaagagtgatcgagaagacactgtacaacagaagaacccggcaggatgagcctgccctgttcgtggccctgaccttcgagcggcgggaggtcctggactcctccaatatcaaaccaatgaacctgatcggcgtggcaagaggcgaaaacatccccgccgtgatcgccctgaccgaccccgagggctgcccactgagccggtttaaggatagcctgggaaacccaacccacatcctgagaatcggcgagagctataaggagaagcagcggaccatccaggccaagaaggaggtggagcagcggagagccggcggctacagccggaagtacgccagcaaagccaagaatctggcagacgatatggtgagaaacaccgctagagatctgctgtactacgccgtgacccaggatgccatgctgatcttcgccaacctgagccggggcttcggccggcagggcaagcggaccttcatggccgagagacagtacacacggatggaggactggctgaccgccaagctggcctacgagggcctgagcaagacctacctgtccaagacactggcccagtacacctccaagacatgcagcaactgtgggtttaccatcaccagcgccgactacgacagggtgctggagaagctgaagaagacagcaacaggctggatgaccacaattaacggcaaggagctgaaggtggagggccagattacctactacaacagatacaagagacagaacgtagtcaaggacctgtccgtcgagctggatagactgagcgaagaatctgtgaacaacgacatctcctcctggacaaagggcagaagcggagaagctctgagcctcctgaagaaaagattctcccatagacccgtgcaggagaagttcgtgtgcctgaactgcggcttcgagacacacgcagccgagcaagccgccctgaacatcgccagatcctggctgttcctgcggagccaggagtacaagaaataccagacaaacaagacaaccggcaacaccgataagagagccttcgtcgagacctggcagtccttttaccggaagaagcttaaggaggtgtggaaacctgccgtgcggtctggcggatctggcggaggctcccagatccccgtgatcttcgaggacatcgtgatctacttcagccaggaggagtggaaggacctggaggagtggcagaaggagctgtacaaggacgtgatgaaggagaactaccagaccctgatcagcctgggcaccggcttccccacccccccccccgacatcatcagccacatcgagaggggcgaggagccctacatcagggacgagctggagagcgagaagagggagaccggcaagaggggcggcggcccaagcagcggcgcccctcctcccagcggcggcagcccagccggctccccaacctctaccgaggagggcacctctgagtccgccacccccgagagcggccctggcacctccaccgagcccagcgagggcagcgcacccggcagccctgccggcagccccacctccacagaggagggaaccagcaccgagcccagcgaaggcagcgccccaggcaccagcaccgagcctagtgagcaggagattaaacggatcaacaagatcagaagaagacttgtgaaagacagcaacaccaagaaggccggcaagacaggccccatgaaaaccctgctggttagagtgatgacacccgatctgagagagcggctggaaaacctgagaaagaagcctgaaaatatcccccagcccatcagcaatacatctagagccaacctgaataagctgctgaccgattacaccgaaatgaagaaggcgatcctgcatgtgtactgggaagagttccagaaggaccctgtgggcctgatgagccgggtggcccagcctgccagcaagaagatcgatcagaacaagctgaaacctgagatggacgagaagggcaacctgaccaccgccggctttgcctgctctcagtgtggccagcccctgttcgtgtacaagctggagcaggtgtctgagaagggcaaggcttacaccaactacttcggacggtgcaatgtggccgagcacgaaaagctgatcctgctggcccagctgaagcccgagaaggatagcgacgaagccgtgacatatagcctgggaaagtttgggcagagggccctggatttctacagcattcatgtgaccaaggagtccacccaccccgtgaagcccctggcccagatcgccggaaacagatacgcctccggacctgtgggaaaggccctgagcgacgcatgtatgggcacaatcgcctccttcctgtctaagtaccaggacatcatcatcgaacaccagaaggtggtgaagggcaaccagaagagactggagagcctgcgggagctggccggcaaggaaaacctggaataccctagcgtgaccctgccacctcagcctcacaccaaggagggcgttgatgcctacaacgaagtgatcgcccgggtgcgaatgtgggtgaacctgaacctgtggcagaagctgaagctaagcagagatgatgccaagcctctgctgagactgaagggattcccttcctttcctctggtcgagagacaggccaacgaagtggactggtgggacatggtgtgtaacgtgaagaagctgatcaacgagaaaaaggaggatggcaaggtgttttggcagaatctggctggctacaagagacaggaagccctgagaccatacctgagcagcgaggaagatcggaagaagggaaagaaattcgctcggtaccagctgggcgacctgctgctgcacctggaaaagaagcacggcgaggactggggaaaggtgtacgacgaggcctgggagcggattgacaagaaagtggaaggcctgagcaagcacatcaagctggaagaggaacggagaagcgaggacgcccagagcaaggccgccctgaccgactggctgcgggctaaggccagcttcgtgatcgagggcctgaaggaggccgacaaggacgagttctgcagatgcgagctgaagctgcagaagtggtacggggacctgcggggaaagcccttcgccatcgaagccgagaacagcatcctggacatcagcggcttcagcaagcagtacaactgtgccttcatctggcagaaggacggcgtgaagaagctgaacctgtacctgatcatcaactacttcaagggcggcaagctgcggttcaagaagatcaaacctgaagccttcgaagccaacagattctacaccgtgatcaacaaaaagagcggcgagatcgtgcccatggaggtgaacttcaacttcgacgaccccaacctgatcatcctgcctctggcctttggcaagagacagggcagagaattcatctggaacgacctgctgtccctggaaaccggcagcctgaagctggccaacggaagagtgatcgagaagacactgtacaacagaagaacccggcaggatgagcctgccctgttcgtggccctgaccttcgagcggcgggaggtcctggactcctccaatatcaaaccaatgaacctgatcggcgtggcaagaggcgaaaacatccccgccgtgatcgccctgaccgaccccgagggctgcccactgagccggtttaaggatagcctgggaaacccaacccacatcctgagaatcggcgagagctataaggagaagcagcggaccatccaggccaagaaggaggtggagcagcggagagccggcggctacagccggaagtacgccagcaaagccaagaatctggcagacgatatggtgagaaacaccgctagagatctgctgtactacgccgtgacccaggatgccatgctgatcttcgccaacctgagccggggcttcggccggcagggcaagcggaccttcatggccgagagacagtacacacggatggaggactggctgaccgccaagctggcctacgagggcctgagcaagacctacctgtccaagacactggcccagtacacctccaagacatgcagcaactgtgggtttaccatcaccagcgccgactacgacagggtgctggagaagctgaagaagacagcaacaggctggatgaccacaattaacggcaaggagctgaaggtggagggccagattacctactacaacagatacaagagacagaacgtagtcaaggacctgtccgtcgagctggatagactgagcgaagaatctgtgaacaacgacatctcctcctggacaaagggcagaagcggagaagctctgagcctcctgaagaaaagattctcccatagacccgtgcaggagaagttcgtgtgcctgaactgcggcttcgagacacacgcagccgagcaagccgccctgaacatcgccagatcctggctgttcctgcggagccaggagtacaagaaataccagacaaacaagacaaccggcaacaccgataagagagccttcgtcgagacctggcagtccttttaccggaagaagcttaaggaggtgtggaaacctgccgtgcggtctggcggatctggcggaggctcctcagatccccgtgatcttcgaggacatcgtgatctacttcagccaggaggagtggaaggacctggaggagtggcagaaggagctgtacaaggacgtgatgaaggagaactaccagaccctgatcagcctgggcaccggcttccccacccccccccccgacatcatcagccacatcgagaggggcgaggagccctacatcagggacgagctggagagcgagaagagggagaccggcaagaggggcggatctggctccggcagcggccccaagaaaaagagaaaagtctaagctgccttctgcggggcttgccttctggccatgcccttcttctctcccttgcacctgtacctcttggtctttgaataaagcctgagtaggaaggctagcaaaaaaaaaaaaaaaaaaaaaaaaaaaaaaaaaaaaaaaaaaaaaaaaaaaaaaaaaaaaaaaaaaaaaaaaaaaaaaaa

SEQ ID NO: 16656 - RNA, 9485 nt, synthetic construct
  source 1..9485: mol_type = other RNA
aggaaataagagagaaaagaagagtaagaagaaatataagagccaccatggcccctaagaagaagcgtaaagtgagccggatggaacgcctcgtctacgaggtgcggcagaagtgcagaaacatcgaggacatctgcatctcctgcggatctctgaacgtgaccctggagcacccactgttcatcggcggcatgtgccagaactgtaaaaactgttttctggagtgtgcctatcaatacgacgatgacggctaccagagctactgcaccatctgttgcggcggaagagaggtgctgatgtgtggaaataacaactgctgccggtgcttctgcgtggaatgcgtggacctgctggtgggccccggcgccgcccaggccgctattaaggaagatccttggaactgctacatgtgcggccacaagggcacatacggcctgctgagacggagagaggactggcctagcagactgcagatgttcttcgccaataaccacgaccaggagttcgacccccctaaggtgtaccctcccgtccccgccgagaagagaaagcccatccgggtcctgagcctgttcgatggcatcgccaccggtctgctggtgctgaaggacctgggcatccaggtggataggtacattgcctccgaggtgtgcgaggactccatcaccgtgggaatggtgcgtcatcagggcaagatcatgtacgtgggcgacgtgcggagcgtgacacagaagcatatccaggagtggggccctttcgacctggtgatcggcggcagcccttgcaatgacctgagcatcgtgaacccagcccggaagggcctgtacgagggaaccggcagactgttcttcgagttttacagactgctgcacgacgcccggcctaaggaaggcgacgaccggcccttcttttggctgttcgagaatgtggtggccatgggagtcagcgacaagcgggatattagccggttcctggagagcaaccccgtgatgatcgatgccaaggaagtgagcgccgcccaccgggccagatacttctggggcaatctgcctggcatgaacagacccctggccagcaccgtgaacgacaagctggagctgcaggagtgcctggagcacggccggatcgccaagttcagcaaggtgagaaccatcaccacccgaagcaacagcatcaaacaaggcaaggaccagcactttcctgtgttcatgaacgagaaggaggacatcctgtggtgtaccgagatggagagagtgttcgggttcccagtccactacacagatgtcagcaacatgtctagactggccagacagagactgctgggaagaagctggtccgtccctgtgatcagacacctgttcgcccctctgaaggagtacttcgcctgcgtgagcagcggcaacagcaacgccaacagccggggccccagcttctctagcggcctggtgccactgtccctgagagggagccacatgggccccatggagatctacaaaaccgtgagcgcctggaagcggcagcctgtgcgcgtgctgagcctgtttcggaatatcgataaagtcctgaaaagcctgggattcctggagagcggctctggctccggcggtggcaccctgaagtacgtggaggatgtgacaaacgtggtcagacgggatgtggagaagtggggccccttcgatctggtgtacggcagcacccaacccctgggcagctcttgtgaccggtgccctggctggtacatgtttcagttccaccggatcctgcagtacgccctgccgagacaggagtcccagcggccattcttttggattttcatggacaacttgctgctgaccgaggatgaccaggaaactaccactcggttcctgcagaccgaagccgtgaccctgcaggacgtgagaggccgggactaccagaacgccatgcgggtgtggtccaacatccctggactgaaaagcaagcacgcacctctgacccctaaagaagaggagtacctgcaggcccaggtgcggagcagaagcaagctggacgcccctaaggtggatctgctggtgaagaattgcctcctgcccctgagagagtacttcaagtatttcagccagaatagtctgcccctgggaggcagcggcggcggcgccctggtgacatttgaggacgtcgccgtgcggttcacccaggaggaatgggctctgctggatccttctcagaaaatcctgtaccgggacgtgatgagagagacataccggaatctgacctccgtgggcatcaactgggaatgttgggaccttgaagcctgcttcagaagcctgggaagaaacctgagagtgcaggtggtgaagagaaagtgcgagctgaccaacagcggcccctgcgccgagggcggcccaagcagcggcgcccctcctcccagcggcggcagcccagccggctccccaacctctaccgaggagggcacctctgagtccgccacccccgagagcggccctggcacctccaccgagcccagcgagggcagcgcacccggcagccctgccggcagccccacctccacagaggagggaaccagcaccgagcccagcgaaggcagcgccccaggcaccagcaccgagcctagtgagcaggagattaaacggatcaacaagatcagaagaagacttgtgaaagacagcaacaccaagaaggccggcaagacaggccccatgaaaaccctgctggttagagtgatgacacccgatctgagagagcggctggaaaacctgagaaagaagcctgaaaatatcccccagcccatcagcaatacatctagagccaacctgaataagctgctgaccgattacaccgaaatgaagaaggcgatcctgcatgtgtactgggaagagttccagaaggaccctgtgggcctgatgagccgggtggcccagcctgccagcaagaagatcgatcagaacaagctgaaacctgagatggacgagaagggcaacctgaccaccgccggctttgcctgctctcagtgtggccagcccctgttcgtgtacaagctggagcaggtgtctgagaagggcaaggcttacaccaactacttcggacggtgcaatgtggccgagcacgaaaagctgatcctgctggcccagctgaagcccgagaaggatagcgacgaagccgtgacatatagcctgggaaagtttgggcagagggccctggatttctacagcattcatgtgaccaaggagtccacccaccccgtgaagcccctggcccagatcgccggaaacagatacgcctccggacctgtgggaaaggccctgagcgacgcatgtatgggcacaatcgcctccttcctgtctaagtaccaggacatcatcatcgaacaccagaaggtggtgaagggcaaccagaagagactggagagcctgcgggagctggccggcaaggaaaacctggaataccctagcgtgaccctgccacctcagcctcacaccaaggagggcgttgatgcctacaacgaagtgatcgcccgggtgcgaatgtgggtgaacctgaacctgtggcagaagctgaagctaagcagagatgatgccaagcctctgctgagactgaagggattcccttcctttcctctggtcgagagacaggccaacgaagtggactggtgggacatggtgtgtaacgtgaagaagctgatcaacgagaaaaaggaggatggcaaggtgttttggcagaatctggctggctacaagagacaggaagccctgagaccatacctgagcagcgaggaagatcggaagaagggaaagaaattcgctcggtaccagctgggcgacctgctgctgcacctggaaaagaagcacggcgaggactggggaaaggtgtacgacgaggcctgggagcggattgacaagaaagtggaaggcctgagcaagcacatcaagctggaagaggaacggagaagcgaggacgcccagagcaaggccgccctgaccgactggctgcgggctaaggccagcttcgtgatcgagggcctgaaggaggccgacaaggacgagttctgcagatgcgagctgaagctgcagaagtggtacggggacctgcggggaaagcccttcgccatcgaagccgagaacagcatcctggacatcagcggcttcagcaagcagtacaactgtgccttcatctggcagaaggacggcgtgaagaagctgaacctgtacctgatcatcaactacttcaagggcggcaagctgcggttcaagaagatcaaacctgaagccttcgaagccaacagattctacaccgtgatcaacaaaaagagcggcgagatcgtgcccatggaggtgaacttcaacttcgacgaccccaacctgatcatcctgcctctggcctttggcaagagacagggcagagaattcatctggaacgacctgctgtccctggaaaccggcagcctgaagctggccaacggaagagtgatcgagaagacactgtacaacagaagaacccggcaggatgagcctgccctgttcgtggccctgaccttcgagcggcgggaggtcctggactcctccaatatcaaaccaatgaacctgatcggcgtggcaagaggcgaaaacatccccgccgtgatcgccctgaccgaccccgagggctgcccactgagccggtttaaggatagcctgggaaacccaacccacatcctgagaatcggcgagagctataaggagaagcagcggaccatccaggccaagaaggaggtggagcagcggagagccggcggctacagccggaagtacgccagcaaagccaagaatctggcagacgatatggtgagaaacaccgctagagatctgctgtactacgccgtgacccaggatgccatgctgatcttcgccaacctgagccggggcttcggccggcagggcaagcggaccttcatggccgagagacagtacacacggatggaggactggctgaccgccaagctggcctacgagggcctgagcaagacctacctgtccaagacactggcccagtacacctccaagacatgcagcaactgtgggtttaccatcaccagcgccgactacgacagggtgctggagaagctgaagaagacagcaacaggctggatgaccacaattaacggcaaggagctgaaggtggagggccagattacctactacaacagatacaagagacagaacgtagtcaaggacctgtccgtcgagctggatagactgagcgaagaatctgtgaacaacgacatctcctcctggacaaagggcagaagcggagaagctctgagcctcctgaagaaaagattctcccatagacccgtgcaggagaagttcgtgtgcctgaactgcggcttcgagacacacgcagccgagcaagccgccctgaacatcgccagatcctggctgttcctgcggagccaggagtacaagaaataccagacaaacaagacaaccggcaacaccgataagagagccttcgtcgagacctggcagtccttttaccggaagaagcttaaggaggtgtggaaacctgccgtgcggtctggcggatctggcggaggctccttccaggagcccgtgagcttcaaggacgtgagcgtggtgttcaccgaggaggagctgggcctgctggacagcgcccagaggaagctgtacagggacgtgatgctggagaacttccagaacctgctgagcgtgggcaaccagcccttcaagcccgagctgatcttccagctggagagggaggaggagctgctgatgatggagaccgagacccagagggacggctgcagcggcaccaagagccagggcggcccaagcagcggcgcccctcctcccagcggcggcagcccagccggctccccaacctctaccgaggagggcacctctgagtccgccacccccgagagcggccctggcacctccaccgagcccagcgagggcagcgcacccggcagccctgccggcagccccacctccacagaggagggaaccagcaccgagcccagcgaaggcagcgccccaggcaccagcaccgagcctagtgagcaggagattaaacggatcaacaagatcagaagaagacttgtgaaagacagcaacaccaagaaggccggcaagacaggccccatgaaaaccctgctggttagagtgatgacacccgatctgagagagcggctggaaaacctgagaaagaagcctgaaaatatcccccagcccatcagcaatacatctagagccaacctgaataagctgctgaccgattacaccgaaatgaagaaggcgatcctgcatgtgtactgggaagagttccagaaggaccctgtgggcctgatgagccgggtggcccagcctgccagcaagaagatcgatcagaacaagctgaaacctgagatggacgagaagggcaacctgaccaccgccggctttgcctgctctcagtgtggccagcccctgttcgtgtacaagctggagcaggtgtctgagaagggcaaggcttacaccaactacttcggacggtgcaatgtggccgagcacgaaaagctgatcctgctggcccagctgaagcccgagaaggatagcgacgaagccgtgacatatagcctgggaaagtttgggcagagggccctggatttctacagcattcatgtgaccaaggagtccacccaccccgtgaagcccctggcccagatcgccggaaacagatacgcctccggacctgtgggaaaggccctgagcgacgcatgtatgggcacaatcgcctccttcctgtctaagtaccaggacatcatcatcgaacaccagaaggtggtgaagggcaaccagaagagactggagagcctgcgggagctggccggcaaggaaaacctggaataccctagcgtgaccctgccacctcagcctcacaccaaggagggcgttgatgcctacaacgaagtgatcgcccgggtgcgaatgtgggtgaacctgaacctgtggcagaagctgaagctaagcagagatgatgccaagcctctgctgagactgaagggattcccttcctttcctctggtcgagagacaggccaacgaagtggactggtgggacatggtgtgtaacgtgaagaagctgatcaacgagaaaaaggaggatggcaaggtgttttggcagaatctggctggctacaagagacaggaagccctgagaccatacctgagcagcgaggaagatcggaagaagggaaagaaattcgctcggtaccagctgggcgacctgctgctgcacctggaaaagaagcacggcgaggactggggaaaggtgtacgacgaggcctgggagcggattgacaagaaagtggaaggcctgagcaagcacatcaagctggaagaggaacggagaagcgaggacgcccagagcaaggccgccctgaccgactggctgcgggctaaggccagcttcgtgatcgagggcctgaaggaggccgacaaggacgagttctgcagatgcgagctgaagctgcagaagtggtacggggacctgcggggaaagcccttcgccatcgaagccgagaacagcatcctggacatcagcggcttcagcaagcagtacaactgtgccttcatctggcagaaggacggcgtgaagaagctgaacctgtacctgatcatcaactacttcaagggcggcaagctgcggttcaagaagatcaaacctgaagccttcgaagccaacagattctacaccgtgatcaacaaaaagagcggcgagatcgtgcccatggaggtgaacttcaacttcgacgaccccaacctgatcatcctgcctctggcctttggcaagagacagggcagagaattcatctggaacgacctgctgtccctggaaaccggcagcctgaagctggccaacggaagagtgatcgagaagacactgtacaacagaagaacccggcaggatgagcctgccctgttcgtggccctgaccttcgagcggcgggaggtcctggactcctccaatatcaaaccaatgaacctgatcggcgtggcaagaggcgaaaacatccccgccgtgatcgccctgaccgaccccgagggctgcccactgagccggtttaaggatagcctgggaaacccaacccacatcctgagaatcggcgagagctataaggagaagcagcggaccatccaggccaagaaggaggtggagcagcggagagccggcggctacagccggaagtacgccagcaaagccaagaatctggcagacgatatggtgagaaacaccgctagagatctgctgtactacgccgtgacccaggatgccatgctgatcttcgccaacctgagccggggcttcggccggcagggcaagcggaccttcatggccgagagacagtacacacggatggaggactggctgaccgccaagctggcctacgagggcctgagcaagacctacctgtccaagacactggcccagtacacctccaagacatgcagcaactgtgggtttaccatcaccagcgccgactacgacagggtgctggagaagctgaagaagacagcaacaggctggatgaccacaattaacggcaaggagctgaaggtggagggccagattacctactacaacagatacaagagacagaacgtagtcaaggacctgtccgtcgagctggatagactgagcgaagaatctgtgaacaacgacatctcctcctggacaaagggcagaagcggagaagctctgagcctcctgaagaaaagattctcccatagacccgtgcaggagaagttcgtgtgcctgaactgcggcttcgagacacacgcagccgagcaagccgccctgaacatcgccagatcctggctgttcctgcggagccaggagtacaagaaataccagacaaacaagacaaccggcaacaccgataagagagccttcgtcgagacctggcagtccttttaccggaagaagcttaaggaggtgtggaaacctgccgtgcggtctggcggatctggcggaggctcctttccaggagcccgtgagcttcaaggacgtgagcgtggtgttcaccgaggaggagctgggcctgctggacagcgcccagaggaagctgtacagggacgtgatgctggagaacttccagaacctgctgagcgtgggcaaccagcccttcaagcccgagctgatcttccagctggagagggaggaggagctgctgatgatggagaccgagacccagagggacggctgcagcggcaccaagagccagggatctggctccggcagcggccccaagaaaaagagaaaagtctaagctgccttctgcggggcttgccttctggccatgcccttcttctctcccttgcacctgtacctcttggtctttgaataaagcctgagtaggaaggctagcaaaaaaaaaaaaaaaaaaaaaaaaaaaaaaaaaaaaaaaaaaaaaaaaaaaaaaaaaaaaaaaaaaaaaaaaaaaaaaaa

SEQ ID NO: 16657 - RNA, 9485 nt, synthetic construct
  source 1..9485: mol_type = other RNA
aggaaataagagagaaaagaagagtaagaagaaatataagagccaccatggcccctaagaagaagcgtaaagtgagccggatggaacgcctcgtctacgaggtgcggcagaagtgcagaaacatcgaggacatctgcatctcctgcggatctctgaacgtgaccctggagcacccactgttcatcggcggcatgtgccagaactgtaaaaactgttttctggagtgtgcctatcaatacgacgatgacggctaccagagctactgcaccatctgttgcggcggaagagaggtgctgatgtgtggaaataacaactgctgccggtgcttctgcgtggaatgcgtggacctgctggtgggccccggcgccgcccaggccgctattaaggaagatccttggaactgctacatgtgcggccacaagggcacatacggcctgctgagacggagagaggactggcctagcagactgcagatgttcttcgccaataaccacgaccaggagttcgacccccctaaggtgtaccctcccgtccccgccgagaagagaaagcccatccgggtcctgagcctgttcgatggcatcgccaccggtctgctggtgctgaaggacctgggcatccaggtggataggtacattgcctccgaggtgtgcgaggactccatcaccgtgggaatggtgcgtcatcagggcaagatcatgtacgtgggcgacgtgcggagcgtgacacagaagcatatccaggagtggggccctttcgacctggtgatcggcggcagcccttgcaatgacctgagcatcgtgaacccagcccggaagggcctgtacgagggaaccggcagactgttcttcgagttttacagactgctgcacgacgcccggcctaaggaaggcgacgaccggcccttcttttggctgttcgagaatgtggtggccatgggagtcagcgacaagcgggatattagccggttcctggagagcaaccccgtgatgatcgatgccaaggaagtgagcgccgcccaccgggccagatacttctggggcaatctgcctggcatgaacagacccctggccagcaccgtgaacgacaagctggagctgcaggagtgcctggagcacggccggatcgccaagttcagcaaggtgagaaccatcaccacccgaagcaacagcatcaaacaaggcaaggaccagcactttcctgtgttcatgaacgagaaggaggacatcctgtggtgtaccgagatggagagagtgttcgggttcccagtccactacacagatgtcagcaacatgtctagactggccagacagagactgctgggaagaagctggtccgtccctgtgatcagacacctgttcgcccctctgaaggagtacttcgcctgcgtgagcagcggcaacagcaacgccaacagccggggccccagcttctctagcggcctggtgccactgtccctgagagggagccacatgggccccatggagatctacaaaaccgtgagcgcctggaagcggcagcctgtgcgcgtgctgagcctgtttcggaatatcgataaagtcctgaaaagcctgggattcctggagagcggctctggctccggcggtggcaccctgaagtacgtggaggatgtgacaaacgtggtcagacgggatgtggagaagtggggccccttcgatctggtgtacggcagcacccaacccctgggcagctcttgtgaccggtgccctggctggtacatgtttcagttccaccggatcctgcagtacgccctgccgagacaggagtcccagcggccattcttttggattttcatggacaacttgctgctgaccgaggatgaccaggaaactaccactcggttcctgcagaccgaagccgtgaccctgcaggacgtgagaggccgggactaccagaacgccatgcgggtgtggtccaacatccctggactgaaaagcaagcacgcacctctgacccctaaagaagaggagtacctgcaggcccaggtgcggagcagaagcaagctggacgcccctaaggtggatctgctggtgaagaattgcctcctgcccctgagagagtacttcaagtatttcagccagaatagtctgcccctgggaggcagcggcggcggcgccctggtgacatttgaggacgtcgccgtgcggttcacccaggaggaatgggctctgctggatccttctcagaaaatcctgtaccgggacgtgatgagagagacataccggaatctgacctccgtgggcatcaactgggaatgttgggaccttgaagcctgcttcagaagcctgggaagaaacctgagagtgcaggtggtgaagagaaagtgcgagctgaccaacagcggcccctgcgccgagggcggcccaagcagcggcgcccctcctcccagcggcggcagcccagccggctccccaacctctaccgaggagggcacctctgagtccgccacccccgagagcggccctggcacctccaccgagcccagcgagggcagcgcacccggcagccctgccggcagccccacctccacagaggagggaaccagcaccgagcccagcgaaggcagcgccccaggcaccagcaccgagcctagtgagcaggagattaaacggatcaacaagatcagaagaagacttgtgaaagacagcaacaccaagaaggccggcaagacaggccccatgaaaaccctgctggttagagtgatgacacccgatctgagagagcggctggaaaacctgagaaagaagcctgaaaatatcccccagcccatcagcaatacatctagagccaacctgaataagctgctgaccgattacaccgaaatgaagaaggcgatcctgcatgtgtactgggaagagttccagaaggaccctgtgggcctgatgagccgggtggcccagcctgccagcaagaagatcgatcagaacaagctgaaacctgagatggacgagaagggcaacctgaccaccgccggctttgcctgctctcagtgtggccagcccctgttcgtgtacaagctggagcaggtgtctgagaagggcaaggcttacaccaactacttcggacggtgcaatgtggccgagcacgaaaagctgatcctgctggcccagctgaagcccgagaaggatagcgacgaagccgtgacatatagcctgggaaagtttgggcagagggccctggatttctacagcattcatgtgaccaaggagtccacccaccccgtgaagcccctggcccagatcgccggaaacagatacgcctccggacctgtgggaaaggccctgagcgacgcatgtatgggcacaatcgcctccttcctgtctaagtaccaggacatcatcatcgaacaccagaaggtggtgaagggcaaccagaagagactggagagcctgcgggagctggccggcaaggaaaacctggaataccctagcgtgaccctgccacctcagcctcacaccaaggagggcgttgatgcctacaacgaagtgatcgcccgggtgcgaatgtgggtgaacctgaacctgtggcagaagctgaagctaagcagagatgatgccaagcctctgctgagactgaagggattcccttcctttcctctggtcgagagacaggccaacgaagtggactggtgggacatggtgtgtaacgtgaagaagctgatcaacgagaaaaaggaggatggcaaggtgttttggcagaatctggctggctacaagagacaggaagccctgagaccatacctgagcagcgaggaagatcggaagaagggaaagaaattcgctcggtaccagctgggcgacctgctgctgcacctggaaaagaagcacggcgaggactggggaaaggtgtacgacgaggcctgggagcggattgacaagaaagtggaaggcctgagcaagcacatcaagctggaagaggaacggagaagcgaggacgcccagagcaaggccgccctgaccgactggctgcgggctaaggccagcttcgtgatcgagggcctgaaggaggccgacaaggacgagttctgcagatgcgagctgaagctgcagaagtggtacggggacctgcggggaaagcccttcgccatcgaagccgagaacagcatcctggacatcagcggcttcagcaagcagtacaactgtgccttcatctggcagaaggacggcgtgaagaagctgaacctgtacctgatcatcaactacttcaagggcggcaagctgcggttcaagaagatcaaacctgaagccttcgaagccaacagattctacaccgtgatcaacaaaaagagcggcgagatcgtgcccatggaggtgaacttcaacttcgacgaccccaacctgatcatcctgcctctggcctttggcaagagacagggcagagaattcatctggaacgacctgctgtccctggaaaccggcagcctgaagctggccaacggaagagtgatcgagaagacactgtacaacagaagaacccggcaggatgagcctgccctgttcgtggccctgaccttcgagcggcgggaggtcctggactcctccaatatcaaaccaatgaacctgatcggcgtggcaagaggcgaaaacatccccgccgtgatcgccctgaccgaccccgagggctgcccactgagccggtttaaggatagcctgggaaacccaacccacatcctgagaatcggcgagagctataaggagaagcagcggaccatccaggccaagaaggaggtggagcagcggagagccggcggctacagccggaagtacgccagcaaagccaagaatctggcagacgatatggtgagaaacaccgctagagatctgctgtactacgccgtgacccaggatgccatgctgatcttcgccaacctgagccggggcttcggccggcagggcaagcggaccttcatggccgagagacagtacacacggatggaggactggctgaccgccaagctggcctacgagggcctgagcaagacctacctgtccaagacactggcccagtacacctccaagacatgcagcaactgtgggtttaccatcaccagcgccgactacgacagggtgctggagaagctgaagaagacagcaacaggctggatgaccacaattaacggcaaggagctgaaggtggagggccagattacctactacaacagatacaagagacagaacgtagtcaaggacctgtccgtcgagctggatagactgagcgaagaatctgtgaacaacgacatctcctcctggacaaagggcagaagcggagaagctctgagcctcctgaagaaaagattctcccatagacccgtgcaggagaagttcgtgtgcctgaactgcggcttcgagacacacgcagccgagcaagccgccctgaacatcgccagatcctggctgttcctgcggagccaggagtacaagaaataccagacaaacaagacaaccggcaacaccgataagagagccttcgtcgagacctggcagtccttttaccggaagaagcttaaggaggtgtggaaacctgccgtgcggtctggcggatctggcggaggctccccccaggagagcgtgaccttcgaggacgtggccgtggacttcacctgggaggagtggggctacctggacaccagccagaaggagctgtactgggaggtgatgctggagaactacaagaacctggtgagcctgggcttcgtggtggccaagcccgacgccatcagccagctggagcaggaggaggccccctggaggcccgaggtgctgttccccaggagcagctgcagcgacctggacaccaagggcggcccaagcagcggcgcccctcctcccagcggcggcagcccagccggctccccaacctctaccgaggagggcacctctgagtccgccacccccgagagcggccctggcacctccaccgagcccagcgagggcagcgcacccggcagccctgccggcagccccacctccacagaggagggaaccagcaccgagcccagcgaaggcagcgccccaggcaccagcaccgagcctagtgagcaggagattaaacggatcaacaagatcagaagaagacttgtgaaagacagcaacaccaagaaggccggcaagacaggccccatgaaaaccctgctggttagagtgatgacacccgatctgagagagcggctggaaaacctgagaaagaagcctgaaaatatcccccagcccatcagcaatacatctagagccaacctgaataagctgctgaccgattacaccgaaatgaagaaggcgatcctgcatgtgtactgggaagagttccagaaggaccctgtgggcctgatgagccgggtggcccagcctgccagcaagaagatcgatcagaacaagctgaaacctgagatggacgagaagggcaacctgaccaccgccggctttgcctgctctcagtgtggccagcccctgttcgtgtacaagctggagcaggtgtctgagaagggcaaggcttacaccaactacttcggacggtgcaatgtggccgagcacgaaaagctgatcctgctggcccagctgaagcccgagaaggatagcgacgaagccgtgacatatagcctgggaaagtttgggcagagggccctggatttctacagcattcatgtgaccaaggagtccacccaccccgtgaagcccctggcccagatcgccggaaacagatacgcctccggacctgtgggaaaggccctgagcgacgcatgtatgggcacaatcgcctccttcctgtctaagtaccaggacatcatcatcgaacaccagaaggtggtgaagggcaaccagaagagactggagagcctgcgggagctggccggcaaggaaaacctggaataccctagcgtgaccctgccacctcagcctcacaccaaggagggcgttgatgcctacaacgaagtgatcgcccgggtgcgaatgtgggtgaacctgaacctgtggcagaagctgaagctaagcagagatgatgccaagcctctgctgagactgaagggattcccttcctttcctctggtcgagagacaggccaacgaagtggactggtgggacatggtgtgtaacgtgaagaagctgatcaacgagaaaaaggaggatggcaaggtgttttggcagaatctggctggctacaagagacaggaagccctgagaccatacctgagcagcgaggaagatcggaagaagggaaagaaattcgctcggtaccagctgggcgacctgctgctgcacctggaaaagaagcacggcgaggactggggaaaggtgtacgacgaggcctgggagcggattgacaagaaagtggaaggcctgagcaagcacatcaagctggaagaggaacggagaagcgaggacgcccagagcaaggccgccctgaccgactggctgcgggctaaggccagcttcgtgatcgagggcctgaaggaggccgacaaggacgagttctgcagatgcgagctgaagctgcagaagtggtacggggacctgcggggaaagcccttcgccatcgaagccgagaacagcatcctggacatcagcggcttcagcaagcagtacaactgtgccttcatctggcagaaggacggcgtgaagaagctgaacctgtacctgatcatcaactacttcaagggcggcaagctgcggttcaagaagatcaaacctgaagccttcgaagccaacagattctacaccgtgatcaacaaaaagagcggcgagatcgtgcccatggaggtgaacttcaacttcgacgaccccaacctgatcatcctgcctctggcctttggcaagagacagggcagagaattcatctggaacgacctgctgtccctggaaaccggcagcctgaagctggccaacggaagagtgatcgagaagacactgtacaacagaagaacccggcaggatgagcctgccctgttcgtggccctgaccttcgagcggcgggaggtcctggactcctccaatatcaaaccaatgaacctgatcggcgtggcaagaggcgaaaacatccccgccgtgatcgccctgaccgaccccgagggctgcccactgagccggtttaaggatagcctgggaaacccaacccacatcctgagaatcggcgagagctataaggagaagcagcggaccatccaggccaagaaggaggtggagcagcggagagccggcggctacagccggaagtacgccagcaaagccaagaatctggcagacgatatggtgagaaacaccgctagagatctgctgtactacgccgtgacccaggatgccatgctgatcttcgccaacctgagccggggcttcggccggcagggcaagcggaccttcatggccgagagacagtacacacggatggaggactggctgaccgccaagctggcctacgagggcctgagcaagacctacctgtccaagacactggcccagtacacctccaagacatgcagcaactgtgggtttaccatcaccagcgccgactacgacagggtgctggagaagctgaagaagacagcaacaggctggatgaccacaattaacggcaaggagctgaaggtggagggccagattacctactacaacagatacaagagacagaacgtagtcaaggacctgtccgtcgagctggatagactgagcgaagaatctgtgaacaacgacatctcctcctggacaaagggcagaagcggagaagctctgagcctcctgaagaaaagattctcccatagacccgtgcaggagaagttcgtgtgcctgaactgcggcttcgagacacacgcagccgagcaagccgccctgaacatcgccagatcctggctgttcctgcggagccaggagtacaagaaataccagacaaacaagacaaccggcaacaccgataagagagccttcgtcgagacctggcagtccttttaccggaagaagcttaaggaggtgtggaaacctgccgtgcggtctggcggatctggcggaggctcctccccaggagagcgtgaccttcgaggacgtggccgtggacttcacctgggaggagtggggctacctggacaccagccagaaggagctgtactgggaggtgatgctggagaactacaagaacctggtgagcctgggcttcgtggtggccaagcccgacgccatcagccagctggagcaggaggaggccccctggaggcccgaggtgctgttccccaggagcagctgcagcgacctggacaccaagggatctggctccggcagcggccccaagaaaaagagaaaagtctaagctgccttctgcggggcttgccttctggccatgcccttcttctctcccttgcacctgtacctcttggtctttgaataaagcctgagtaggaaggctagcaaaaaaaaaaaaaaaaaaaaaaaaaaaaaaaaaaaaaaaaaaaaaaaaaaaaaaaaaaaaaaaaaaaaaaaaaaaaaaaa

SEQ ID NO: 16658 - RNA, 9485 nt, synthetic construct
  source 1..9485: mol_type = other RNA
aggaaataagagagaaaagaagagtaagaagaaatataagagccaccatggcccctaagaagaagcgtaaagtgagccggatggaacgcctcgtctacgaggtgcggcagaagtgcagaaacatcgaggacatctgcatctcctgcggatctctgaacgtgaccctggagcacccactgttcatcggcggcatgtgccagaactgtaaaaactgttttctggagtgtgcctatcaatacgacgatgacggctaccagagctactgcaccatctgttgcggcggaagagaggtgctgatgtgtggaaataacaactgctgccggtgcttctgcgtggaatgcgtggacctgctggtgggccccggcgccgcccaggccgctattaaggaagatccttggaactgctacatgtgcggccacaagggcacatacggcctgctgagacggagagaggactggcctagcagactgcagatgttcttcgccaataaccacgaccaggagttcgacccccctaaggtgtaccctcccgtccccgccgagaagagaaagcccatccgggtcctgagcctgttcgatggcatcgccaccggtctgctggtgctgaaggacctgggcatccaggtggataggtacattgcctccgaggtgtgcgaggactccatcaccgtgggaatggtgcgtcatcagggcaagatcatgtacgtgggcgacgtgcggagcgtgacacagaagcatatccaggagtggggccctttcgacctggtgatcggcggcagcccttgcaatgacctgagcatcgtgaacccagcccggaagggcctgtacgagggaaccggcagactgttcttcgagttttacagactgctgcacgacgcccggcctaaggaaggcgacgaccggcccttcttttggctgttcgagaatgtggtggccatgggagtcagcgacaagcgggatattagccggttcctggagagcaaccccgtgatgatcgatgccaaggaagtgagcgccgcccaccgggccagatacttctggggcaatctgcctggcatgaacagacccctggccagcaccgtgaacgacaagctggagctgcaggagtgcctggagcacggccggatcgccaagttcagcaaggtgagaaccatcaccacccgaagcaacagcatcaaacaaggcaaggaccagcactttcctgtgttcatgaacgagaaggaggacatcctgtggtgtaccgagatggagagagtgttcgggttcccagtccactacacagatgtcagcaacatgtctagactggccagacagagactgctgggaagaagctggtccgtccctgtgatcagacacctgttcgcccctctgaaggagtacttcgcctgcgtgagcagcggcaacagcaacgccaacagccggggccccagcttctctagcggcctggtgccactgtccctgagagggagccacatgggccccatggagatctacaaaaccgtgagcgcctggaagcggcagcctgtgcgcgtgctgagcctgtttcggaatatcgataaagtcctgaaaagcctgggattcctggagagcggctctggctccggcggtggcaccctgaagtacgtggaggatgtgacaaacgtggtcagacgggatgtggagaagtggggccccttcgatctggtgtacggcagcacccaacccctgggcagctcttgtgaccggtgccctggctggtacatgtttcagttccaccggatcctgcagtacgccctgccgagacaggagtcccagcggccattcttttggattttcatggacaacttgctgctgaccgaggatgaccaggaaactaccactcggttcctgcagaccgaagccgtgaccctgcaggacgtgagaggccgggactaccagaacgccatgcgggtgtggtccaacatccctggactgaaaagcaagcacgcacctctgacccctaaagaagaggagtacctgcaggcccaggtgcggagcagaagcaagctggacgcccctaaggtggatctgctggtgaagaattgcctcctgcccctgagagagtacttcaagtatttcagccagaatagtctgcccctgggaggcagcggcggcggcgccctggtgacatttgaggacgtcgccgtgcggttcacccaggaggaatgggctctgctggatccttctcagaaaatcctgtaccgggacgtgatgagagagacataccggaatctgacctccgtgggcatcaactgggaatgttgggaccttgaagcctgcttcagaagcctgggaagaaacctgagagtgcaggtggtgaagagaaagtgcgagctgaccaacagcggcccctgcgccgagggcggcccaagcagcggcgcccctcctcccagcggcggcagcccagccggctccccaacctctaccgaggagggcacctctgagtccgccacccccgagagcggccctggcacctccaccgagcccagcgagggcagcgcacccggcagccctgccggcagccccacctccacagaggagggaaccagcaccgagcccagcgaaggcagcgccccaggcaccagcaccgagcctagtgagcaggagattaaacggatcaacaagatcagaagaagacttgtgaaagacagcaacaccaagaaggccggcaagacaggccccatgaaaaccctgctggttagagtgatgacacccgatctgagagagcggctggaaaacctgagaaagaagcctgaaaatatcccccagcccatcagcaatacatctagagccaacctgaataagctgctgaccgattacaccgaaatgaagaaggcgatcctgcatgtgtactgggaagagttccagaaggaccctgtgggcctgatgagccgggtggcccagcctgccagcaagaagatcgatcagaacaagctgaaacctgagatggacgagaagggcaacctgaccaccgccggctttgcctgctctcagtgtggccagcccctgttcgtgtacaagctggagcaggtgtctgagaagggcaaggcttacaccaactacttcggacggtgcaatgtggccgagcacgaaaagctgatcctgctggcccagctgaagcccgagaaggatagcgacgaagccgtgacatatagcctgggaaagtttgggcagagggccctggatttctacagcattcatgtgaccaaggagtccacccaccccgtgaagcccctggcccagatcgccggaaacagatacgcctccggacctgtgggaaaggccctgagcgacgcatgtatgggcacaatcgcctccttcctgtctaagtaccaggacatcatcatcgaacaccagaaggtggtgaagggcaaccagaagagactggagagcctgcgggagctggccggcaaggaaaacctggaataccctagcgtgaccctgccacctcagcctcacaccaaggagggcgttgatgcctacaacgaagtgatcgcccgggtgcgaatgtgggtgaacctgaacctgtggcagaagctgaagctaagcagagatgatgccaagcctctgctgagactgaagggattcccttcctttcctctggtcgagagacaggccaacgaagtggactggtgggacatggtgtgtaacgtgaagaagctgatcaacgagaaaaaggaggatggcaaggtgttttggcagaatctggctggctacaagagacaggaagccctgagaccatacctgagcagcgaggaagatcggaagaagggaaagaaattcgctcggtaccagctgggcgacctgctgctgcacctggaaaagaagcacggcgaggactggggaaaggtgtacgacgaggcctgggagcggattgacaagaaagtggaaggcctgagcaagcacatcaagctggaagaggaacggagaagcgaggacgcccagagcaaggccgccctgaccgactggctgcgggctaaggccagcttcgtgatcgagggcctgaaggaggccgacaaggacgagttctgcagatgcgagctgaagctgcagaagtggtacggggacctgcggggaaagcccttcgccatcgaagccgagaacagcatcctggacatcagcggcttcagcaagcagtacaactgtgccttcatctggcagaaggacggcgtgaagaagctgaacctgtacctgatcatcaactacttcaagggcggcaagctgcggttcaagaagatcaaacctgaagccttcgaagccaacagattctacaccgtgatcaacaaaaagagcggcgagatcgtgcccatggaggtgaacttcaacttcgacgaccccaacctgatcatcctgcctctggcctttggcaagagacagggcagagaattcatctggaacgacctgctgtccctggaaaccggcagcctgaagctggccaacggaagagtgatcgagaagacactgtacaacagaagaacccggcaggatgagcctgccctgttcgtggccctgaccttcgagcggcgggaggtcctggactcctccaatatcaaaccaatgaacctgatcggcgtggcaagaggcgaaaacatccccgccgtgatcgccctgaccgaccccgagggctgcccactgagccggtttaaggatagcctgggaaacccaacccacatcctgagaatcggcgagagctataaggagaagcagcggaccatccaggccaagaaggaggtggagcagcggagagccggcggctacagccggaagtacgccagcaaagccaagaatctggcagacgatatggtgagaaacaccgctagagatctgctgtactacgccgtgacccaggatgccatgctgatcttcgccaacctgagccggggcttcggccggcagggcaagcggaccttcatggccgagagacagtacacacggatggaggactggctgaccgccaagctggcctacgagggcctgagcaagacctacctgtccaagacactggcccagtacacctccaagacatgcagcaactgtgggtttaccatcaccagcgccgactacgacagggtgctggagaagctgaagaagacagcaacaggctggatgaccacaattaacggcaaggagctgaaggtggagggccagattacctactacaacagatacaagagacagaacgtagtcaaggacctgtccgtcgagctggatagactgagcgaagaatctgtgaacaacgacatctcctcctggacaaagggcagaagcggagaagctctgagcctcctgaagaaaagattctcccatagacccgtgcaggagaagttcgtgtgcctgaactgcggcttcgagacacacgcagccgagcaagccgccctgaacatcgccagatcctggctgttcctgcggagccaggagtacaagaaataccagacaaacaagacaaccggcaacaccgataagagagccttcgtcgagacctggcagtccttttaccggaagaagcttaaggaggtgtggaaacctgccgtgcggtctggcggatctggcggaggctccagcaagggcagcctgatgttcagggacgtgagcatcgacttcagccaggaggagtgggagtgcctggacagcggccagatgaacctgtacaaggaggtgatgctggagaacttcagcaacctggtgagcgtgggcctgagcagcagcaagcccgccgtgatcagcctgctggagcagggcaaggagccctggatggtggacagggagctgaccaggggcctgtgcagcgacctggagagcatgggcggcccaagcagcggcgcccctcctcccagcggcggcagcccagccggctccccaacctctaccgaggagggcacctctgagtccgccacccccgagagcggccctggcacctccaccgagcccagcgagggcagcgcacccggcagccctgccggcagccccacctccacagaggagggaaccagcaccgagcccagcgaaggcagcgccccaggcaccagcaccgagcctagtgagcaggagattaaacggatcaacaagatcagaagaagacttgtgaaagacagcaacaccaagaaggccggcaagacaggccccatgaaaaccctgctggttagagtgatgacacccgatctgagagagcggctggaaaacctgagaaagaagcctgaaaatatcccccagcccatcagcaatacatctagagccaacctgaataagctgctgaccgattacaccgaaatgaagaaggcgatcctgcatgtgtactgggaagagttccagaaggaccctgtgggcctgatgagccgggtggcccagcctgccagcaagaagatcgatcagaacaagctgaaacctgagatggacgagaagggcaacctgaccaccgccggctttgcctgctctcagtgtggccagcccctgttcgtgtacaagctggagcaggtgtctgagaagggcaaggcttacaccaactacttcggacggtgcaatgtggccgagcacgaaaagctgatcctgctggcccagctgaagcccgagaaggatagcgacgaagccgtgacatatagcctgggaaagtttgggcagagggccctggatttctacagcattcatgtgaccaaggagtccacccaccccgtgaagcccctggcccagatcgccggaaacagatacgcctccggacctgtgggaaaggccctgagcgacgcatgtatgggcacaatcgcctccttcctgtctaagtaccaggacatcatcatcgaacaccagaaggtggtgaagggcaaccagaagagactggagagcctgcgggagctggccggcaaggaaaacctggaataccctagcgtgaccctgccacctcagcctcacaccaaggagggcgttgatgcctacaacgaagtgatcgcccgggtgcgaatgtgggtgaacctgaacctgtggcagaagctgaagctaagcagagatgatgccaagcctctgctgagactgaagggattcccttcctttcctctggtcgagagacaggccaacgaagtggactggtgggacatggtgtgtaacgtgaagaagctgatcaacgagaaaaaggaggatggcaaggtgttttggcagaatctggctggctacaagagacaggaagccctgagaccatacctgagcagcgaggaagatcggaagaagggaaagaaattcgctcggtaccagctgggcgacctgctgctgcacctggaaaagaagcacggcgaggactggggaaaggtgtacgacgaggcctgggagcggattgacaagaaagtggaaggcctgagcaagcacatcaagctggaagaggaacggagaagcgaggacgcccagagcaaggccgccctgaccgactggctgcgggctaaggccagcttcgtgatcgagggcctgaaggaggccgacaaggacgagttctgcagatgcgagctgaagctgcagaagtggtacggggacctgcggggaaagcccttcgccatcgaagccgagaacagcatcctggacatcagcggcttcagcaagcagtacaactgtgccttcatctggcagaaggacggcgtgaagaagctgaacctgtacctgatcatcaactacttcaagggcggcaagctgcggttcaagaagatcaaacctgaagccttcgaagccaacagattctacaccgtgatcaacaaaaagagcggcgagatcgtgcccatggaggtgaacttcaacttcgacgaccccaacctgatcatcctgcctctggcctttggcaagagacagggcagagaattcatctggaacgacctgctgtccctggaaaccggcagcctgaagctggccaacggaagagtgatcgagaagacactgtacaacagaagaacccggcaggatgagcctgccctgttcgtggccctgaccttcgagcggcgggaggtcctggactcctccaatatcaaaccaatgaacctgatcggcgtggcaagaggcgaaaacatccccgccgtgatcgccctgaccgaccccgagggctgcccactgagccggtttaaggatagcctgggaaacccaacccacatcctgagaatcggcgagagctataaggagaagcagcggaccatccaggccaagaaggaggtggagcagcggagagccggcggctacagccggaagtacgccagcaaagccaagaatctggcagacgatatggtgagaaacaccgctagagatctgctgtactacgccgtgacccaggatgccatgctgatcttcgccaacctgagccggggcttcggccggcagggcaagcggaccttcatggccgagagacagtacacacggatggaggactggctgaccgccaagctggcctacgagggcctgagcaagacctacctgtccaagacactggcccagtacacctccaagacatgcagcaactgtgggtttaccatcaccagcgccgactacgacagggtgctggagaagctgaagaagacagcaacaggctggatgaccacaattaacggcaaggagctgaaggtggagggccagattacctactacaacagatacaagagacagaacgtagtcaaggacctgtccgtcgagctggatagactgagcgaagaatctgtgaacaacgacatctcctcctggacaaagggcagaagcggagaagctctgagcctcctgaagaaaagattctcccatagacccgtgcaggagaagttcgtgtgcctgaactgcggcttcgagacacacgcagccgagcaagccgccctgaacatcgccagatcctggctgttcctgcggagccaggagtacaagaaataccagacaaacaagacaaccggcaacaccgataagagagccttcgtcgagacctggcagtccttttaccggaagaagcttaaggaggtgtggaaacctgccgtgcggtctggcggatctggcggaggctcctagcaagggcagcctgatgttcagggacgtgagcatcgacttcagccaggaggagtgggagtgcctggacagcggccagatgaacctgtacaaggaggtgatgctggagaacttcagcaacctggtgagcgtgggcctgagcagcagcaagcccgccgtgatcagcctgctggagcagggcaaggagccctggatggtggacagggagctgaccaggggcctgtgcagcgacctggagagcatgggatctggctccggcagcggccccaagaaaaagagaaaagtctaagctgccttctgcggggcttgccttctggccatgcccttcttctctcccttgcacctgtacctcttggtctttgaataaagcctgagtaggaaggctagcaaaaaaaaaaaaaaaaaaaaaaaaaaaaaaaaaaaaaaaaaaaaaaaaaaaaaaaaaaaaaaaaaaaaaaaaaaaaaaaa

SEQ ID NO: 16659 - RNA, 9485 nt, synthetic construct
  source 1..9485: mol_type = other RNA
aggaaataagagagaaaagaagagtaagaagaaatataagagccaccatggcccctaagaagaagcgtaaagtgagccggatggaacgcctcgtctacgaggtgcggcagaagtgcagaaacatcgaggacatctgcatctcctgcggatctctgaacgtgaccctggagcacccactgttcatcggcggcatgtgccagaactgtaaaaactgttttctggagtgtgcctatcaatacgacgatgacggctaccagagctactgcaccatctgttgcggcggaagagaggtgctgatgtgtggaaataacaactgctgccggtgcttctgcgtggaatgcgtggacctgctggtgggccccggcgccgcccaggccgctattaaggaagatccttggaactgctacatgtgcggccacaagggcacatacggcctgctgagacggagagaggactggcctagcagactgcagatgttcttcgccaataaccacgaccaggagttcgacccccctaaggtgtaccctcccgtccccgccgagaagagaaagcccatccgggtcctgagcctgttcgatggcatcgccaccggtctgctggtgctgaaggacctgggcatccaggtggataggtacattgcctccgaggtgtgcgaggactccatcaccgtgggaatggtgcgtcatcagggcaagatcatgtacgtgggcgacgtgcggagcgtgacacagaagcatatccaggagtggggccctttcgacctggtgatcggcggcagcccttgcaatgacctgagcatcgtgaacccagcccggaagggcctgtacgagggaaccggcagactgttcttcgagttttacagactgctgcacgacgcccggcctaaggaaggcgacgaccggcccttcttttggctgttcgagaatgtggtggccatgggagtcagcgacaagcgggatattagccggttcctggagagcaaccccgtgatgatcgatgccaaggaagtgagcgccgcccaccgggccagatacttctggggcaatctgcctggcatgaacagacccctggccagcaccgtgaacgacaagctggagctgcaggagtgcctggagcacggccggatcgccaagttcagcaaggtgagaaccatcaccacccgaagcaacagcatcaaacaaggcaaggaccagcactttcctgtgttcatgaacgagaaggaggacatcctgtggtgtaccgagatggagagagtgttcgggttcccagtccactacacagatgtcagcaacatgtctagactggccagacagagactgctgggaagaagctggtccgtccctgtgatcagacacctgttcgcccctctgaaggagtacttcgcctgcgtgagcagcggcaacagcaacgccaacagccggggccccagcttctctagcggcctggtgccactgtccctgagagggagccacatgggccccatggagatctacaaaaccgtgagcgcctggaagcggcagcctgtgcgcgtgctgagcctgtttcggaatatcgataaagtcctgaaaagcctgggattcctggagagcggctctggctccggcggtggcaccctgaagtacgtggaggatgtgacaaacgtggtcagacgggatgtggagaagtggggccccttcgatctggtgtacggcagcacccaacccctgggcagctcttgtgaccggtgccctggctggtacatgtttcagttccaccggatcctgcagtacgccctgccgagacaggagtcccagcggccattcttttggattttcatggacaacttgctgctgaccgaggatgaccaggaaactaccactcggttcctgcagaccgaagccgtgaccctgcaggacgtgagaggccgggactaccagaacgccatgcgggtgtggtccaacatccctggactgaaaagcaagcacgcacctctgacccctaaagaagaggagtacctgcaggcccaggtgcggagcagaagcaagctggacgcccctaaggtggatctgctggtgaagaattgcctcctgcccctgagagagtacttcaagtatttcagccagaatagtctgcccctgggaggcagcggcggcggcgccctggtgacatttgaggacgtcgccgtgcggttcacccaggaggaatgggctctgctggatccttctcagaaaatcctgtaccgggacgtgatgagagagacataccggaatctgacctccgtgggcatcaactgggaatgttgggaccttgaagcctgcttcagaagcctgggaagaaacctgagagtgcaggtggtgaagagaaagtgcgagctgaccaacagcggcccctgcgccgagggcggcccaagcagcggcgcccctcctcccagcggcggcagcccagccggctccccaacctctaccgaggagggcacctctgagtccgccacccccgagagcggccctggcacctccaccgagcccagcgagggcagcgcacccggcagccctgccggcagccccacctccacagaggagggaaccagcaccgagcccagcgaaggcagcgccccaggcaccagcaccgagcctagtgagcaggagattaaacggatcaacaagatcagaagaagacttgtgaaagacagcaacaccaagaaggccggcaagacaggccccatgaaaaccctgctggttagagtgatgacacccgatctgagagagcggctggaaaacctgagaaagaagcctgaaaatatcccccagcccatcagcaatacatctagagccaacctgaataagctgctgaccgattacaccgaaatgaagaaggcgatcctgcatgtgtactgggaagagttccagaaggaccctgtgggcctgatgagccgggtggcccagcctgccagcaagaagatcgatcagaacaagctgaaacctgagatggacgagaagggcaacctgaccaccgccggctttgcctgctctcagtgtggccagcccctgttcgtgtacaagctggagcaggtgtctgagaagggcaaggcttacaccaactacttcggacggtgcaatgtggccgagcacgaaaagctgatcctgctggcccagctgaagcccgagaaggatagcgacgaagccgtgacatatagcctgggaaagtttgggcagagggccctggatttctacagcattcatgtgaccaaggagtccacccaccccgtgaagcccctggcccagatcgccggaaacagatacgcctccggacctgtgggaaaggccctgagcgacgcatgtatgggcacaatcgcctccttcctgtctaagtaccaggacatcatcatcgaacaccagaaggtggtgaagggcaaccagaagagactggagagcctgcgggagctggccggcaaggaaaacctggaataccctagcgtgaccctgccacctcagcctcacaccaaggagggcgttgatgcctacaacgaagtgatcgcccgggtgcgaatgtgggtgaacctgaacctgtggcagaagctgaagctaagcagagatgatgccaagcctctgctgagactgaagggattcccttcctttcctctggtcgagagacaggccaacgaagtggactggtgggacatggtgtgtaacgtgaagaagctgatcaacgagaaaaaggaggatggcaaggtgttttggcagaatctggctggctacaagagacaggaagccctgagaccatacctgagcagcgaggaagatcggaagaagggaaagaaattcgctcggtaccagctgggcgacctgctgctgcacctggaaaagaagcacggcgaggactggggaaaggtgtacgacgaggcctgggagcggattgacaagaaagtggaaggcctgagcaagcacatcaagctggaagaggaacggagaagcgaggacgcccagagcaaggccgccctgaccgactggctgcgggctaaggccagcttcgtgatcgagggcctgaaggaggccgacaaggacgagttctgcagatgcgagctgaagctgcagaagtggtacggggacctgcggggaaagcccttcgccatcgaagccgagaacagcatcctggacatcagcggcttcagcaagcagtacaactgtgccttcatctggcagaaggacggcgtgaagaagctgaacctgtacctgatcatcaactacttcaagggcggcaagctgcggttcaagaagatcaaacctgaagccttcgaagccaacagattctacaccgtgatcaacaaaaagagcggcgagatcgtgcccatggaggtgaacttcaacttcgacgaccccaacctgatcatcctgcctctggcctttggcaagagacagggcagagaattcatctggaacgacctgctgtccctggaaaccggcagcctgaagctggccaacggaagagtgatcgagaagacactgtacaacagaagaacccggcaggatgagcctgccctgttcgtggccctgaccttcgagcggcgggaggtcctggactcctccaatatcaaaccaatgaacctgatcggcgtggcaagaggcgaaaacatccccgccgtgatcgccctgaccgaccccgagggctgcccactgagccggtttaaggatagcctgggaaacccaacccacatcctgagaatcggcgagagctataaggagaagcagcggaccatccaggccaagaaggaggtggagcagcggagagccggcggctacagccggaagtacgccagcaaagccaagaatctggcagacgatatggtgagaaacaccgctagagatctgctgtactacgccgtgacccaggatgccatgctgatcttcgccaacctgagccggggcttcggccggcagggcaagcggaccttcatggccgagagacagtacacacggatggaggactggctgaccgccaagctggcctacgagggcctgagcaagacctacctgtccaagacactggcccagtacacctccaagacatgcagcaactgtgggtttaccatcaccagcgccgactacgacagggtgctggagaagctgaagaagacagcaacaggctggatgaccacaattaacggcaaggagctgaaggtggagggccagattacctactacaacagatacaagagacagaacgtagtcaaggacctgtccgtcgagctggatagactgagcgaagaatctgtgaacaacgacatctcctcctggacaaagggcagaagcggagaagctctgagcctcctgaagaaaagattctcccatagacccgtgcaggagaagttcgtgtgcctgaactgcggcttcgagacacacgcagccgagcaagccgccctgaacatcgccagatcctggctgttcctgcggagccaggagtacaagaaataccagacaaacaagacaaccggcaacaccgataagagagccttcgtcgagacctggcagtccttttaccggaagaagcttaaggaggtgtggaaacctgccgtgcggtctggcggatctggcggaggctcccagatgagggtgaccttcgaggacatcagcgtgagcttcagccaggaggagtggggctacctgaacgaggagcagaaggagctgtacagggaggtgatgaaggagaactaccagaccctgatcagcctggccaccgacagccccatcatcgaccccgacatcatcagcaggatcgagaggggcgaggagccctacgtgagggacgagcccgccagcgaggagagggagaccggcaggagcaacggcggcccaagcagcggcgcccctcctcccagcggcggcagcccagccggctccccaacctctaccgaggagggcacctctgagtccgccacccccgagagcggccctggcacctccaccgagcccagcgagggcagcgcacccggcagccctgccggcagccccacctccacagaggagggaaccagcaccgagcccagcgaaggcagcgccccaggcaccagcaccgagcctagtgagcaggagattaaacggatcaacaagatcagaagaagacttgtgaaagacagcaacaccaagaaggccggcaagacaggccccatgaaaaccctgctggttagagtgatgacacccgatctgagagagcggctggaaaacctgagaaagaagcctgaaaatatcccccagcccatcagcaatacatctagagccaacctgaataagctgctgaccgattacaccgaaatgaagaaggcgatcctgcatgtgtactgggaagagttccagaaggaccctgtgggcctgatgagccgggtggcccagcctgccagcaagaagatcgatcagaacaagctgaaacctgagatggacgagaagggcaacctgaccaccgccggctttgcctgctctcagtgtggccagcccctgttcgtgtacaagctggagcaggtgtctgagaagggcaaggcttacaccaactacttcggacggtgcaatgtggccgagcacgaaaagctgatcctgctggcccagctgaagcccgagaaggatagcgacgaagccgtgacatatagcctgggaaagtttgggcagagggccctggatttctacagcattcatgtgaccaaggagtccacccaccccgtgaagcccctggcccagatcgccggaaacagatacgcctccggacctgtgggaaaggccctgagcgacgcatgtatgggcacaatcgcctccttcctgtctaagtaccaggacatcatcatcgaacaccagaaggtggtgaagggcaaccagaagagactggagagcctgcgggagctggccggcaaggaaaacctggaataccctagcgtgaccctgccacctcagcctcacaccaaggagggcgttgatgcctacaacgaagtgatcgcccgggtgcgaatgtgggtgaacctgaacctgtggcagaagctgaagctaagcagagatgatgccaagcctctgctgagactgaagggattcccttcctttcctctggtcgagagacaggccaacgaagtggactggtgggacatggtgtgtaacgtgaagaagctgatcaacgagaaaaaggaggatggcaaggtgttttggcagaatctggctggctacaagagacaggaagccctgagaccatacctgagcagcgaggaagatcggaagaagggaaagaaattcgctcggtaccagctgggcgacctgctgctgcacctggaaaagaagcacggcgaggactggggaaaggtgtacgacgaggcctgggagcggattgacaagaaagtggaaggcctgagcaagcacatcaagctggaagaggaacggagaagcgaggacgcccagagcaaggccgccctgaccgactggctgcgggctaaggccagcttcgtgatcgagggcctgaaggaggccgacaaggacgagttctgcagatgcgagctgaagctgcagaagtggtacggggacctgcggggaaagcccttcgccatcgaagccgagaacagcatcctggacatcagcggcttcagcaagcagtacaactgtgccttcatctggcagaaggacggcgtgaagaagctgaacctgtacctgatcatcaactacttcaagggcggcaagctgcggttcaagaagatcaaacctgaagccttcgaagccaacagattctacaccgtgatcaacaaaaagagcggcgagatcgtgcccatggaggtgaacttcaacttcgacgaccccaacctgatcatcctgcctctggcctttggcaagagacagggcagagaattcatctggaacgacctgctgtccctggaaaccggcagcctgaagctggccaacggaagagtgatcgagaagacactgtacaacagaagaacccggcaggatgagcctgccctgttcgtggccctgaccttcgagcggcgggaggtcctggactcctccaatatcaaaccaatgaacctgatcggcgtggcaagaggcgaaaacatccccgccgtgatcgccctgaccgaccccgagggctgcccactgagccggtttaaggatagcctgggaaacccaacccacatcctgagaatcggcgagagctataaggagaagcagcggaccatccaggccaagaaggaggtggagcagcggagagccggcggctacagccggaagtacgccagcaaagccaagaatctggcagacgatatggtgagaaacaccgctagagatctgctgtactacgccgtgacccaggatgccatgctgatcttcgccaacctgagccggggcttcggccggcagggcaagcggaccttcatggccgagagacagtacacacggatggaggactggctgaccgccaagctggcctacgagggcctgagcaagacctacctgtccaagacactggcccagtacacctccaagacatgcagcaactgtgggtttaccatcaccagcgccgactacgacagggtgctggagaagctgaagaagacagcaacaggctggatgaccacaattaacggcaaggagctgaaggtggagggccagattacctactacaacagatacaagagacagaacgtagtcaaggacctgtccgtcgagctggatagactgagcgaagaatctgtgaacaacgacatctcctcctggacaaagggcagaagcggagaagctctgagcctcctgaagaaaagattctcccatagacccgtgcaggagaagttcgtgtgcctgaactgcggcttcgagacacacgcagccgagcaagccgccctgaacatcgccagatcctggctgttcctgcggagccaggagtacaagaaataccagacaaacaagacaaccggcaacaccgataagagagccttcgtcgagacctggcagtccttttaccggaagaagcttaaggaggtgtggaaacctgccgtgcggtctggcggatctggcggaggctcctcagatgagggtgaccttcgaggacatcagcgtgagcttcagccaggaggagtggggctacctgaacgaggagcagaaggagctgtacagggaggtgatgaaggagaactaccagaccctgatcagcctggccaccgacagccccatcatcgaccccgacatcatcagcaggatcgagaggggcgaggagccctacgtgagggacgagcccgccagcgaggagagggagaccggcaggagcaacggatctggctccggcagcggccccaagaaaaagagaaaagtctaagctgccttctgcggggcttgccttctggccatgcccttcttctctcccttgcacctgtacctcttggtctttgaataaagcctgagtaggaaggctagcaaaaaaaaaaaaaaaaaaaaaaaaaaaaaaaaaaaaaaaaaaaaaaaaaaaaaaaaaaaaaaaaaaaaaaaaaaaaaaaa

SEQ ID NO: 16660 - RNA, 9485 nt, synthetic construct
  source 1..9485: mol_type = other RNA
aggaaataagagagaaaagaagagtaagaagaaatataagagccaccatggcccctaagaagaagcgtaaagtgagccggatggaacgcctcgtctacgaggtgcggcagaagtgcagaaacatcgaggacatctgcatctcctgcggatctctgaacgtgaccctggagcacccactgttcatcggcggcatgtgccagaactgtaaaaactgttttctggagtgtgcctatcaatacgacgatgacggctaccagagctactgcaccatctgttgcggcggaagagaggtgctgatgtgtggaaataacaactgctgccggtgcttctgcgtggaatgcgtggacctgctggtgggccccggcgccgcccaggccgctattaaggaagatccttggaactgctacatgtgcggccacaagggcacatacggcctgctgagacggagagaggactggcctagcagactgcagatgttcttcgccaataaccacgaccaggagttcgacccccctaaggtgtaccctcccgtccccgccgagaagagaaagcccatccgggtcctgagcctgttcgatggcatcgccaccggtctgctggtgctgaaggacctgggcatccaggtggataggtacattgcctccgaggtgtgcgaggactccatcaccgtgggaatggtgcgtcatcagggcaagatcatgtacgtgggcgacgtgcggagcgtgacacagaagcatatccaggagtggggccctttcgacctggtgatcggcggcagcccttgcaatgacctgagcatcgtgaacccagcccggaagggcctgtacgagggaaccggcagactgttcttcgagttttacagactgctgcacgacgcccggcctaaggaaggcgacgaccggcccttcttttggctgttcgagaatgtggtggccatgggagtcagcgacaagcgggatattagccggttcctggagagcaaccccgtgatgatcgatgccaaggaagtgagcgccgcccaccgggccagatacttctggggcaatctgcctggcatgaacagacccctggccagcaccgtgaacgacaagctggagctgcaggagtgcctggagcacggccggatcgccaagttcagcaaggtgagaaccatcaccacccgaagcaacagcatcaaacaaggcaaggaccagcactttcctgtgttcatgaacgagaaggaggacatcctgtggtgtaccgagatggagagagtgttcgggttcccagtccactacacagatgtcagcaacatgtctagactggccagacagagactgctgggaagaagctggtccgtccctgtgatcagacacctgttcgcccctctgaaggagtacttcgcctgcgtgagcagcggcaacagcaacgccaacagccggggccccagcttctctagcggcctggtgccactgtccctgagagggagccacatgggccccatggagatctacaaaaccgtgagcgcctggaagcggcagcctgtgcgcgtgctgagcctgtttcggaatatcgataaagtcctgaaaagcctgggattcctggagagcggctctggctccggcggtggcaccctgaagtacgtggaggatgtgacaaacgtggtcagacgggatgtggagaagtggggccccttcgatctggtgtacggcagcacccaacccctgggcagctcttgtgaccggtgccctggctggtacatgtttcagttccaccggatcctgcagtacgccctgccgagacaggagtcccagcggccattcttttggattttcatggacaacttgctgctgaccgaggatgaccaggaaactaccactcggttcctgcagaccgaagccgtgaccctgcaggacgtgagaggccgggactaccagaacgccatgcgggtgtggtccaacatccctggactgaaaagcaagcacgcacctctgacccctaaagaagaggagtacctgcaggcccaggtgcggagcagaagcaagctggacgcccctaaggtggatctgctggtgaagaattgcctcctgcccctgagagagtacttcaagtatttcagccagaatagtctgcccctgggaggcagcggcggcggcgccctggtgacatttgaggacgtcgccgtgcggttcacccaggaggaatgggctctgctggatccttctcagaaaatcctgtaccgggacgtgatgagagagacataccggaatctgacctccgtgggcatcaactgggaatgttgggaccttgaagcctgcttcagaagcctgggaagaaacctgagagtgcaggtggtgaagagaaagtgcgagctgaccaacagcggcccctgcgccgagggcggcccaagcagcggcgcccctcctcccagcggcggcagcccagccggctccccaacctctaccgaggagggcacctctgagtccgccacccccgagagcggccctggcacctccaccgagcccagcgagggcagcgcacccggcagccctgccggcagccccacctccacagaggagggaaccagcaccgagcccagcgaaggcagcgccccaggcaccagcaccgagcctagtgagcaggagattaaacggatcaacaagatcagaagaagacttgtgaaagacagcaacaccaagaaggccggcaagacaggccccatgaaaaccctgctggttagagtgatgacacccgatctgagagagcggctggaaaacctgagaaagaagcctgaaaatatcccccagcccatcagcaatacatctagagccaacctgaataagctgctgaccgattacaccgaaatgaagaaggcgatcctgcatgtgtactgggaagagttccagaaggaccctgtgggcctgatgagccgggtggcccagcctgccagcaagaagatcgatcagaacaagctgaaacctgagatggacgagaagggcaacctgaccaccgccggctttgcctgctctcagtgtggccagcccctgttcgtgtacaagctggagcaggtgtctgagaagggcaaggcttacaccaactacttcggacggtgcaatgtggccgagcacgaaaagctgatcctgctggcccagctgaagcccgagaaggatagcgacgaagccgtgacatatagcctgggaaagtttgggcagagggccctggatttctacagcattcatgtgaccaaggagtccacccaccccgtgaagcccctggcccagatcgccggaaacagatacgcctccggacctgtgggaaaggccctgagcgacgcatgtatgggcacaatcgcctccttcctgtctaagtaccaggacatcatcatcgaacaccagaaggtggtgaagggcaaccagaagagactggagagcctgcgggagctggccggcaaggaaaacctggaataccctagcgtgaccctgccacctcagcctcacaccaaggagggcgttgatgcctacaacgaagtgatcgcccgggtgcgaatgtgggtgaacctgaacctgtggcagaagctgaagctaagcagagatgatgccaagcctctgctgagactgaagggattcccttcctttcctctggtcgagagacaggccaacgaagtggactggtgggacatggtgtgtaacgtgaagaagctgatcaacgagaaaaaggaggatggcaaggtgttttggcagaatctggctggctacaagagacaggaagccctgagaccatacctgagcagcgaggaagatcggaagaagggaaagaaattcgctcggtaccagctgggcgacctgctgctgcacctggaaaagaagcacggcgaggactggggaaaggtgtacgacgaggcctgggagcggattgacaagaaagtggaaggcctgagcaagcacatcaagctggaagaggaacggagaagcgaggacgcccagagcaaggccgccctgaccgactggctgcgggctaaggccagcttcgtgatcgagggcctgaaggaggccgacaaggacgagttctgcagatgcgagctgaagctgcagaagtggtacggggacctgcggggaaagcccttcgccatcgaagccgagaacagcatcctggacatcagcggcttcagcaagcagtacaactgtgccttcatctggcagaaggacggcgtgaagaagctgaacctgtacctgatcatcaactacttcaagggcggcaagctgcggttcaagaagatcaaacctgaagccttcgaagccaacagattctacaccgtgatcaacaaaaagagcggcgagatcgtgcccatggaggtgaacttcaacttcgacgaccccaacctgatcatcctgcctctggcctttggcaagagacagggcagagaattcatctggaacgacctgctgtccctggaaaccggcagcctgaagctggccaacggaagagtgatcgagaagacactgtacaacagaagaacccggcaggatgagcctgccctgttcgtggccctgaccttcgagcggcgggaggtcctggactcctccaatatcaaaccaatgaacctgatcggcgtggcaagaggcgaaaacatccccgccgtgatcgccctgaccgaccccgagggctgcccactgagccggtttaaggatagcctgggaaacccaacccacatcctgagaatcggcgagagctataaggagaagcagcggaccatccaggccaagaaggaggtggagcagcggagagccggcggctacagccggaagtacgccagcaaagccaagaatctggcagacgatatggtgagaaacaccgctagagatctgctgtactacgccgtgacccaggatgccatgctgatcttcgccaacctgagccggggcttcggccggcagggcaagcggaccttcatggccgagagacagtacacacggatggaggactggctgaccgccaagctggcctacgagggcctgagcaagacctacctgtccaagacactggcccagtacacctccaagacatgcagcaactgtgggtttaccatcaccagcgccgactacgacagggtgctggagaagctgaagaagacagcaacaggctggatgaccacaattaacggcaaggagctgaaggtggagggccagattacctactacaacagatacaagagacagaacgtagtcaaggacctgtccgtcgagctggatagactgagcgaagaatctgtgaacaacgacatctcctcctggacaaagggcagaagcggagaagctctgagcctcctgaagaaaagattctcccatagacccgtgcaggagaagttcgtgtgcctgaactgcggcttcgagacacacgcagccgagcaagccgccctgaacatcgccagatcctggctgttcctgcggagccaggagtacaagaaataccagacaaacaagacaaccggcaacaccgataagagagccttcgtcgagacctggcagtccttttaccggaagaagcttaaggaggtgtggaaacctgccgtgcggtctggcggatctggcggaggctccctggtgttcgaggacgtggccatcaacttcacccccgaggagtgggccctgctggaccccgcccagaggaggctgtacagggacgtgatgctggagaccttcaagaacctggccttcgtgggcagctgcctgcacgtgaagaccagcggcagcagcgcccagagggacatcctggagaacgtgctgtgcagcgaggagaagatcgtgaggttcaagaggaacgacagcaagagcgtgctgggcggcggcccaagcagcggcgcccctcctcccagcggcggcagcccagccggctccccaacctctaccgaggagggcacctctgagtccgccacccccgagagcggccctggcacctccaccgagcccagcgagggcagcgcacccggcagccctgccggcagccccacctccacagaggagggaaccagcaccgagcccagcgaaggcagcgccccaggcaccagcaccgagcctagtgagcaggagattaaacggatcaacaagatcagaagaagacttgtgaaagacagcaacaccaagaaggccggcaagacaggccccatgaaaaccctgctggttagagtgatgacacccgatctgagagagcggctggaaaacctgagaaagaagcctgaaaatatcccccagcccatcagcaatacatctagagccaacctgaataagctgctgaccgattacaccgaaatgaagaaggcgatcctgcatgtgtactgggaagagttccagaaggaccctgtgggcctgatgagccgggtggcccagcctgccagcaagaagatcgatcagaacaagctgaaacctgagatggacgagaagggcaacctgaccaccgccggctttgcctgctctcagtgtggccagcccctgttcgtgtacaagctggagcaggtgtctgagaagggcaaggcttacaccaactacttcggacggtgcaatgtggccgagcacgaaaagctgatcctgctggcccagctgaagcccgagaaggatagcgacgaagccgtgacatatagcctgggaaagtttgggcagagggccctggatttctacagcattcatgtgaccaaggagtccacccaccccgtgaagcccctggcccagatcgccggaaacagatacgcctccggacctgtgggaaaggccctgagcgacgcatgtatgggcacaatcgcctccttcctgtctaagtaccaggacatcatcatcgaacaccagaaggtggtgaagggcaaccagaagagactggagagcctgcgggagctggccggcaaggaaaacctggaataccctagcgtgaccctgccacctcagcctcacaccaaggagggcgttgatgcctacaacgaagtgatcgcccgggtgcgaatgtgggtgaacctgaacctgtggcagaagctgaagctaagcagagatgatgccaagcctctgctgagactgaagggattcccttcctttcctctggtcgagagacaggccaacgaagtggactggtgggacatggtgtgtaacgtgaagaagctgatcaacgagaaaaaggaggatggcaaggtgttttggcagaatctggctggctacaagagacaggaagccctgagaccatacctgagcagcgaggaagatcggaagaagggaaagaaattcgctcggtaccagctgggcgacctgctgctgcacctggaaaagaagcacggcgaggactggggaaaggtgtacgacgaggcctgggagcggattgacaagaaagtggaaggcctgagcaagcacatcaagctggaagaggaacggagaagcgaggacgcccagagcaaggccgccctgaccgactggctgcgggctaaggccagcttcgtgatcgagggcctgaaggaggccgacaaggacgagttctgcagatgcgagctgaagctgcagaagtggtacggggacctgcggggaaagcccttcgccatcgaagccgagaacagcatcctggacatcagcggcttcagcaagcagtacaactgtgccttcatctggcagaaggacggcgtgaagaagctgaacctgtacctgatcatcaactacttcaagggcggcaagctgcggttcaagaagatcaaacctgaagccttcgaagccaacagattctacaccgtgatcaacaaaaagagcggcgagatcgtgcccatggaggtgaacttcaacttcgacgaccccaacctgatcatcctgcctctggcctttggcaagagacagggcagagaattcatctggaacgacctgctgtccctggaaaccggcagcctgaagctggccaacggaagagtgatcgagaagacactgtacaacagaagaacccggcaggatgagcctgccctgttcgtggccctgaccttcgagcggcgggaggtcctggactcctccaatatcaaaccaatgaacctgatcggcgtggcaagaggcgaaaacatccccgccgtgatcgccctgaccgaccccgagggctgcccactgagccggtttaaggatagcctgggaaacccaacccacatcctgagaatcggcgagagctataaggagaagcagcggaccatccaggccaagaaggaggtggagcagcggagagccggcggctacagccggaagtacgccagcaaagccaagaatctggcagacgatatggtgagaaacaccgctagagatctgctgtactacgccgtgacccaggatgccatgctgatcttcgccaacctgagccggggcttcggccggcagggcaagcggaccttcatggccgagagacagtacacacggatggaggactggctgaccgccaagctggcctacgagggcctgagcaagacctacctgtccaagacactggcccagtacacctccaagacatgcagcaactgtgggtttaccatcaccagcgccgactacgacagggtgctggagaagctgaagaagacagcaacaggctggatgaccacaattaacggcaaggagctgaaggtggagggccagattacctactacaacagatacaagagacagaacgtagtcaaggacctgtccgtcgagctggatagactgagcgaagaatctgtgaacaacgacatctcctcctggacaaagggcagaagcggagaagctctgagcctcctgaagaaaagattctcccatagacccgtgcaggagaagttcgtgtgcctgaactgcggcttcgagacacacgcagccgagcaagccgccctgaacatcgccagatcctggctgttcctgcggagccaggagtacaagaaataccagacaaacaagacaaccggcaacaccgataagagagccttcgtcgagacctggcagtccttttaccggaagaagcttaaggaggtgtggaaacctgccgtgcggtctggcggatctggcggaggctcctctggtgttcgaggacgtggccatcaacttcacccccgaggagtgggccctgctggaccccgcccagaggaggctgtacagggacgtgatgctggagaccttcaagaacctggccttcgtgggcagctgcctgcacgtgaagaccagcggcagcagcgcccagagggacatcctggagaacgtgctgtgcagcgaggagaagatcgtgaggttcaagaggaacgacagcaagagcgtgctgggcggatctggctccggcagcggccccaagaaaaagagaaaagtctaagctgccttctgcggggcttgccttctggccatgcccttcttctctcccttgcacctgtacctcttggtctttgaataaagcctgagtaggaaggctagcaaaaaaaaaaaaaaaaaaaaaaaaaaaaaaaaaaaaaaaaaaaaaaaaaaaaaaaaaaaaaaaaaaaaaaaaaaaaaaaa

SEQ ID NO: 16661 - RNA, 9485 nt, synthetic construct
  source 1..9485: mol_type = other RNA
aggaaataagagagaaaagaagagtaagaagaaatataagagccaccatggcccctaagaagaagcgtaaagtgagccggatggaacgcctcgtctacgaggtgcggcagaagtgcagaaacatcgaggacatctgcatctcctgcggatctctgaacgtgaccctggagcacccactgttcatcggcggcatgtgccagaactgtaaaaactgttttctggagtgtgcctatcaatacgacgatgacggctaccagagctactgcaccatctgttgcggcggaagagaggtgctgatgtgtggaaataacaactgctgccggtgcttctgcgtggaatgcgtggacctgctggtgggccccggcgccgcccaggccgctattaaggaagatccttggaactgctacatgtgcggccacaagggcacatacggcctgctgagacggagagaggactggcctagcagactgcagatgttcttcgccaataaccacgaccaggagttcgacccccctaaggtgtaccctcccgtccccgccgagaagagaaagcccatccgggtcctgagcctgttcgatggcatcgccaccggtctgctggtgctgaaggacctgggcatccaggtggataggtacattgcctccgaggtgtgcgaggactccatcaccgtgggaatggtgcgtcatcagggcaagatcatgtacgtgggcgacgtgcggagcgtgacacagaagcatatccaggagtggggccctttcgacctggtgatcggcggcagcccttgcaatgacctgagcatcgtgaacccagcccggaagggcctgtacgagggaaccggcagactgttcttcgagttttacagactgctgcacgacgcccggcctaaggaaggcgacgaccggcccttcttttggctgttcgagaatgtggtggccatgggagtcagcgacaagcgggatattagccggttcctggagagcaaccccgtgatgatcgatgccaaggaagtgagcgccgcccaccgggccagatacttctggggcaatctgcctggcatgaacagacccctggccagcaccgtgaacgacaagctggagctgcaggagtgcctggagcacggccggatcgccaagttcagcaaggtgagaaccatcaccacccgaagcaacagcatcaaacaaggcaaggaccagcactttcctgtgttcatgaacgagaaggaggacatcctgtggtgtaccgagatggagagagtgttcgggttcccagtccactacacagatgtcagcaacatgtctagactggccagacagagactgctgggaagaagctggtccgtccctgtgatcagacacctgttcgcccctctgaaggagtacttcgcctgcgtgagcagcggcaacagcaacgccaacagccggggccccagcttctctagcggcctggtgccactgtccctgagagggagccacatgggccccatggagatctacaaaaccgtgagcgcctggaagcggcagcctgtgcgcgtgctgagcctgtttcggaatatcgataaagtcctgaaaagcctgggattcctggagagcggctctggctccggcggtggcaccctgaagtacgtggaggatgtgacaaacgtggtcagacgggatgtggagaagtggggccccttcgatctggtgtacggcagcacccaacccctgggcagctcttgtgaccggtgccctggctggtacatgtttcagttccaccggatcctgcagtacgccctgccgagacaggagtcccagcggccattcttttggattttcatggacaacttgctgctgaccgaggatgaccaggaaactaccactcggttcctgcagaccgaagccgtgaccctgcaggacgtgagaggccgggactaccagaacgccatgcgggtgtggtccaacatccctggactgaaaagcaagcacgcacctctgacccctaaagaagaggagtacctgcaggcccaggtgcggagcagaagcaagctggacgcccctaaggtggatctgctggtgaagaattgcctcctgcccctgagagagtacttcaagtatttcagccagaatagtctgcccctgggaggcagcggcggcggcgccctggtgacatttgaggacgtcgccgtgcggttcacccaggaggaatgggctctgctggatccttctcagaaaatcctgtaccgggacgtgatgagagagacataccggaatctgacctccgtgggcatcaactgggaatgttgggaccttgaagcctgcttcagaagcctgggaagaaacctgagagtgcaggtggtgaagagaaagtgcgagctgaccaacagcggcccctgcgccgagggcggcccaagcagcggcgcccctcctcccagcggcggcagcccagccggctccccaacctctaccgaggagggcacctctgagtccgccacccccgagagcggccctggcacctccaccgagcccagcgagggcagcgcacccggcagccctgccggcagccccacctccacagaggagggaaccagcaccgagcccagcgaaggcagcgccccaggcaccagcaccgagcctagtgagcaggagattaaacggatcaacaagatcagaagaagacttgtgaaagacagcaacaccaagaaggccggcaagacaggccccatgaaaaccctgctggttagagtgatgacacccgatctgagagagcggctggaaaacctgagaaagaagcctgaaaatatcccccagcccatcagcaatacatctagagccaacctgaataagctgctgaccgattacaccgaaatgaagaaggcgatcctgcatgtgtactgggaagagttccagaaggaccctgtgggcctgatgagccgggtggcccagcctgccagcaagaagatcgatcagaacaagctgaaacctgagatggacgagaagggcaacctgaccaccgccggctttgcctgctctcagtgtggccagcccctgttcgtgtacaagctggagcaggtgtctgagaagggcaaggcttacaccaactacttcggacggtgcaatgtggccgagcacgaaaagctgatcctgctggcccagctgaagcccgagaaggatagcgacgaagccgtgacatatagcctgggaaagtttgggcagagggccctggatttctacagcattcatgtgaccaaggagtccacccaccccgtgaagcccctggcccagatcgccggaaacagatacgcctccggacctgtgggaaaggccctgagcgacgcatgtatgggcacaatcgcctccttcctgtctaagtaccaggacatcatcatcgaacaccagaaggtggtgaagggcaaccagaagagactggagagcctgcgggagctggccggcaaggaaaacctggaataccctagcgtgaccctgccacctcagcctcacaccaaggagggcgttgatgcctacaacgaagtgatcgcccgggtgcgaatgtgggtgaacctgaacctgtggcagaagctgaagctaagcagagatgatgccaagcctctgctgagactgaagggattcccttcctttcctctggtcgagagacaggccaacgaagtggactggtgggacatggtgtgtaacgtgaagaagctgatcaacgagaaaaaggaggatggcaaggtgttttggcagaatctggctggctacaagagacaggaagccctgagaccatacctgagcagcgaggaagatcggaagaagggaaagaaattcgctcggtaccagctgggcgacctgctgctgcacctggaaaagaagcacggcgaggactggggaaaggtgtacgacgaggcctgggagcggattgacaagaaagtggaaggcctgagcaagcacatcaagctggaagaggaacggagaagcgaggacgcccagagcaaggccgccctgaccgactggctgcgggctaaggccagcttcgtgatcgagggcctgaaggaggccgacaaggacgagttctgcagatgcgagctgaagctgcagaagtggtacggggacctgcggggaaagcccttcgccatcgaagccgagaacagcatcctggacatcagcggcttcagcaagcagtacaactgtgccttcatctggcagaaggacggcgtgaagaagctgaacctgtacctgatcatcaactacttcaagggcggcaagctgcggttcaagaagatcaaacctgaagccttcgaagccaacagattctacaccgtgatcaacaaaaagagcggcgagatcgtgcccatggaggtgaacttcaacttcgacgaccccaacctgatcatcctgcctctggcctttggcaagagacagggcagagaattcatctggaacgacctgctgtccctggaaaccggcagcctgaagctggccaacggaagagtgatcgagaagacactgtacaacagaagaacccggcaggatgagcctgccctgttcgtggccctgaccttcgagcggcgggaggtcctggactcctccaatatcaaaccaatgaacctgatcggcgtggcaagaggcgaaaacatccccgccgtgatcgccctgaccgaccccgagggctgcccactgagccggtttaaggatagcctgggaaacccaacccacatcctgagaatcggcgagagctataaggagaagcagcggaccatccaggccaagaaggaggtggagcagcggagagccggcggctacagccggaagtacgccagcaaagccaagaatctggcagacgatatggtgagaaacaccgctagagatctgctgtactacgccgtgacccaggatgccatgctgatcttcgccaacctgagccggggcttcggccggcagggcaagcggaccttcatggccgagagacagtacacacggatggaggactggctgaccgccaagctggcctacgagggcctgagcaagacctacctgtccaagacactggcccagtacacctccaagacatgcagcaactgtgggtttaccatcaccagcgccgactacgacagggtgctggagaagctgaagaagacagcaacaggctggatgaccacaattaacggcaaggagctgaaggtggagggccagattacctactacaacagatacaagagacagaacgtagtcaaggacctgtccgtcgagctggatagactgagcgaagaatctgtgaacaacgacatctcctcctggacaaagggcagaagcggagaagctctgagcctcctgaagaaaagattctcccatagacccgtgcaggagaagttcgtgtgcctgaactgcggcttcgagacacacgcagccgagcaagccgccctgaacatcgccagatcctggctgttcctgcggagccaggagtacaagaaataccagacaaacaagacaaccggcaacaccgataagagagccttcgtcgagacctggcagtccttttaccggaagaagcttaaggaggtgtggaaacctgccgtgcggtctggcggatctggcggaggctccggcccctggaccctgctgaccttcagggacgtggccatcgagttcagccaggaggagtggggctgcctgaaccacagccagagggagctgtacagggacgtgatgctggagacctacggccacctgctgttcctgggcctggtgagcaagcccgacctggtgatcctgctggagcagaagaaggagctgtggggcgtgaagaggaaggagaccgtggccagccaccccggcaggtgggagatcggcggcccaagcagcggcgcccctcctcccagcggcggcagcccagccggctccccaacctctaccgaggagggcacctctgagtccgccacccccgagagcggccctggcacctccaccgagcccagcgagggcagcgcacccggcagccctgccggcagccccacctccacagaggagggaaccagcaccgagcccagcgaaggcagcgccccaggcaccagcaccgagcctagtgagcaggagattaaacggatcaacaagatcagaagaagacttgtgaaagacagcaacaccaagaaggccggcaagacaggccccatgaaaaccctgctggttagagtgatgacacccgatctgagagagcggctggaaaacctgagaaagaagcctgaaaatatcccccagcccatcagcaatacatctagagccaacctgaataagctgctgaccgattacaccgaaatgaagaaggcgatcctgcatgtgtactgggaagagttccagaaggaccctgtgggcctgatgagccgggtggcccagcctgccagcaagaagatcgatcagaacaagctgaaacctgagatggacgagaagggcaacctgaccaccgccggctttgcctgctctcagtgtggccagcccctgttcgtgtacaagctggagcaggtgtctgagaagggcaaggcttacaccaactacttcggacggtgcaatgtggccgagcacgaaaagctgatcctgctggcccagctgaagcccgagaaggatagcgacgaagccgtgacatatagcctgggaaagtttgggcagagggccctggatttctacagcattcatgtgaccaaggagtccacccaccccgtgaagcccctggcccagatcgccggaaacagatacgcctccggacctgtgggaaaggccctgagcgacgcatgtatgggcacaatcgcctccttcctgtctaagtaccaggacatcatcatcgaacaccagaaggtggtgaagggcaaccagaagagactggagagcctgcgggagctggccggcaaggaaaacctggaataccctagcgtgaccctgccacctcagcctcacaccaaggagggcgttgatgcctacaacgaagtgatcgcccgggtgcgaatgtgggtgaacctgaacctgtggcagaagctgaagctaagcagagatgatgccaagcctctgctgagactgaagggattcccttcctttcctctggtcgagagacaggccaacgaagtggactggtgggacatggtgtgtaacgtgaagaagctgatcaacgagaaaaaggaggatggcaaggtgttttggcagaatctggctggctacaagagacaggaagccctgagaccatacctgagcagcgaggaagatcggaagaagggaaagaaattcgctcggtaccagctgggcgacctgctgctgcacctggaaaagaagcacggcgaggactggggaaaggtgtacgacgaggcctgggagcggattgacaagaaagtggaaggcctgagcaagcacatcaagctggaagaggaacggagaagcgaggacgcccagagcaaggccgccctgaccgactggctgcgggctaaggccagcttcgtgatcgagggcctgaaggaggccgacaaggacgagttctgcagatgcgagctgaagctgcagaagtggtacggggacctgcggggaaagcccttcgccatcgaagccgagaacagcatcctggacatcagcggcttcagcaagcagtacaactgtgccttcatctggcagaaggacggcgtgaagaagctgaacctgtacctgatcatcaactacttcaagggcggcaagctgcggttcaagaagatcaaacctgaagccttcgaagccaacagattctacaccgtgatcaacaaaaagagcggcgagatcgtgcccatggaggtgaacttcaacttcgacgaccccaacctgatcatcctgcctctggcctttggcaagagacagggcagagaattcatctggaacgacctgctgtccctggaaaccggcagcctgaagctggccaacggaagagtgatcgagaagacactgtacaacagaagaacccggcaggatgagcctgccctgttcgtggccctgaccttcgagcggcgggaggtcctggactcctccaatatcaaaccaatgaacctgatcggcgtggcaagaggcgaaaacatccccgccgtgatcgccctgaccgaccccgagggctgcccactgagccggtttaaggatagcctgggaaacccaacccacatcctgagaatcggcgagagctataaggagaagcagcggaccatccaggccaagaaggaggtggagcagcggagagccggcggctacagccggaagtacgccagcaaagccaagaatctggcagacgatatggtgagaaacaccgctagagatctgctgtactacgccgtgacccaggatgccatgctgatcttcgccaacctgagccggggcttcggccggcagggcaagcggaccttcatggccgagagacagtacacacggatggaggactggctgaccgccaagctggcctacgagggcctgagcaagacctacctgtccaagacactggcccagtacacctccaagacatgcagcaactgtgggtttaccatcaccagcgccgactacgacagggtgctggagaagctgaagaagacagcaacaggctggatgaccacaattaacggcaaggagctgaaggtggagggccagattacctactacaacagatacaagagacagaacgtagtcaaggacctgtccgtcgagctggatagactgagcgaagaatctgtgaacaacgacatctcctcctggacaaagggcagaagcggagaagctctgagcctcctgaagaaaagattctcccatagacccgtgcaggagaagttcgtgtgcctgaactgcggcttcgagacacacgcagccgagcaagccgccctgaacatcgccagatcctggctgttcctgcggagccaggagtacaagaaataccagacaaacaagacaaccggcaacaccgataagagagccttcgtcgagacctggcagtccttttaccggaagaagcttaaggaggtgtggaaacctgccgtgcggtctggcggatctggcggaggctcctggcccctggaccctgctgaccttcagggacgtggccatcgagttcagccaggaggagtggggctgcctgaaccacagccagagggagctgtacagggacgtgatgctggagacctacggccacctgctgttcctgggcctggtgagcaagcccgacctggtgatcctgctggagcagaagaaggagctgtggggcgtgaagaggaaggagaccgtggccagccaccccggcaggtgggagatcggatctggctccggcagcggccccaagaaaaagagaaaagtctaagctgccttctgcggggcttgccttctggccatgcccttcttctctcccttgcacctgtacctcttggtctttgaataaagcctgagtaggaaggctagcaaaaaaaaaaaaaaaaaaaaaaaaaaaaaaaaaaaaaaaaaaaaaaaaaaaaaaaaaaaaaaaaaaaaaaaaaaaaaaaa

SEQ ID NO: 16662 - RNA, 9485 nt, synthetic construct
  source 1..9485: mol_type = other RNA
aggaaataagagagaaaagaagagtaagaagaaatataagagccaccatggcccctaagaagaagcgtaaagtgagccggatggaacgcctcgtctacgaggtgcggcagaagtgcagaaacatcgaggacatctgcatctcctgcggatctctgaacgtgaccctggagcacccactgttcatcggcggcatgtgccagaactgtaaaaactgttttctggagtgtgcctatcaatacgacgatgacggctaccagagctactgcaccatctgttgcggcggaagagaggtgctgatgtgtggaaataacaactgctgccggtgcttctgcgtggaatgcgtggacctgctggtgggccccggcgccgcccaggccgctattaaggaagatccttggaactgctacatgtgcggccacaagggcacatacggcctgctgagacggagagaggactggcctagcagactgcagatgttcttcgccaataaccacgaccaggagttcgacccccctaaggtgtaccctcccgtccccgccgagaagagaaagcccatccgggtcctgagcctgttcgatggcatcgccaccggtctgctggtgctgaaggacctgggcatccaggtggataggtacattgcctccgaggtgtgcgaggactccatcaccgtgggaatggtgcgtcatcagggcaagatcatgtacgtgggcgacgtgcggagcgtgacacagaagcatatccaggagtggggccctttcgacctggtgatcggcggcagcccttgcaatgacctgagcatcgtgaacccagcccggaagggcctgtacgagggaaccggcagactgttcttcgagttttacagactgctgcacgacgcccggcctaaggaaggcgacgaccggcccttcttttggctgttcgagaatgtggtggccatgggagtcagcgacaagcgggatattagccggttcctggagagcaaccccgtgatgatcgatgccaaggaagtgagcgccgcccaccgggccagatacttctggggcaatctgcctggcatgaacagacccctggccagcaccgtgaacgacaagctggagctgcaggagtgcctggagcacggccggatcgccaagttcagcaaggtgagaaccatcaccacccgaagcaacagcatcaaacaaggcaaggaccagcactttcctgtgttcatgaacgagaaggaggacatcctgtggtgtaccgagatggagagagtgttcgggttcccagtccactacacagatgtcagcaacatgtctagactggccagacagagactgctgggaagaagctggtccgtccctgtgatcagacacctgttcgcccctctgaaggagtacttcgcctgcgtgagcagcggcaacagcaacgccaacagccggggccccagcttctctagcggcctggtgccactgtccctgagagggagccacatgggccccatggagatctacaaaaccgtgagcgcctggaagcggcagcctgtgcgcgtgctgagcctgtttcggaatatcgataaagtcctgaaaagcctgggattcctggagagcggctctggctccggcggtggcaccctgaagtacgtggaggatgtgacaaacgtggtcagacgggatgtggagaagtggggccccttcgatctggtgtacggcagcacccaacccctgggcagctcttgtgaccggtgccctggctggtacatgtttcagttccaccggatcctgcagtacgccctgccgagacaggagtcccagcggccattcttttggattttcatggacaacttgctgctgaccgaggatgaccaggaaactaccactcggttcctgcagaccgaagccgtgaccctgcaggacgtgagaggccgggactaccagaacgccatgcgggtgtggtccaacatccctggactgaaaagcaagcacgcacctctgacccctaaagaagaggagtacctgcaggcccaggtgcggagcagaagcaagctggacgcccctaaggtggatctgctggtgaagaattgcctcctgcccctgagagagtacttcaagtatttcagccagaatagtctgcccctgggaggcagcggcggcggcgccctggtgacatttgaggacgtcgccgtgcggttcacccaggaggaatgggctctgctggatccttctcagaaaatcctgtaccgggacgtgatgagagagacataccggaatctgacctccgtgggcatcaactgggaatgttgggaccttgaagcctgcttcagaagcctgggaagaaacctgagagtgcaggtggtgaagagaaagtgcgagctgaccaacagcggcccctgcgccgagggcggcccaagcagcggcgcccctcctcccagcggcggcagcccagccggctccccaacctctaccgaggagggcacctctgagtccgccacccccgagagcggccctggcacctccaccgagcccagcgagggcagcgcacccggcagccctgccggcagccccacctccacagaggagggaaccagcaccgagcccagcgaaggcagcgccccaggcaccagcaccgagcctagtgagcaggagattaaacggatcaacaagatcagaagaagacttgtgaaagacagcaacaccaagaaggccggcaagacaggccccatgaaaaccctgctggttagagtgatgacacccgatctgagagagcggctggaaaacctgagaaagaagcctgaaaatatcccccagcccatcagcaatacatctagagccaacctgaataagctgctgaccgattacaccgaaatgaagaaggcgatcctgcatgtgtactgggaagagttccagaaggaccctgtgggcctgatgagccgggtggcccagcctgccagcaagaagatcgatcagaacaagctgaaacctgagatggacgagaagggcaacctgaccaccgccggctttgcctgctctcagtgtggccagcccctgttcgtgtacaagctggagcaggtgtctgagaagggcaaggcttacaccaactacttcggacggtgcaatgtggccgagcacgaaaagctgatcctgctggcccagctgaagcccgagaaggatagcgacgaagccgtgacatatagcctgggaaagtttgggcagagggccctggatttctacagcattcatgtgaccaaggagtccacccaccccgtgaagcccctggcccagatcgccggaaacagatacgcctccggacctgtgggaaaggccctgagcgacgcatgtatgggcacaatcgcctccttcctgtctaagtaccaggacatcatcatcgaacaccagaaggtggtgaagggcaaccagaagagactggagagcctgcgggagctggccggcaaggaaaacctggaataccctagcgtgaccctgccacctcagcctcacaccaaggagggcgttgatgcctacaacgaagtgatcgcccgggtgcgaatgtgggtgaacctgaacctgtggcagaagctgaagctaagcagagatgatgccaagcctctgctgagactgaagggattcccttcctttcctctggtcgagagacaggccaacgaagtggactggtgggacatggtgtgtaacgtgaagaagctgatcaacgagaaaaaggaggatggcaaggtgttttggcagaatctggctggctacaagagacaggaagccctgagaccatacctgagcagcgaggaagatcggaagaagggaaagaaattcgctcggtaccagctgggcgacctgctgctgcacctggaaaagaagcacggcgaggactggggaaaggtgtacgacgaggcctgggagcggattgacaagaaagtggaaggcctgagcaagcacatcaagctggaagaggaacggagaagcgaggacgcccagagcaaggccgccctgaccgactggctgcgggctaaggccagcttcgtgatcgagggcctgaaggaggccgacaaggacgagttctgcagatgcgagctgaagctgcagaagtggtacggggacctgcggggaaagcccttcgccatcgaagccgagaacagcatcctggacatcagcggcttcagcaagcagtacaactgtgccttcatctggcagaaggacggcgtgaagaagctgaacctgtacctgatcatcaactacttcaagggcggcaagctgcggttcaagaagatcaaacctgaagccttcgaagccaacagattctacaccgtgatcaacaaaaagagcggcgagatcgtgcccatggaggtgaacttcaacttcgacgaccccaacctgatcatcctgcctctggcctttggcaagagacagggcagagaattcatctggaacgacctgctgtccctggaaaccggcagcctgaagctggccaacggaagagtgatcgagaagacactgtacaacagaagaacccggcaggatgagcctgccctgttcgtggccctgaccttcgagcggcgggaggtcctggactcctccaatatcaaaccaatgaacctgatcggcgtggcaagaggcgaaaacatccccgccgtgatcgccctgaccgaccccgagggctgcccactgagccggtttaaggatagcctgggaaacccaacccacatcctgagaatcggcgagagctataaggagaagcagcggaccatccaggccaagaaggaggtggagcagcggagagccggcggctacagccggaagtacgccagcaaagccaagaatctggcagacgatatggtgagaaacaccgctagagatctgctgtactacgccgtgacccaggatgccatgctgatcttcgccaacctgagccggggcttcggccggcagggcaagcggaccttcatggccgagagacagtacacacggatggaggactggctgaccgccaagctggcctacgagggcctgagcaagacctacctgtccaagacactggcccagtacacctccaagacatgcagcaactgtgggtttaccatcaccagcgccgactacgacagggtgctggagaagctgaagaagacagcaacaggctggatgaccacaattaacggcaaggagctgaaggtggagggccagattacctactacaacagatacaagagacagaacgtagtcaaggacctgtccgtcgagctggatagactgagcgaagaatctgtgaacaacgacatctcctcctggacaaagggcagaagcggagaagctctgagcctcctgaagaaaagattctcccatagacccgtgcaggagaagttcgtgtgcctgaactgcggcttcgagacacacgcagccgagcaagccgccctgaacatcgccagatcctggctgttcctgcggagccaggagtacaagaaataccagacaaacaagacaaccggcaacaccgataagagagccttcgtcgagacctggcagtccttttaccggaagaagcttaaggaggtgtggaaacctgccgtgcggtctggcggatctggcggaggctccatggaggacctgctgagcttcaccgacgtggccatcgacttcagcgccgacgagtgcgagtgcctggacagcgcccagtggaacctgtacaaggaggtgatgctggagaactacagcaacctggtgttcctgggcctggccttcagcaagccccacctggtgaccttcctggagcagagcagcgacccctggagcgtgaagaggaaggccagcgccgccatcagcctgggcagcaagccccacggcggcccaagcagcggcgcccctcctcccagcggcggcagcccagccggctccccaacctctaccgaggagggcacctctgagtccgccacccccgagagcggccctggcacctccaccgagcccagcgagggcagcgcacccggcagccctgccggcagccccacctccacagaggagggaaccagcaccgagcccagcgaaggcagcgccccaggcaccagcaccgagcctagtgagcaggagattaaacggatcaacaagatcagaagaagacttgtgaaagacagcaacaccaagaaggccggcaagacaggccccatgaaaaccctgctggttagagtgatgacacccgatctgagagagcggctggaaaacctgagaaagaagcctgaaaatatcccccagcccatcagcaatacatctagagccaacctgaataagctgctgaccgattacaccgaaatgaagaaggcgatcctgcatgtgtactgggaagagttccagaaggaccctgtgggcctgatgagccgggtggcccagcctgccagcaagaagatcgatcagaacaagctgaaacctgagatggacgagaagggcaacctgaccaccgccggctttgcctgctctcagtgtggccagcccctgttcgtgtacaagctggagcaggtgtctgagaagggcaaggcttacaccaactacttcggacggtgcaatgtggccgagcacgaaaagctgatcctgctggcccagctgaagcccgagaaggatagcgacgaagccgtgacatatagcctgggaaagtttgggcagagggccctggatttctacagcattcatgtgaccaaggagtccacccaccccgtgaagcccctggcccagatcgccggaaacagatacgcctccggacctgtgggaaaggccctgagcgacgcatgtatgggcacaatcgcctccttcctgtctaagtaccaggacatcatcatcgaacaccagaaggtggtgaagggcaaccagaagagactggagagcctgcgggagctggccggcaaggaaaacctggaataccctagcgtgaccctgccacctcagcctcacaccaaggagggcgttgatgcctacaacgaagtgatcgcccgggtgcgaatgtgggtgaacctgaacctgtggcagaagctgaagctaagcagagatgatgccaagcctctgctgagactgaagggattcccttcctttcctctggtcgagagacaggccaacgaagtggactggtgggacatggtgtgtaacgtgaagaagctgatcaacgagaaaaaggaggatggcaaggtgttttggcagaatctggctggctacaagagacaggaagccctgagaccatacctgagcagcgaggaagatcggaagaagggaaagaaattcgctcggtaccagctgggcgacctgctgctgcacctggaaaagaagcacggcgaggactggggaaaggtgtacgacgaggcctgggagcggattgacaagaaagtggaaggcctgagcaagcacatcaagctggaagaggaacggagaagcgaggacgcccagagcaaggccgccctgaccgactggctgcgggctaaggccagcttcgtgatcgagggcctgaaggaggccgacaaggacgagttctgcagatgcgagctgaagctgcagaagtggtacggggacctgcggggaaagcccttcgccatcgaagccgagaacagcatcctggacatcagcggcttcagcaagcagtacaactgtgccttcatctggcagaaggacggcgtgaagaagctgaacctgtacctgatcatcaactacttcaagggcggcaagctgcggttcaagaagatcaaacctgaagccttcgaagccaacagattctacaccgtgatcaacaaaaagagcggcgagatcgtgcccatggaggtgaacttcaacttcgacgaccccaacctgatcatcctgcctctggcctttggcaagagacagggcagagaattcatctggaacgacctgctgtccctggaaaccggcagcctgaagctggccaacggaagagtgatcgagaagacactgtacaacagaagaacccggcaggatgagcctgccctgttcgtggccctgaccttcgagcggcgggaggtcctggactcctccaatatcaaaccaatgaacctgatcggcgtggcaagaggcgaaaacatccccgccgtgatcgccctgaccgaccccgagggctgcccactgagccggtttaaggatagcctgggaaacccaacccacatcctgagaatcggcgagagctataaggagaagcagcggaccatccaggccaagaaggaggtggagcagcggagagccggcggctacagccggaagtacgccagcaaagccaagaatctggcagacgatatggtgagaaacaccgctagagatctgctgtactacgccgtgacccaggatgccatgctgatcttcgccaacctgagccggggcttcggccggcagggcaagcggaccttcatggccgagagacagtacacacggatggaggactggctgaccgccaagctggcctacgagggcctgagcaagacctacctgtccaagacactggcccagtacacctccaagacatgcagcaactgtgggtttaccatcaccagcgccgactacgacagggtgctggagaagctgaagaagacagcaacaggctggatgaccacaattaacggcaaggagctgaaggtggagggccagattacctactacaacagatacaagagacagaacgtagtcaaggacctgtccgtcgagctggatagactgagcgaagaatctgtgaacaacgacatctcctcctggacaaagggcagaagcggagaagctctgagcctcctgaagaaaagattctcccatagacccgtgcaggagaagttcgtgtgcctgaactgcggcttcgagacacacgcagccgagcaagccgccctgaacatcgccagatcctggctgttcctgcggagccaggagtacaagaaataccagacaaacaagacaaccggcaacaccgataagagagccttcgtcgagacctggcagtccttttaccggaagaagcttaaggaggtgtggaaacctgccgtgcggtctggcggatctggcggaggctcctatggaggacctgctgagcttcaccgacgtggccatcgacttcagcgccgacgagtgcgagtgcctggacagcgcccagtggaacctgtacaaggaggtgatgctggagaactacagcaacctggtgttcctgggcctggccttcagcaagccccacctggtgaccttcctggagcagagcagcgacccctggagcgtgaagaggaaggccagcgccgccatcagcctgggcagcaagccccacggatctggctccggcagcggccccaagaaaaagagaaaagtctaagctgccttctgcggggcttgccttctggccatgcccttcttctctcccttgcacctgtacctcttggtctttgaataaagcctgagtaggaaggctagcaaaaaaaaaaaaaaaaaaaaaaaaaaaaaaaaaaaaaaaaaaaaaaaaaaaaaaaaaaaaaaaaaaaaaaaaaaaaaaaa

SEQ ID NO: 16663 - RNA, 9485 nt, synthetic construct
  source 1..9485: mol_type = other RNA
aggaaataagagagaaaagaagagtaagaagaaatataagagccaccatggcccctaagaagaagcgtaaagtgagccggatggaacgcctcgtctacgaggtgcggcagaagtgcagaaacatcgaggacatctgcatctcctgcggatctctgaacgtgaccctggagcacccactgttcatcggcggcatgtgccagaactgtaaaaactgttttctggagtgtgcctatcaatacgacgatgacggctaccagagctactgcaccatctgttgcggcggaagagaggtgctgatgtgtggaaataacaactgctgccggtgcttctgcgtggaatgcgtggacctgctggtgggccccggcgccgcccaggccgctattaaggaagatccttggaactgctacatgtgcggccacaagggcacatacggcctgctgagacggagagaggactggcctagcagactgcagatgttcttcgccaataaccacgaccaggagttcgacccccctaaggtgtaccctcccgtccccgccgagaagagaaagcccatccgggtcctgagcctgttcgatggcatcgccaccggtctgctggtgctgaaggacctgggcatccaggtggataggtacattgcctccgaggtgtgcgaggactccatcaccgtgggaatggtgcgtcatcagggcaagatcatgtacgtgggcgacgtgcggagcgtgacacagaagcatatccaggagtggggccctttcgacctggtgatcggcggcagcccttgcaatgacctgagcatcgtgaacccagcccggaagggcctgtacgagggaaccggcagactgttcttcgagttttacagactgctgcacgacgcccggcctaaggaaggcgacgaccggcccttcttttggctgttcgagaatgtggtggccatgggagtcagcgacaagcgggatattagccggttcctggagagcaaccccgtgatgatcgatgccaaggaagtgagcgccgcccaccgggccagatacttctggggcaatctgcctggcatgaacagacccctggccagcaccgtgaacgacaagctggagctgcaggagtgcctggagcacggccggatcgccaagttcagcaaggtgagaaccatcaccacccgaagcaacagcatcaaacaaggcaaggaccagcactttcctgtgttcatgaacgagaaggaggacatcctgtggtgtaccgagatggagagagtgttcgggttcccagtccactacacagatgtcagcaacatgtctagactggccagacagagactgctgggaagaagctggtccgtccctgtgatcagacacctgttcgcccctctgaaggagtacttcgcctgcgtgagcagcggcaacagcaacgccaacagccggggccccagcttctctagcggcctggtgccactgtccctgagagggagccacatgggccccatggagatctacaaaaccgtgagcgcctggaagcggcagcctgtgcgcgtgctgagcctgtttcggaatatcgataaagtcctgaaaagcctgggattcctggagagcggctctggctccggcggtggcaccctgaagtacgtggaggatgtgacaaacgtggtcagacgggatgtggagaagtggggccccttcgatctggtgtacggcagcacccaacccctgggcagctcttgtgaccggtgccctggctggtacatgtttcagttccaccggatcctgcagtacgccctgccgagacaggagtcccagcggccattcttttggattttcatggacaacttgctgctgaccgaggatgaccaggaaactaccactcggttcctgcagaccgaagccgtgaccctgcaggacgtgagaggccgggactaccagaacgccatgcgggtgtggtccaacatccctggactgaaaagcaagcacgcacctctgacccctaaagaagaggagtacctgcaggcccaggtgcggagcagaagcaagctggacgcccctaaggtggatctgctggtgaagaattgcctcctgcccctgagagagtacttcaagtatttcagccagaatagtctgcccctgggaggcagcggcggcggcgccctggtgacatttgaggacgtcgccgtgcggttcacccaggaggaatgggctctgctggatccttctcagaaaatcctgtaccgggacgtgatgagagagacataccggaatctgacctccgtgggcatcaactgggaatgttgggaccttgaagcctgcttcagaagcctgggaagaaacctgagagtgcaggtggtgaagagaaagtgcgagctgaccaacagcggcccctgcgccgagggcggcccaagcagcggcgcccctcctcccagcggcggcagcccagccggctccccaacctctaccgaggagggcacctctgagtccgccacccccgagagcggccctggcacctccaccgagcccagcgagggcagcgcacccggcagccctgccggcagccccacctccacagaggagggaaccagcaccgagcccagcgaaggcagcgccccaggcaccagcaccgagcctagtgagcaggagattaaacggatcaacaagatcagaagaagacttgtgaaagacagcaacaccaagaaggccggcaagacaggccccatgaaaaccctgctggttagagtgatgacacccgatctgagagagcggctggaaaacctgagaaagaagcctgaaaatatcccccagcccatcagcaatacatctagagccaacctgaataagctgctgaccgattacaccgaaatgaagaaggcgatcctgcatgtgtactgggaagagttccagaaggaccctgtgggcctgatgagccgggtggcccagcctgccagcaagaagatcgatcagaacaagctgaaacctgagatggacgagaagggcaacctgaccaccgccggctttgcctgctctcagtgtggccagcccctgttcgtgtacaagctggagcaggtgtctgagaagggcaaggcttacaccaactacttcggacggtgcaatgtggccgagcacgaaaagctgatcctgctggcccagctgaagcccgagaaggatagcgacgaagccgtgacatatagcctgggaaagtttgggcagagggccctggatttctacagcattcatgtgaccaaggagtccacccaccccgtgaagcccctggcccagatcgccggaaacagatacgcctccggacctgtgggaaaggccctgagcgacgcatgtatgggcacaatcgcctccttcctgtctaagtaccaggacatcatcatcgaacaccagaaggtggtgaagggcaaccagaagagactggagagcctgcgggagctggccggcaaggaaaacctggaataccctagcgtgaccctgccacctcagcctcacaccaaggagggcgttgatgcctacaacgaagtgatcgcccgggtgcgaatgtgggtgaacctgaacctgtggcagaagctgaagctaagcagagatgatgccaagcctctgctgagactgaagggattcccttcctttcctctggtcgagagacaggccaacgaagtggactggtgggacatggtgtgtaacgtgaagaagctgatcaacgagaaaaaggaggatggcaaggtgttttggcagaatctggctggctacaagagacaggaagccctgagaccatacctgagcagcgaggaagatcggaagaagggaaagaaattcgctcggtaccagctgggcgacctgctgctgcacctggaaaagaagcacggcgaggactggggaaaggtgtacgacgaggcctgggagcggattgacaagaaagtggaaggcctgagcaagcacatcaagctggaagaggaacggagaagcgaggacgcccagagcaaggccgccctgaccgactggctgcgggctaaggccagcttcgtgatcgagggcctgaaggaggccgacaaggacgagttctgcagatgcgagctgaagctgcagaagtggtacggggacctgcggggaaagcccttcgccatcgaagccgagaacagcatcctggacatcagcggcttcagcaagcagtacaactgtgccttcatctggcagaaggacggcgtgaagaagctgaacctgtacctgatcatcaactacttcaagggcggcaagctgcggttcaagaagatcaaacctgaagccttcgaagccaacagattctacaccgtgatcaacaaaaagagcggcgagatcgtgcccatggaggtgaacttcaacttcgacgaccccaacctgatcatcctgcctctggcctttggcaagagacagggcagagaattcatctggaacgacctgctgtccctggaaaccggcagcctgaagctggccaacggaagagtgatcgagaagacactgtacaacagaagaacccggcaggatgagcctgccctgttcgtggccctgaccttcgagcggcgggaggtcctggactcctccaatatcaaaccaatgaacctgatcggcgtggcaagaggcgaaaacatccccgccgtgatcgccctgaccgaccccgagggctgcccactgagccggtttaaggatagcctgggaaacccaacccacatcctgagaatcggcgagagctataaggagaagcagcggaccatccaggccaagaaggaggtggagcagcggagagccggcggctacagccggaagtacgccagcaaagccaagaatctggcagacgatatggtgagaaacaccgctagagatctgctgtactacgccgtgacccaggatgccatgctgatcttcgccaacctgagccggggcttcggccggcagggcaagcggaccttcatggccgagagacagtacacacggatggaggactggctgaccgccaagctggcctacgagggcctgagcaagacctacctgtccaagacactggcccagtacacctccaagacatgcagcaactgtgggtttaccatcaccagcgccgactacgacagggtgctggagaagctgaagaagacagcaacaggctggatgaccacaattaacggcaaggagctgaaggtggagggccagattacctactacaacagatacaagagacagaacgtagtcaaggacctgtccgtcgagctggatagactgagcgaagaatctgtgaacaacgacatctcctcctggacaaagggcagaagcggagaagctctgagcctcctgaagaaaagattctcccatagacccgtgcaggagaagttcgtgtgcctgaactgcggcttcgagacacacgcagccgagcaagccgccctgaacatcgccagatcctggctgttcctgcggagccaggagtacaagaaataccagacaaacaagacaaccggcaacaccgataagagagccttcgtcgagacctggcagtccttttaccggaagaagcttaaggaggtgtggaaacctgccgtgcggtctggcggatctggcggaggctccgcccacgacctggtggtgttcagggacgtgagcgtggacttcagccaggaggagtgggagtgcctgaacagctaccagaggaacctgtacagggacgtgatcctggagaactacagcaacctggtgagcctgggctgcagcatcagcaagcccgacgtgatcaccctgctggagcagggcaaggagccctggatggtggtgaggaacgagaagaggaggtggaacctggacctggagagcaagggcggcccaagcagcggcgcccctcctcccagcggcggcagcccagccggctccccaacctctaccgaggagggcacctctgagtccgccacccccgagagcggccctggcacctccaccgagcccagcgagggcagcgcacccggcagccctgccggcagccccacctccacagaggagggaaccagcaccgagcccagcgaaggcagcgccccaggcaccagcaccgagcctagtgagcaggagattaaacggatcaacaagatcagaagaagacttgtgaaagacagcaacaccaagaaggccggcaagacaggccccatgaaaaccctgctggttagagtgatgacacccgatctgagagagcggctggaaaacctgagaaagaagcctgaaaatatcccccagcccatcagcaatacatctagagccaacctgaataagctgctgaccgattacaccgaaatgaagaaggcgatcctgcatgtgtactgggaagagttccagaaggaccctgtgggcctgatgagccgggtggcccagcctgccagcaagaagatcgatcagaacaagctgaaacctgagatggacgagaagggcaacctgaccaccgccggctttgcctgctctcagtgtggccagcccctgttcgtgtacaagctggagcaggtgtctgagaagggcaaggcttacaccaactacttcggacggtgcaatgtggccgagcacgaaaagctgatcctgctggcccagctgaagcccgagaaggatagcgacgaagccgtgacatatagcctgggaaagtttgggcagagggccctggatttctacagcattcatgtgaccaaggagtccacccaccccgtgaagcccctggcccagatcgccggaaacagatacgcctccggacctgtgggaaaggccctgagcgacgcatgtatgggcacaatcgcctccttcctgtctaagtaccaggacatcatcatcgaacaccagaaggtggtgaagggcaaccagaagagactggagagcctgcgggagctggccggcaaggaaaacctggaataccctagcgtgaccctgccacctcagcctcacaccaaggagggcgttgatgcctacaacgaagtgatcgcccgggtgcgaatgtgggtgaacctgaacctgtggcagaagctgaagctaagcagagatgatgccaagcctctgctgagactgaagggattcccttcctttcctctggtcgagagacaggccaacgaagtggactggtgggacatggtgtgtaacgtgaagaagctgatcaacgagaaaaaggaggatggcaaggtgttttggcagaatctggctggctacaagagacaggaagccctgagaccatacctgagcagcgaggaagatcggaagaagggaaagaaattcgctcggtaccagctgggcgacctgctgctgcacctggaaaagaagcacggcgaggactggggaaaggtgtacgacgaggcctgggagcggattgacaagaaagtggaaggcctgagcaagcacatcaagctggaagaggaacggagaagcgaggacgcccagagcaaggccgccctgaccgactggctgcgggctaaggccagcttcgtgatcgagggcctgaaggaggccgacaaggacgagttctgcagatgcgagctgaagctgcagaagtggtacggggacctgcggggaaagcccttcgccatcgaagccgagaacagcatcctggacatcagcggcttcagcaagcagtacaactgtgccttcatctggcagaaggacggcgtgaagaagctgaacctgtacctgatcatcaactacttcaagggcggcaagctgcggttcaagaagatcaaacctgaagccttcgaagccaacagattctacaccgtgatcaacaaaaagagcggcgagatcgtgcccatggaggtgaacttcaacttcgacgaccccaacctgatcatcctgcctctggcctttggcaagagacagggcagagaattcatctggaacgacctgctgtccctggaaaccggcagcctgaagctggccaacggaagagtgatcgagaagacactgtacaacagaagaacccggcaggatgagcctgccctgttcgtggccctgaccttcgagcggcgggaggtcctggactcctccaatatcaaaccaatgaacctgatcggcgtggcaagaggcgaaaacatccccgccgtgatcgccctgaccgaccccgagggctgcccactgagccggtttaaggatagcctgggaaacccaacccacatcctgagaatcggcgagagctataaggagaagcagcggaccatccaggccaagaaggaggtggagcagcggagagccggcggctacagccggaagtacgccagcaaagccaagaatctggcagacgatatggtgagaaacaccgctagagatctgctgtactacgccgtgacccaggatgccatgctgatcttcgccaacctgagccggggcttcggccggcagggcaagcggaccttcatggccgagagacagtacacacggatggaggactggctgaccgccaagctggcctacgagggcctgagcaagacctacctgtccaagacactggcccagtacacctccaagacatgcagcaactgtgggtttaccatcaccagcgccgactacgacagggtgctggagaagctgaagaagacagcaacaggctggatgaccacaattaacggcaaggagctgaaggtggagggccagattacctactacaacagatacaagagacagaacgtagtcaaggacctgtccgtcgagctggatagactgagcgaagaatctgtgaacaacgacatctcctcctggacaaagggcagaagcggagaagctctgagcctcctgaagaaaagattctcccatagacccgtgcaggagaagttcgtgtgcctgaactgcggcttcgagacacacgcagccgagcaagccgccctgaacatcgccagatcctggctgttcctgcggagccaggagtacaagaaataccagacaaacaagacaaccggcaacaccgataagagagccttcgtcgagacctggcagtccttttaccggaagaagcttaaggaggtgtggaaacctgccgtgcggtctggcggatctggcggaggctcctgcccacgacctggtggtgttcagggacgtgagcgtggacttcagccaggaggagtgggagtgcctgaacagctaccagaggaacctgtacagggacgtgatcctggagaactacagcaacctggtgagcctgggctgcagcatcagcaagcccgacgtgatcaccctgctggagcagggcaaggagccctggatggtggtgaggaacgagaagaggaggtggaacctggacctggagagcaagggatctggctccggcagcggccccaagaaaaagagaaaagtctaagctgccttctgcggggcttgccttctggccatgcccttcttctctcccttgcacctgtacctcttggtctttgaataaagcctgagtaggaaggctagcaaaaaaaaaaaaaaaaaaaaaaaaaaaaaaaaaaaaaaaaaaaaaaaaaaaaaaaaaaaaaaaaaaaaaaaaaaaaaaaa

SEQ ID NO: 16664 - RNA, 9485 nt, synthetic construct
  source 1..9485: mol_type = other RNA
aggaaataagagagaaaagaagagtaagaagaaatataagagccaccatggcccctaagaagaagcgtaaagtgagccggatggaacgcctcgtctacgaggtgcggcagaagtgcagaaacatcgaggacatctgcatctcctgcggatctctgaacgtgaccctggagcacccactgttcatcggcggcatgtgccagaactgtaaaaactgttttctggagtgtgcctatcaatacgacgatgacggctaccagagctactgcaccatctgttgcggcggaagagaggtgctgatgtgtggaaataacaactgctgccggtgcttctgcgtggaatgcgtggacctgctggtgggccccggcgccgcccaggccgctattaaggaagatccttggaactgctacatgtgcggccacaagggcacatacggcctgctgagacggagagaggactggcctagcagactgcagatgttcttcgccaataaccacgaccaggagttcgacccccctaaggtgtaccctcccgtccccgccgagaagagaaagcccatccgggtcctgagcctgttcgatggcatcgccaccggtctgctggtgctgaaggacctgggcatccaggtggataggtacattgcctccgaggtgtgcgaggactccatcaccgtgggaatggtgcgtcatcagggcaagatcatgtacgtgggcgacgtgcggagcgtgacacagaagcatatccaggagtggggccctttcgacctggtgatcggcggcagcccttgcaatgacctgagcatcgtgaacccagcccggaagggcctgtacgagggaaccggcagactgttcttcgagttttacagactgctgcacgacgcccggcctaaggaaggcgacgaccggcccttcttttggctgttcgagaatgtggtggccatgggagtcagcgacaagcgggatattagccggttcctggagagcaaccccgtgatgatcgatgccaaggaagtgagcgccgcccaccgggccagatacttctggggcaatctgcctggcatgaacagacccctggccagcaccgtgaacgacaagctggagctgcaggagtgcctggagcacggccggatcgccaagttcagcaaggtgagaaccatcaccacccgaagcaacagcatcaaacaaggcaaggaccagcactttcctgtgttcatgaacgagaaggaggacatcctgtggtgtaccgagatggagagagtgttcgggttcccagtccactacacagatgtcagcaacatgtctagactggccagacagagactgctgggaagaagctggtccgtccctgtgatcagacacctgttcgcccctctgaaggagtacttcgcctgcgtgagcagcggcaacagcaacgccaacagccggggccccagcttctctagcggcctggtgccactgtccctgagagggagccacatgggccccatggagatctacaaaaccgtgagcgcctggaagcggcagcctgtgcgcgtgctgagcctgtttcggaatatcgataaagtcctgaaaagcctgggattcctggagagcggctctggctccggcggtggcaccctgaagtacgtggaggatgtgacaaacgtggtcagacgggatgtggagaagtggggccccttcgatctggtgtacggcagcacccaacccctgggcagctcttgtgaccggtgccctggctggtacatgtttcagttccaccggatcctgcagtacgccctgccgagacaggagtcccagcggccattcttttggattttcatggacaacttgctgctgaccgaggatgaccaggaaactaccactcggttcctgcagaccgaagccgtgaccctgcaggacgtgagaggccgggactaccagaacgccatgcgggtgtggtccaacatccctggactgaaaagcaagcacgcacctctgacccctaaagaagaggagtacctgcaggcccaggtgcggagcagaagcaagctggacgcccctaaggtggatctgctggtgaagaattgcctcctgcccctgagagagtacttcaagtatttcagccagaatagtctgcccctgggaggcagcggcggcggcgccctggtgacatttgaggacgtcgccgtgcggttcacccaggaggaatgggctctgctggatccttctcagaaaatcctgtaccgggacgtgatgagagagacataccggaatctgacctccgtgggcatcaactgggaatgttgggaccttgaagcctgcttcagaagcctgggaagaaacctgagagtgcaggtggtgaagagaaagtgcgagctgaccaacagcggcccctgcgccgagggcggcccaagcagcggcgcccctcctcccagcggcggcagcccagccggctccccaacctctaccgaggagggcacctctgagtccgccacccccgagagcggccctggcacctccaccgagcccagcgagggcagcgcacccggcagccctgccggcagccccacctccacagaggagggaaccagcaccgagcccagcgaaggcagcgccccaggcaccagcaccgagcctagtgagcaggagattaaacggatcaacaagatcagaagaagacttgtgaaagacagcaacaccaagaaggccggcaagacaggccccatgaaaaccctgctggttagagtgatgacacccgatctgagagagcggctggaaaacctgagaaagaagcctgaaaatatcccccagcccatcagcaatacatctagagccaacctgaataagctgctgaccgattacaccgaaatgaagaaggcgatcctgcatgtgtactgggaagagttccagaaggaccctgtgggcctgatgagccgggtggcccagcctgccagcaagaagatcgatcagaacaagctgaaacctgagatggacgagaagggcaacctgaccaccgccggctttgcctgctctcagtgtggccagcccctgttcgtgtacaagctggagcaggtgtctgagaagggcaaggcttacaccaactacttcggacggtgcaatgtggccgagcacgaaaagctgatcctgctggcccagctgaagcccgagaaggatagcgacgaagccgtgacatatagcctgggaaagtttgggcagagggccctggatttctacagcattcatgtgaccaaggagtccacccaccccgtgaagcccctggcccagatcgccggaaacagatacgcctccggacctgtgggaaaggccctgagcgacgcatgtatgggcacaatcgcctccttcctgtctaagtaccaggacatcatcatcgaacaccagaaggtggtgaagggcaaccagaagagactggagagcctgcgggagctggccggcaaggaaaacctggaataccctagcgtgaccctgccacctcagcctcacaccaaggagggcgttgatgcctacaacgaagtgatcgcccgggtgcgaatgtgggtgaacctgaacctgtggcagaagctgaagctaagcagagatgatgccaagcctctgctgagactgaagggattcccttcctttcctctggtcgagagacaggccaacgaagtggactggtgggacatggtgtgtaacgtgaagaagctgatcaacgagaaaaaggaggatggcaaggtgttttggcagaatctggctggctacaagagacaggaagccctgagaccatacctgagcagcgaggaagatcggaagaagggaaagaaattcgctcggtaccagctgggcgacctgctgctgcacctggaaaagaagcacggcgaggactggggaaaggtgtacgacgaggcctgggagcggattgacaagaaagtggaaggcctgagcaagcacatcaagctggaagaggaacggagaagcgaggacgcccagagcaaggccgccctgaccgactggctgcgggctaaggccagcttcgtgatcgagggcctgaaggaggccgacaaggacgagttctgcagatgcgagctgaagctgcagaagtggtacggggacctgcggggaaagcccttcgccatcgaagccgagaacagcatcctggacatcagcggcttcagcaagcagtacaactgtgccttcatctggcagaaggacggcgtgaagaagctgaacctgtacctgatcatcaactacttcaagggcggcaagctgcggttcaagaagatcaaacctgaagccttcgaagccaacagattctacaccgtgatcaacaaaaagagcggcgagatcgtgcccatggaggtgaacttcaacttcgacgaccccaacctgatcatcctgcctctggcctttggcaagagacagggcagagaattcatctggaacgacctgctgtccctggaaaccggcagcctgaagctggccaacggaagagtgatcgagaagacactgtacaacagaagaacccggcaggatgagcctgccctgttcgtggccctgaccttcgagcggcgggaggtcctggactcctccaatatcaaaccaatgaacctgatcggcgtggcaagaggcgaaaacatccccgccgtgatcgccctgaccgaccccgagggctgcccactgagccggtttaaggatagcctgggaaacccaacccacatcctgagaatcggcgagagctataaggagaagcagcggaccatccaggccaagaaggaggtggagcagcggagagccggcggctacagccggaagtacgccagcaaagccaagaatctggcagacgatatggtgagaaacaccgctagagatctgctgtactacgccgtgacccaggatgccatgctgatcttcgccaacctgagccggggcttcggccggcagggcaagcggaccttcatggccgagagacagtacacacggatggaggactggctgaccgccaagctggcctacgagggcctgagcaagacctacctgtccaagacactggcccagtacacctccaagacatgcagcaactgtgggtttaccatcaccagcgccgactacgacagggtgctggagaagctgaagaagacagcaacaggctggatgaccacaattaacggcaaggagctgaaggtggagggccagattacctactacaacagatacaagagacagaacgtagtcaaggacctgtccgtcgagctggatagactgagcgaagaatctgtgaacaacgacatctcctcctggacaaagggcagaagcggagaagctctgagcctcctgaagaaaagattctcccatagacccgtgcaggagaagttcgtgtgcctgaactgcggcttcgagacacacgcagccgagcaagccgccctgaacatcgccagatcctggctgttcctgcggagccaggagtacaagaaataccagacaaacaagacaaccggcaacaccgataagagagccttcgtcgagacctggcagtccttttaccggaagaagcttaaggaggtgtggaaacctgccgtgcggtctggcggatctggcggaggctccatgctgcccatcgtgcagctgtacccccagggcctggtgagcttcaaggacgtggccgtggacttcacccaggaggagtggcagcagctggaccccagccagaggaccctgtacagggacgtgatgctggagaactacagccacctggtgagcatgggctaccccgtgagcaagcccgacgtgatcagcaagctggagcagggcgaggagccctggatcatcaagggcgacatcagcaactggggcggcccaagcagcggcgcccctcctcccagcggcggcagcccagccggctccccaacctctaccgaggagggcacctctgagtccgccacccccgagagcggccctggcacctccaccgagcccagcgagggcagcgcacccggcagccctgccggcagccccacctccacagaggagggaaccagcaccgagcccagcgaaggcagcgccccaggcaccagcaccgagcctagtgagcaggagattaaacggatcaacaagatcagaagaagacttgtgaaagacagcaacaccaagaaggccggcaagacaggccccatgaaaaccctgctggttagagtgatgacacccgatctgagagagcggctggaaaacctgagaaagaagcctgaaaatatcccccagcccatcagcaatacatctagagccaacctgaataagctgctgaccgattacaccgaaatgaagaaggcgatcctgcatgtgtactgggaagagttccagaaggaccctgtgggcctgatgagccgggtggcccagcctgccagcaagaagatcgatcagaacaagctgaaacctgagatggacgagaagggcaacctgaccaccgccggctttgcctgctctcagtgtggccagcccctgttcgtgtacaagctggagcaggtgtctgagaagggcaaggcttacaccaactacttcggacggtgcaatgtggccgagcacgaaaagctgatcctgctggcccagctgaagcccgagaaggatagcgacgaagccgtgacatatagcctgggaaagtttgggcagagggccctggatttctacagcattcatgtgaccaaggagtccacccaccccgtgaagcccctggcccagatcgccggaaacagatacgcctccggacctgtgggaaaggccctgagcgacgcatgtatgggcacaatcgcctccttcctgtctaagtaccaggacatcatcatcgaacaccagaaggtggtgaagggcaaccagaagagactggagagcctgcgggagctggccggcaaggaaaacctggaataccctagcgtgaccctgccacctcagcctcacaccaaggagggcgttgatgcctacaacgaagtgatcgcccgggtgcgaatgtgggtgaacctgaacctgtggcagaagctgaagctaagcagagatgatgccaagcctctgctgagactgaagggattcccttcctttcctctggtcgagagacaggccaacgaagtggactggtgggacatggtgtgtaacgtgaagaagctgatcaacgagaaaaaggaggatggcaaggtgttttggcagaatctggctggctacaagagacaggaagccctgagaccatacctgagcagcgaggaagatcggaagaagggaaagaaattcgctcggtaccagctgggcgacctgctgctgcacctggaaaagaagcacggcgaggactggggaaaggtgtacgacgaggcctgggagcggattgacaagaaagtggaaggcctgagcaagcacatcaagctggaagaggaacggagaagcgaggacgcccagagcaaggccgccctgaccgactggctgcgggctaaggccagcttcgtgatcgagggcctgaaggaggccgacaaggacgagttctgcagatgcgagctgaagctgcagaagtggtacggggacctgcggggaaagcccttcgccatcgaagccgagaacagcatcctggacatcagcggcttcagcaagcagtacaactgtgccttcatctggcagaaggacggcgtgaagaagctgaacctgtacctgatcatcaactacttcaagggcggcaagctgcggttcaagaagatcaaacctgaagccttcgaagccaacagattctacaccgtgatcaacaaaaagagcggcgagatcgtgcccatggaggtgaacttcaacttcgacgaccccaacctgatcatcctgcctctggcctttggcaagagacagggcagagaattcatctggaacgacctgctgtccctggaaaccggcagcctgaagctggccaacggaagagtgatcgagaagacactgtacaacagaagaacccggcaggatgagcctgccctgttcgtggccctgaccttcgagcggcgggaggtcctggactcctccaatatcaaaccaatgaacctgatcggcgtggcaagaggcgaaaacatccccgccgtgatcgccctgaccgaccccgagggctgcccactgagccggtttaaggatagcctgggaaacccaacccacatcctgagaatcggcgagagctataaggagaagcagcggaccatccaggccaagaaggaggtggagcagcggagagccggcggctacagccggaagtacgccagcaaagccaagaatctggcagacgatatggtgagaaacaccgctagagatctgctgtactacgccgtgacccaggatgccatgctgatcttcgccaacctgagccggggcttcggccggcagggcaagcggaccttcatggccgagagacagtacacacggatggaggactggctgaccgccaagctggcctacgagggcctgagcaagacctacctgtccaagacactggcccagtacacctccaagacatgcagcaactgtgggtttaccatcaccagcgccgactacgacagggtgctggagaagctgaagaagacagcaacaggctggatgaccacaattaacggcaaggagctgaaggtggagggccagattacctactacaacagatacaagagacagaacgtagtcaaggacctgtccgtcgagctggatagactgagcgaagaatctgtgaacaacgacatctcctcctggacaaagggcagaagcggagaagctctgagcctcctgaagaaaagattctcccatagacccgtgcaggagaagttcgtgtgcctgaactgcggcttcgagacacacgcagccgagcaagccgccctgaacatcgccagatcctggctgttcctgcggagccaggagtacaagaaataccagacaaacaagacaaccggcaacaccgataagagagccttcgtcgagacctggcagtccttttaccggaagaagcttaaggaggtgtggaaacctgccgtgcggtctggcggatctggcggaggctcctatgctgcccatcgtgcagctgtacccccagggcctggtgagcttcaaggacgtggccgtggacttcacccaggaggagtggcagcagctggaccccagccagaggaccctgtacagggacgtgatgctggagaactacagccacctggtgagcatgggctaccccgtgagcaagcccgacgtgatcagcaagctggagcagggcgaggagccctggatcatcaagggcgacatcagcaactggggatctggctccggcagcggccccaagaaaaagagaaaagtctaagctgccttctgcggggcttgccttctggccatgcccttcttctctcccttgcacctgtacctcttggtctttgaataaagcctgagtaggaaggctagcaaaaaaaaaaaaaaaaaaaaaaaaaaaaaaaaaaaaaaaaaaaaaaaaaaaaaaaaaaaaaaaaaaaaaaaaaaaaaaaa

SEQ ID NO: 16665 - RNA, 9485 nt, synthetic construct
  source 1..9485: mol_type = other RNA
aggaaataagagagaaaagaagagtaagaagaaatataagagccaccatggcccctaagaagaagcgtaaagtgagccggatggaacgcctcgtctacgaggtgcggcagaagtgcagaaacatcgaggacatctgcatctcctgcggatctctgaacgtgaccctggagcacccactgttcatcggcggcatgtgccagaactgtaaaaactgttttctggagtgtgcctatcaatacgacgatgacggctaccagagctactgcaccatctgttgcggcggaagagaggtgctgatgtgtggaaataacaactgctgccggtgcttctgcgtggaatgcgtggacctgctggtgggccccggcgccgcccaggccgctattaaggaagatccttggaactgctacatgtgcggccacaagggcacatacggcctgctgagacggagagaggactggcctagcagactgcagatgttcttcgccaataaccacgaccaggagttcgacccccctaaggtgtaccctcccgtccccgccgagaagagaaagcccatccgggtcctgagcctgttcgatggcatcgccaccggtctgctggtgctgaaggacctgggcatccaggtggataggtacattgcctccgaggtgtgcgaggactccatcaccgtgggaatggtgcgtcatcagggcaagatcatgtacgtgggcgacgtgcggagcgtgacacagaagcatatccaggagtggggccctttcgacctggtgatcggcggcagcccttgcaatgacctgagcatcgtgaacccagcccggaagggcctgtacgagggaaccggcagactgttcttcgagttttacagactgctgcacgacgcccggcctaaggaaggcgacgaccggcccttcttttggctgttcgagaatgtggtggccatgggagtcagcgacaagcgggatattagccggttcctggagagcaaccccgtgatgatcgatgccaaggaagtgagcgccgcccaccgggccagatacttctggggcaatctgcctggcatgaacagacccctggccagcaccgtgaacgacaagctggagctgcaggagtgcctggagcacggccggatcgccaagttcagcaaggtgagaaccatcaccacccgaagcaacagcatcaaacaaggcaaggaccagcactttcctgtgttcatgaacgagaaggaggacatcctgtggtgtaccgagatggagagagtgttcgggttcccagtccactacacagatgtcagcaacatgtctagactggccagacagagactgctgggaagaagctggtccgtccctgtgatcagacacctgttcgcccctctgaaggagtacttcgcctgcgtgagcagcggcaacagcaacgccaacagccggggccccagcttctctagcggcctggtgccactgtccctgagagggagccacatgggccccatggagatctacaaaaccgtgagcgcctggaagcggcagcctgtgcgcgtgctgagcctgtttcggaatatcgataaagtcctgaaaagcctgggattcctggagagcggctctggctccggcggtggcaccctgaagtacgtggaggatgtgacaaacgtggtcagacgggatgtggagaagtggggccccttcgatctggtgtacggcagcacccaacccctgggcagctcttgtgaccggtgccctggctggtacatgtttcagttccaccggatcctgcagtacgccctgccgagacaggagtcccagcggccattcttttggattttcatggacaacttgctgctgaccgaggatgaccaggaaactaccactcggttcctgcagaccgaagccgtgaccctgcaggacgtgagaggccgggactaccagaacgccatgcgggtgtggtccaacatccctggactgaaaagcaagcacgcacctctgacccctaaagaagaggagtacctgcaggcccaggtgcggagcagaagcaagctggacgcccctaaggtggatctgctggtgaagaattgcctcctgcccctgagagagtacttcaagtatttcagccagaatagtctgcccctgggaggcagcggcggcggcgccctggtgacatttgaggacgtcgccgtgcggttcacccaggaggaatgggctctgctggatccttctcagaaaatcctgtaccgggacgtgatgagagagacataccggaatctgacctccgtgggcatcaactgggaatgttgggaccttgaagcctgcttcagaagcctgggaagaaacctgagagtgcaggtggtgaagagaaagtgcgagctgaccaacagcggcccctgcgccgagggcggcccaagcagcggcgcccctcctcccagcggcggcagcccagccggctccccaacctctaccgaggagggcacctctgagtccgccacccccgagagcggccctggcacctccaccgagcccagcgagggcagcgcacccggcagccctgccggcagccccacctccacagaggagggaaccagcaccgagcccagcgaaggcagcgccccaggcaccagcaccgagcctagtgagcaggagattaaacggatcaacaagatcagaagaagacttgtgaaagacagcaacaccaagaaggccggcaagacaggccccatgaaaaccctgctggttagagtgatgacacccgatctgagagagcggctggaaaacctgagaaagaagcctgaaaatatcccccagcccatcagcaatacatctagagccaacctgaataagctgctgaccgattacaccgaaatgaagaaggcgatcctgcatgtgtactgggaagagttccagaaggaccctgtgggcctgatgagccgggtggcccagcctgccagcaagaagatcgatcagaacaagctgaaacctgagatggacgagaagggcaacctgaccaccgccggctttgcctgctctcagtgtggccagcccctgttcgtgtacaagctggagcaggtgtctgagaagggcaaggcttacaccaactacttcggacggtgcaatgtggccgagcacgaaaagctgatcctgctggcccagctgaagcccgagaaggatagcgacgaagccgtgacatatagcctgggaaagtttgggcagagggccctggatttctacagcattcatgtgaccaaggagtccacccaccccgtgaagcccctggcccagatcgccggaaacagatacgcctccggacctgtgggaaaggccctgagcgacgcatgtatgggcacaatcgcctccttcctgtctaagtaccaggacatcatcatcgaacaccagaaggtggtgaagggcaaccagaagagactggagagcctgcgggagctggccggcaaggaaaacctggaataccctagcgtgaccctgccacctcagcctcacaccaaggagggcgttgatgcctacaacgaagtgatcgcccgggtgcgaatgtgggtgaacctgaacctgtggcagaagctgaagctaagcagagatgatgccaagcctctgctgagactgaagggattcccttcctttcctctggtcgagagacaggccaacgaagtggactggtgggacatggtgtgtaacgtgaagaagctgatcaacgagaaaaaggaggatggcaaggtgttttggcagaatctggctggctacaagagacaggaagccctgagaccatacctgagcagcgaggaagatcggaagaagggaaagaaattcgctcggtaccagctgggcgacctgctgctgcacctggaaaagaagcacggcgaggactggggaaaggtgtacgacgaggcctgggagcggattgacaagaaagtggaaggcctgagcaagcacatcaagctggaagaggaacggagaagcgaggacgcccagagcaaggccgccctgaccgactggctgcgggctaaggccagcttcgtgatcgagggcctgaaggaggccgacaaggacgagttctgcagatgcgagctgaagctgcagaagtggtacggggacctgcggggaaagcccttcgccatcgaagccgagaacagcatcctggacatcagcggcttcagcaagcagtacaactgtgccttcatctggcagaaggacggcgtgaagaagctgaacctgtacctgatcatcaactacttcaagggcggcaagctgcggttcaagaagatcaaacctgaagccttcgaagccaacagattctacaccgtgatcaacaaaaagagcggcgagatcgtgcccatggaggtgaacttcaacttcgacgaccccaacctgatcatcctgcctctggcctttggcaagagacagggcagagaattcatctggaacgacctgctgtccctggaaaccggcagcctgaagctggccaacggaagagtgatcgagaagacactgtacaacagaagaacccggcaggatgagcctgccctgttcgtggccctgaccttcgagcggcgggaggtcctggactcctccaatatcaaaccaatgaacctgatcggcgtggcaagaggcgaaaacatccccgccgtgatcgccctgaccgaccccgagggctgcccactgagccggtttaaggatagcctgggaaacccaacccacatcctgagaatcggcgagagctataaggagaagcagcggaccatccaggccaagaaggaggtggagcagcggagagccggcggctacagccggaagtacgccagcaaagccaagaatctggcagacgatatggtgagaaacaccgctagagatctgctgtactacgccgtgacccaggatgccatgctgatcttcgccaacctgagccggggcttcggccggcagggcaagcggaccttcatggccgagagacagtacacacggatggaggactggctgaccgccaagctggcctacgagggcctgagcaagacctacctgtccaagacactggcccagtacacctccaagacatgcagcaactgtgggtttaccatcaccagcgccgactacgacagggtgctggagaagctgaagaagacagcaacaggctggatgaccacaattaacggcaaggagctgaaggtggagggccagattacctactacaacagatacaagagacagaacgtagtcaaggacctgtccgtcgagctggatagactgagcgaagaatctgtgaacaacgacatctcctcctggacaaagggcagaagcggagaagctctgagcctcctgaagaaaagattctcccatagacccgtgcaggagaagttcgtgtgcctgaactgcggcttcgagacacacgcagccgagcaagccgccctgaacatcgccagatcctggctgttcctgcggagccaggagtacaagaaataccagacaaacaagacaaccggcaacaccgataagagagccttcgtcgagacctggcagtccttttaccggaagaagcttaaggaggtgtggaaacctgccgtgcggtctggcggatctggcggaggctcccccgagaacggcgtgaccttcgaggacatcgccctgtacttcagctgggaggagtggaagctgctggacgaggcccagaggaggctgtaccacgacgtgatgctggagaacttcgccctgatcagcagcctgggcgtgtggagcggcgaggagaacgtggaggccagcttcgagcagagcgtgagcgtggtgatgagccaggtgaggaccagcaaggagcccagcagcagccagaagacccacggcggcccaagcagcggcgcccctcctcccagcggcggcagcccagccggctccccaacctctaccgaggagggcacctctgagtccgccacccccgagagcggccctggcacctccaccgagcccagcgagggcagcgcacccggcagccctgccggcagccccacctccacagaggagggaaccagcaccgagcccagcgaaggcagcgccccaggcaccagcaccgagcctagtgagcaggagattaaacggatcaacaagatcagaagaagacttgtgaaagacagcaacaccaagaaggccggcaagacaggccccatgaaaaccctgctggttagagtgatgacacccgatctgagagagcggctggaaaacctgagaaagaagcctgaaaatatcccccagcccatcagcaatacatctagagccaacctgaataagctgctgaccgattacaccgaaatgaagaaggcgatcctgcatgtgtactgggaagagttccagaaggaccctgtgggcctgatgagccgggtggcccagcctgccagcaagaagatcgatcagaacaagctgaaacctgagatggacgagaagggcaacctgaccaccgccggctttgcctgctctcagtgtggccagcccctgttcgtgtacaagctggagcaggtgtctgagaagggcaaggcttacaccaactacttcggacggtgcaatgtggccgagcacgaaaagctgatcctgctggcccagctgaagcccgagaaggatagcgacgaagccgtgacatatagcctgggaaagtttgggcagagggccctggatttctacagcattcatgtgaccaaggagtccacccaccccgtgaagcccctggcccagatcgccggaaacagatacgcctccggacctgtgggaaaggccctgagcgacgcatgtatgggcacaatcgcctccttcctgtctaagtaccaggacatcatcatcgaacaccagaaggtggtgaagggcaaccagaagagactggagagcctgcgggagctggccggcaaggaaaacctggaataccctagcgtgaccctgccacctcagcctcacaccaaggagggcgttgatgcctacaacgaagtgatcgcccgggtgcgaatgtgggtgaacctgaacctgtggcagaagctgaagctaagcagagatgatgccaagcctctgctgagactgaagggattcccttcctttcctctggtcgagagacaggccaacgaagtggactggtgggacatggtgtgtaacgtgaagaagctgatcaacgagaaaaaggaggatggcaaggtgttttggcagaatctggctggctacaagagacaggaagccctgagaccatacctgagcagcgaggaagatcggaagaagggaaagaaattcgctcggtaccagctgggcgacctgctgctgcacctggaaaagaagcacggcgaggactggggaaaggtgtacgacgaggcctgggagcggattgacaagaaagtggaaggcctgagcaagcacatcaagctggaagaggaacggagaagcgaggacgcccagagcaaggccgccctgaccgactggctgcgggctaaggccagcttcgtgatcgagggcctgaaggaggccgacaaggacgagttctgcagatgcgagctgaagctgcagaagtggtacggggacctgcggggaaagcccttcgccatcgaagccgagaacagcatcctggacatcagcggcttcagcaagcagtacaactgtgccttcatctggcagaaggacggcgtgaagaagctgaacctgtacctgatcatcaactacttcaagggcggcaagctgcggttcaagaagatcaaacctgaagccttcgaagccaacagattctacaccgtgatcaacaaaaagagcggcgagatcgtgcccatggaggtgaacttcaacttcgacgaccccaacctgatcatcctgcctctggcctttggcaagagacagggcagagaattcatctggaacgacctgctgtccctggaaaccggcagcctgaagctggccaacggaagagtgatcgagaagacactgtacaacagaagaacccggcaggatgagcctgccctgttcgtggccctgaccttcgagcggcgggaggtcctggactcctccaatatcaaaccaatgaacctgatcggcgtggcaagaggcgaaaacatccccgccgtgatcgccctgaccgaccccgagggctgcccactgagccggtttaaggatagcctgggaaacccaacccacatcctgagaatcggcgagagctataaggagaagcagcggaccatccaggccaagaaggaggtggagcagcggagagccggcggctacagccggaagtacgccagcaaagccaagaatctggcagacgatatggtgagaaacaccgctagagatctgctgtactacgccgtgacccaggatgccatgctgatcttcgccaacctgagccggggcttcggccggcagggcaagcggaccttcatggccgagagacagtacacacggatggaggactggctgaccgccaagctggcctacgagggcctgagcaagacctacctgtccaagacactggcccagtacacctccaagacatgcagcaactgtgggtttaccatcaccagcgccgactacgacagggtgctggagaagctgaagaagacagcaacaggctggatgaccacaattaacggcaaggagctgaaggtggagggccagattacctactacaacagatacaagagacagaacgtagtcaaggacctgtccgtcgagctggatagactgagcgaagaatctgtgaacaacgacatctcctcctggacaaagggcagaagcggagaagctctgagcctcctgaagaaaagattctcccatagacccgtgcaggagaagttcgtgtgcctgaactgcggcttcgagacacacgcagccgagcaagccgccctgaacatcgccagatcctggctgttcctgcggagccaggagtacaagaaataccagacaaacaagacaaccggcaacaccgataagagagccttcgtcgagacctggcagtccttttaccggaagaagcttaaggaggtgtggaaacctgccgtgcggtctggcggatctggcggaggctcctcccgagaacggcgtgaccttcgaggacatcgccctgtacttcagctgggaggagtggaagctgctggacgaggcccagaggaggctgtaccacgacgtgatgctggagaacttcgccctgatcagcagcctgggcgtgtggagcggcgaggagaacgtggaggccagcttcgagcagagcgtgagcgtggtgatgagccaggtgaggaccagcaaggagcccagcagcagccagaagacccacggatctggctccggcagcggccccaagaaaaagagaaaagtctaagctgccttctgcggggcttgccttctggccatgcccttcttctctcccttgcacctgtacctcttggtctttgaataaagcctgagtaggaaggctagcaaaaaaaaaaaaaaaaaaaaaaaaaaaaaaaaaaaaaaaaaaaaaaaaaaaaaaaaaaaaaaaaaaaaaaaaaaaaaaaa

SEQ ID NO: 16666 - RNA, 9485 nt, synthetic construct
  source 1..9485: mol_type = other RNA
aggaaataagagagaaaagaagagtaagaagaaatataagagccaccatggcccctaagaagaagcgtaaagtgagccggatggaacgcctcgtctacgaggtgcggcagaagtgcagaaacatcgaggacatctgcatctcctgcggatctctgaacgtgaccctggagcacccactgttcatcggcggcatgtgccagaactgtaaaaactgttttctggagtgtgcctatcaatacgacgatgacggctaccagagctactgcaccatctgttgcggcggaagagaggtgctgatgtgtggaaataacaactgctgccggtgcttctgcgtggaatgcgtggacctgctggtgggccccggcgccgcccaggccgctattaaggaagatccttggaactgctacatgtgcggccacaagggcacatacggcctgctgagacggagagaggactggcctagcagactgcagatgttcttcgccaataaccacgaccaggagttcgacccccctaaggtgtaccctcccgtccccgccgagaagagaaagcccatccgggtcctgagcctgttcgatggcatcgccaccggtctgctggtgctgaaggacctgggcatccaggtggataggtacattgcctccgaggtgtgcgaggactccatcaccgtgggaatggtgcgtcatcagggcaagatcatgtacgtgggcgacgtgcggagcgtgacacagaagcatatccaggagtggggccctttcgacctggtgatcggcggcagcccttgcaatgacctgagcatcgtgaacccagcccggaagggcctgtacgagggaaccggcagactgttcttcgagttttacagactgctgcacgacgcccggcctaaggaaggcgacgaccggcccttcttttggctgttcgagaatgtggtggccatgggagtcagcgacaagcgggatattagccggttcctggagagcaaccccgtgatgatcgatgccaaggaagtgagcgccgcccaccgggccagatacttctggggcaatctgcctggcatgaacagacccctggccagcaccgtgaacgacaagctggagctgcaggagtgcctggagcacggccggatcgccaagttcagcaaggtgagaaccatcaccacccgaagcaacagcatcaaacaaggcaaggaccagcactttcctgtgttcatgaacgagaaggaggacatcctgtggtgtaccgagatggagagagtgttcgggttcccagtccactacacagatgtcagcaacatgtctagactggccagacagagactgctgggaagaagctggtccgtccctgtgatcagacacctgttcgcccctctgaaggagtacttcgcctgcgtgagcagcggcaacagcaacgccaacagccggggccccagcttctctagcggcctggtgccactgtccctgagagggagccacatgggccccatggagatctacaaaaccgtgagcgcctggaagcggcagcctgtgcgcgtgctgagcctgtttcggaatatcgataaagtcctgaaaagcctgggattcctggagagcggctctggctccggcggtggcaccctgaagtacgtggaggatgtgacaaacgtggtcagacgggatgtggagaagtggggccccttcgatctggtgtacggcagcacccaacccctgggcagctcttgtgaccggtgccctggctggtacatgtttcagttccaccggatcctgcagtacgccctgccgagacaggagtcccagcggccattcttttggattttcatggacaacttgctgctgaccgaggatgaccaggaaactaccactcggttcctgcagaccgaagccgtgaccctgcaggacgtgagaggccgggactaccagaacgccatgcgggtgtggtccaacatccctggactgaaaagcaagcacgcacctctgacccctaaagaagaggagtacctgcaggcccaggtgcggagcagaagcaagctggacgcccctaaggtggatctgctggtgaagaattgcctcctgcccctgagagagtacttcaagtatttcagccagaatagtctgcccctgggaggcagcggcggcggcgccctggtgacatttgaggacgtcgccgtgcggttcacccaggaggaatgggctctgctggatccttctcagaaaatcctgtaccgggacgtgatgagagagacataccggaatctgacctccgtgggcatcaactgggaatgttgggaccttgaagcctgcttcagaagcctgggaagaaacctgagagtgcaggtggtgaagagaaagtgcgagctgaccaacagcggcccctgcgccgagggcggcccaagcagcggcgcccctcctcccagcggcggcagcccagccggctccccaacctctaccgaggagggcacctctgagtccgccacccccgagagcggccctggcacctccaccgagcccagcgagggcagcgcacccggcagccctgccggcagccccacctccacagaggagggaaccagcaccgagcccagcgaaggcagcgccccaggcaccagcaccgagcctagtgagcaggagattaaacggatcaacaagatcagaagaagacttgtgaaagacagcaacaccaagaaggccggcaagacaggccccatgaaaaccctgctggttagagtgatgacacccgatctgagagagcggctggaaaacctgagaaagaagcctgaaaatatcccccagcccatcagcaatacatctagagccaacctgaataagctgctgaccgattacaccgaaatgaagaaggcgatcctgcatgtgtactgggaagagttccagaaggaccctgtgggcctgatgagccgggtggcccagcctgccagcaagaagatcgatcagaacaagctgaaacctgagatggacgagaagggcaacctgaccaccgccggctttgcctgctctcagtgtggccagcccctgttcgtgtacaagctggagcaggtgtctgagaagggcaaggcttacaccaactacttcggacggtgcaatgtggccgagcacgaaaagctgatcctgctggcccagctgaagcccgagaaggatagcgacgaagccgtgacatatagcctgggaaagtttgggcagagggccctggatttctacagcattcatgtgaccaaggagtccacccaccccgtgaagcccctggcccagatcgccggaaacagatacgcctccggacctgtgggaaaggccctgagcgacgcatgtatgggcacaatcgcctccttcctgtctaagtaccaggacatcatcatcgaacaccagaaggtggtgaagggcaaccagaagagactggagagcctgcgggagctggccggcaaggaaaacctggaataccctagcgtgaccctgccacctcagcctcacaccaaggagggcgttgatgcctacaacgaagtgatcgcccgggtgcgaatgtgggtgaacctgaacctgtggcagaagctgaagctaagcagagatgatgccaagcctctgctgagactgaagggattcccttcctttcctctggtcgagagacaggccaacgaagtggactggtgggacatggtgtgtaacgtgaagaagctgatcaacgagaaaaaggaggatggcaaggtgttttggcagaatctggctggctacaagagacaggaagccctgagaccatacctgagcagcgaggaagatcggaagaagggaaagaaattcgctcggtaccagctgggcgacctgctgctgcacctggaaaagaagcacggcgaggactggggaaaggtgtacgacgaggcctgggagcggattgacaagaaagtggaaggcctgagcaagcacatcaagctggaagaggaacggagaagcgaggacgcccagagcaaggccgccctgaccgactggctgcgggctaaggccagcttcgtgatcgagggcctgaaggaggccgacaaggacgagttctgcagatgcgagctgaagctgcagaagtggtacggggacctgcggggaaagcccttcgccatcgaagccgagaacagcatcctggacatcagcggcttcagcaagcagtacaactgtgccttcatctggcagaaggacggcgtgaagaagctgaacctgtacctgatcatcaactacttcaagggcggcaagctgcggttcaagaagatcaaacctgaagccttcgaagccaacagattctacaccgtgatcaacaaaaagagcggcgagatcgtgcccatggaggtgaacttcaacttcgacgaccccaacctgatcatcctgcctctggcctttggcaagagacagggcagagaattcatctggaacgacctgctgtccctggaaaccggcagcctgaagctggccaacggaagagtgatcgagaagacactgtacaacagaagaacccggcaggatgagcctgccctgttcgtggccctgaccttcgagcggcgggaggtcctggactcctccaatatcaaaccaatgaacctgatcggcgtggcaagaggcgaaaacatccccgccgtgatcgccctgaccgaccccgagggctgcccactgagccggtttaaggatagcctgggaaacccaacccacatcctgagaatcggcgagagctataaggagaagcagcggaccatccaggccaagaaggaggtggagcagcggagagccggcggctacagccggaagtacgccagcaaagccaagaatctggcagacgatatggtgagaaacaccgctagagatctgctgtactacgccgtgacccaggatgccatgctgatcttcgccaacctgagccggggcttcggccggcagggcaagcggaccttcatggccgagagacagtacacacggatggaggactggctgaccgccaagctggcctacgagggcctgagcaagacctacctgtccaagacactggcccagtacacctccaagacatgcagcaactgtgggtttaccatcaccagcgccgactacgacagggtgctggagaagctgaagaagacagcaacaggctggatgaccacaattaacggcaaggagctgaaggtggagggccagattacctactacaacagatacaagagacagaacgtagtcaaggacctgtccgtcgagctggatagactgagcgaagaatctgtgaacaacgacatctcctcctggacaaagggcagaagcggagaagctctgagcctcctgaagaaaagattctcccatagacccgtgcaggagaagttcgtgtgcctgaactgcggcttcgagacacacgcagccgagcaagccgccctgaacatcgccagatcctggctgttcctgcggagccaggagtacaagaaataccagacaaacaagacaaccggcaacaccgataagagagccttcgtcgagacctggcagtccttttaccggaagaagcttaaggaggtgtggaaacctgccgtgcggtctggcggatctggcggaggctccatgcccgtgaccttcgaggaggtggccgtgtacttcaccgagggccagggcgccctgctggaccccgcccagagggccctgtacagggacgtgatgcaggagatctacgagatggtgatcagcctgggcttcctgctgcccaagcccgacgtgatcatccagctggagaggggcgaggagccctgggtgcccgacctgcagggcagcgccgagagggagatgagcaggggcacctgcgccggcggcggcccaagcagcggcgcccctcctcccagcggcggcagcccagccggctccccaacctctaccgaggagggcacctctgagtccgccacccccgagagcggccctggcacctccaccgagcccagcgagggcagcgcacccggcagccctgccggcagccccacctccacagaggagggaaccagcaccgagcccagcgaaggcagcgccccaggcaccagcaccgagcctagtgagcaggagattaaacggatcaacaagatcagaagaagacttgtgaaagacagcaacaccaagaaggccggcaagacaggccccatgaaaaccctgctggttagagtgatgacacccgatctgagagagcggctggaaaacctgagaaagaagcctgaaaatatcccccagcccatcagcaatacatctagagccaacctgaataagctgctgaccgattacaccgaaatgaagaaggcgatcctgcatgtgtactgggaagagttccagaaggaccctgtgggcctgatgagccgggtggcccagcctgccagcaagaagatcgatcagaacaagctgaaacctgagatggacgagaagggcaacctgaccaccgccggctttgcctgctctcagtgtggccagcccctgttcgtgtacaagctggagcaggtgtctgagaagggcaaggcttacaccaactacttcggacggtgcaatgtggccgagcacgaaaagctgatcctgctggcccagctgaagcccgagaaggatagcgacgaagccgtgacatatagcctgggaaagtttgggcagagggccctggatttctacagcattcatgtgaccaaggagtccacccaccccgtgaagcccctggcccagatcgccggaaacagatacgcctccggacctgtgggaaaggccctgagcgacgcatgtatgggcacaatcgcctccttcctgtctaagtaccaggacatcatcatcgaacaccagaaggtggtgaagggcaaccagaagagactggagagcctgcgggagctggccggcaaggaaaacctggaataccctagcgtgaccctgccacctcagcctcacaccaaggagggcgttgatgcctacaacgaagtgatcgcccgggtgcgaatgtgggtgaacctgaacctgtggcagaagctgaagctaagcagagatgatgccaagcctctgctgagactgaagggattcccttcctttcctctggtcgagagacaggccaacgaagtggactggtgggacatggtgtgtaacgtgaagaagctgatcaacgagaaaaaggaggatggcaaggtgttttggcagaatctggctggctacaagagacaggaagccctgagaccatacctgagcagcgaggaagatcggaagaagggaaagaaattcgctcggtaccagctgggcgacctgctgctgcacctggaaaagaagcacggcgaggactggggaaaggtgtacgacgaggcctgggagcggattgacaagaaagtggaaggcctgagcaagcacatcaagctggaagaggaacggagaagcgaggacgcccagagcaaggccgccctgaccgactggctgcgggctaaggccagcttcgtgatcgagggcctgaaggaggccgacaaggacgagttctgcagatgcgagctgaagctgcagaagtggtacggggacctgcggggaaagcccttcgccatcgaagccgagaacagcatcctggacatcagcggcttcagcaagcagtacaactgtgccttcatctggcagaaggacggcgtgaagaagctgaacctgtacctgatcatcaactacttcaagggcggcaagctgcggttcaagaagatcaaacctgaagccttcgaagccaacagattctacaccgtgatcaacaaaaagagcggcgagatcgtgcccatggaggtgaacttcaacttcgacgaccccaacctgatcatcctgcctctggcctttggcaagagacagggcagagaattcatctggaacgacctgctgtccctggaaaccggcagcctgaagctggccaacggaagagtgatcgagaagacactgtacaacagaagaacccggcaggatgagcctgccctgttcgtggccctgaccttcgagcggcgggaggtcctggactcctccaatatcaaaccaatgaacctgatcggcgtggcaagaggcgaaaacatccccgccgtgatcgccctgaccgaccccgagggctgcccactgagccggtttaaggatagcctgggaaacccaacccacatcctgagaatcggcgagagctataaggagaagcagcggaccatccaggccaagaaggaggtggagcagcggagagccggcggctacagccggaagtacgccagcaaagccaagaatctggcagacgatatggtgagaaacaccgctagagatctgctgtactacgccgtgacccaggatgccatgctgatcttcgccaacctgagccggggcttcggccggcagggcaagcggaccttcatggccgagagacagtacacacggatggaggactggctgaccgccaagctggcctacgagggcctgagcaagacctacctgtccaagacactggcccagtacacctccaagacatgcagcaactgtgggtttaccatcaccagcgccgactacgacagggtgctggagaagctgaagaagacagcaacaggctggatgaccacaattaacggcaaggagctgaaggtggagggccagattacctactacaacagatacaagagacagaacgtagtcaaggacctgtccgtcgagctggatagactgagcgaagaatctgtgaacaacgacatctcctcctggacaaagggcagaagcggagaagctctgagcctcctgaagaaaagattctcccatagacccgtgcaggagaagttcgtgtgcctgaactgcggcttcgagacacacgcagccgagcaagccgccctgaacatcgccagatcctggctgttcctgcggagccaggagtacaagaaataccagacaaacaagacaaccggcaacaccgataagagagccttcgtcgagacctggcagtccttttaccggaagaagcttaaggaggtgtggaaacctgccgtgcggtctggcggatctggcggaggctcctatgcccgtgaccttcgaggaggtggccgtgtacttcaccgagggccagggcgccctgctggaccccgcccagagggccctgtacagggacgtgatgcaggagatctacgagatggtgatcagcctgggcttcctgctgcccaagcccgacgtgatcatccagctggagaggggcgaggagccctgggtgcccgacctgcagggcagcgccgagagggagatgagcaggggcacctgcgccggcggatctggctccggcagcggccccaagaaaaagagaaaagtctaagctgccttctgcggggcttgccttctggccatgcccttcttctctcccttgcacctgtacctcttggtctttgaataaagcctgagtaggaaggctagcaaaaaaaaaaaaaaaaaaaaaaaaaaaaaaaaaaaaaaaaaaaaaaaaaaaaaaaaaaaaaaaaaaaaaaaaaaaaaaaa

SEQ ID NO: 16667 - RNA, 9479 nt, synthetic construct
  source 1..9479: mol_type = other RNA
aggaaataagagagaaaagaagagtaagaagaaatataagagccaccatggcccctaagaagaagcgtaaagtgagccggatggaacgcctcgtctacgaggtgcggcagaagtgcagaaacatcgaggacatctgcatctcctgcggatctctgaacgtgaccctggagcacccactgttcatcggcggcatgtgccagaactgtaaaaactgttttctggagtgtgcctatcaatacgacgatgacggctaccagagctactgcaccatctgttgcggcggaagagaggtgctgatgtgtggaaataacaactgctgccggtgcttctgcgtggaatgcgtggacctgctggtgggccccggcgccgcccaggccgctattaaggaagatccttggaactgctacatgtgcggccacaagggcacatacggcctgctgagacggagagaggactggcctagcagactgcagatgttcttcgccaataaccacgaccaggagttcgacccccctaaggtgtaccctcccgtccccgccgagaagagaaagcccatccgggtcctgagcctgttcgatggcatcgccaccggtctgctggtgctgaaggacctgggcatccaggtggataggtacattgcctccgaggtgtgcgaggactccatcaccgtgggaatggtgcgtcatcagggcaagatcatgtacgtgggcgacgtgcggagcgtgacacagaagcatatccaggagtggggccctttcgacctggtgatcggcggcagcccttgcaatgacctgagcatcgtgaacccagcccggaagggcctgtacgagggaaccggcagactgttcttcgagttttacagactgctgcacgacgcccggcctaaggaaggcgacgaccggcccttcttttggctgttcgagaatgtggtggccatgggagtcagcgacaagcgggatattagccggttcctggagagcaaccccgtgatgatcgatgccaaggaagtgagcgccgcccaccgggccagatacttctggggcaatctgcctggcatgaacagacccctggccagcaccgtgaacgacaagctggagctgcaggagtgcctggagcacggccggatcgccaagttcagcaaggtgagaaccatcaccacccgaagcaacagcatcaaacaaggcaaggaccagcactttcctgtgttcatgaacgagaaggaggacatcctgtggtgtaccgagatggagagagtgttcgggttcccagtccactacacagatgtcagcaacatgtctagactggccagacagagactgctgggaagaagctggtccgtccctgtgatcagacacctgttcgcccctctgaaggagtacttcgcctgcgtgagcagcggcaacagcaacgccaacagccggggccccagcttctctagcggcctggtgccactgtccctgagagggagccacatgggccccatggagatctacaaaaccgtgagcgcctggaagcggcagcctgtgcgcgtgctgagcctgtttcggaatatcgataaagtcctgaaaagcctgggattcctggagagcggctctggctccggcggtggcaccctgaagtacgtggaggatgtgacaaacgtggtcagacgggatgtggagaagtggggccccttcgatctggtgtacggcagcacccaacccctgggcagctcttgtgaccggtgccctggctggtacatgtttcagttccaccggatcctgcagtacgccctgccgagacaggagtcccagcggccattcttttggattttcatggacaacttgctgctgaccgaggatgaccaggaaactaccactcggttcctgcagaccgaagccgtgaccctgcaggacgtgagaggccgggactaccagaacgccatgcgggtgtggtccaacatccctggactgaaaagcaagcacgcacctctgacccctaaagaagaggagtacctgcaggcccaggtgcggagcagaagcaagctggacgcccctaaggtggatctgctggtgaagaattgcctcctgcccctgagagagtacttcaagtatttcagccagaatagtctgcccctgggaggcagcggcggcggcgccctggtgacatttgaggacgtcgccgtgcggttcacccaggaggaatgggctctgctggatccttctcagaaaatcctgtaccgggacgtgatgagagagacataccggaatctgacctccgtgggcatcaactgggaatgttgggaccttgaagcctgcttcagaagcctgggaagaaacctgagagtgcaggtggtgaagagaaagtgcgagctgaccaacagcggcccctgcgccgagggcggcccaagcagcggcgcccctcctcccagcggcggcagcccagccggctccccaacctctaccgaggagggcacctctgagtccgccacccccgagagcggccctggcacctccaccgagcccagcgagggcagcgcacccggcagccctgccggcagccccacctccacagaggagggaaccagcaccgagcccagcgaaggcagcgccccaggcaccagcaccgagcctagtgagcaggagattaaacggatcaacaagatcagaagaagacttgtgaaagacagcaacaccaagaaggccggcaagacaggccccatgaaaaccctgctggttagagtgatgacacccgatctgagagagcggctggaaaacctgagaaagaagcctgaaaatatcccccagcccatcagcaatacatctagagccaacctgaataagctgctgaccgattacaccgaaatgaagaaggcgatcctgcatgtgtactgggaagagttccagaaggaccctgtgggcctgatgagccgggtggcccagcctgccagcaagaagatcgatcagaacaagctgaaacctgagatggacgagaagggcaacctgaccaccgccggctttgcctgctctcagtgtggccagcccctgttcgtgtacaagctggagcaggtgtctgagaagggcaaggcttacaccaactacttcggacggtgcaatgtggccgagcacgaaaagctgatcctgctggcccagctgaagcccgagaaggatagcgacgaagccgtgacatatagcctgggaaagtttgggcagagggccctggatttctacagcattcatgtgaccaaggagtccacccaccccgtgaagcccctggcccagatcgccggaaacagatacgcctccggacctgtgggaaaggccctgagcgacgcatgtatgggcacaatcgcctccttcctgtctaagtaccaggacatcatcatcgaacaccagaaggtggtgaagggcaaccagaagagactggagagcctgcgggagctggccggcaaggaaaacctggaataccctagcgtgaccctgccacctcagcctcacaccaaggagggcgttgatgcctacaacgaagtgatcgcccgggtgcgaatgtgggtgaacctgaacctgtggcagaagctgaagctaagcagagatgatgccaagcctctgctgagactgaagggattcccttcctttcctctggtcgagagacaggccaacgaagtggactggtgggacatggtgtgtaacgtgaagaagctgatcaacgagaaaaaggaggatggcaaggtgttttggcagaatctggctggctacaagagacaggaagccctgagaccatacctgagcagcgaggaagatcggaagaagggaaagaaattcgctcggtaccagctgggcgacctgctgctgcacctggaaaagaagcacggcgaggactggggaaaggtgtacgacgaggcctgggagcggattgacaagaaagtggaaggcctgagcaagcacatcaagctggaagaggaacggagaagcgaggacgcccagagcaaggccgccctgaccgactggctgcgggctaaggccagcttcgtgatcgagggcctgaaggaggccgacaaggacgagttctgcagatgcgagctgaagctgcagaagtggtacggggacctgcggggaaagcccttcgccatcgaagccgagaacagcatcctggacatcagcggcttcagcaagcagtacaactgtgccttcatctggcagaaggacggcgtgaagaagctgaacctgtacctgatcatcaactacttcaagggcggcaagctgcggttcaagaagatcaaacctgaagccttcgaagccaacagattctacaccgtgatcaacaaaaagagcggcgagatcgtgcccatggaggtgaacttcaacttcgacgaccccaacctgatcatcctgcctctggcctttggcaagagacagggcagagaattcatctggaacgacctgctgtccctggaaaccggcagcctgaagctggccaacggaagagtgatcgagaagacactgtacaacagaagaacccggcaggatgagcctgccctgttcgtggccctgaccttcgagcggcgggaggtcctggactcctccaatatcaaaccaatgaacctgatcggcgtggcaagaggcgaaaacatccccgccgtgatcgccctgaccgaccccgagggctgcccactgagccggtttaaggatagcctgggaaacccaacccacatcctgagaatcggcgagagctataaggagaagcagcggaccatccaggccaagaaggaggtggagcagcggagagccggcggctacagccggaagtacgccagcaaagccaagaatctggcagacgatatggtgagaaacaccgctagagatctgctgtactacgccgtgacccaggatgccatgctgatcttcgccaacctgagccggggcttcggccggcagggcaagcggaccttcatggccgagagacagtacacacggatggaggactggctgaccgccaagctggcctacgagggcctgagcaagacctacctgtccaagacactggcccagtacacctccaagacatgcagcaactgtgggtttaccatcaccagcgccgactacgacagggtgctggagaagctgaagaagacagcaacaggctggatgaccacaattaacggcaaggagctgaaggtggagggccagattacctactacaacagatacaagagacagaacgtagtcaaggacctgtccgtcgagctggatagactgagcgaagaatctgtgaacaacgacatctcctcctggacaaagggcagaagcggagaagctctgagcctcctgaagaaaagattctcccatagacccgtgcaggagaagttcgtgtgcctgaactgcggcttcgagacacacgcagccgagcaagccgccctgaacatcgccagatcctggctgttcctgcggagccaggagtacaagaaataccagacaaacaagacaaccggcaacaccgataagagagccttcgtcgagacctggcagtccttttaccggaagaagcttaaggaggtgtggaaacctgccgtgcggtctggcggatctggcggaggctccgaggagacccagggcgagctgaccagcagctgcggcagcaagaccatggccaacgtgagcctggccttcagagacgtgagcatcgacctgagccaggaggagtgggagtgcctggacgccgtgcagagagacctgtacaaggacgtgatgctggagaactacagcaacctggtgagcctgggctacaccatccccaagcccgacgtgatcaccctgctggagcaggagaaggagccctggggcggcccaagcagcggcgcccctcctcccagcggcggcagcccagccggctccccaacctctaccgaggagggcacctctgagtccgccacccccgagagcggccctggcacctccaccgagcccagcgagggcagcgcacccggcagccctgccggcagccccacctccacagaggagggaaccagcaccgagcccagcgaaggcagcgccccaggcaccagcaccgagcctagtgagcaggagattaaacggatcaacaagatcagaagaagacttgtgaaagacagcaacaccaagaaggccggcaagacaggccccatgaaaaccctgctggttagagtgatgacacccgatctgagagagcggctggaaaacctgagaaagaagcctgaaaatatcccccagcccatcagcaatacatctagagccaacctgaataagctgctgaccgattacaccgaaatgaagaaggcgatcctgcatgtgtactgggaagagttccagaaggaccctgtgggcctgatgagccgggtggcccagcctgccagcaagaagatcgatcagaacaagctgaaacctgagatggacgagaagggcaacctgaccaccgccggctttgcctgctctcagtgtggccagcccctgttcgtgtacaagctggagcaggtgtctgagaagggcaaggcttacaccaactacttcggacggtgcaatgtggccgagcacgaaaagctgatcctgctggcccagctgaagcccgagaaggatagcgacgaagccgtgacatatagcctgggaaagtttgggcagagggccctggatttctacagcattcatgtgaccaaggagtccacccaccccgtgaagcccctggcccagatcgccggaaacagatacgcctccggacctgtgggaaaggccctgagcgacgcatgtatgggcacaatcgcctccttcctgtctaagtaccaggacatcatcatcgaacaccagaaggtggtgaagggcaaccagaagagactggagagcctgcgggagctggccggcaaggaaaacctggaataccctagcgtgaccctgccacctcagcctcacaccaaggagggcgttgatgcctacaacgaagtgatcgcccgggtgcgaatgtgggtgaacctgaacctgtggcagaagctgaagctaagcagagatgatgccaagcctctgctgagactgaagggattcccttcctttcctctggtcgagagacaggccaacgaagtggactggtgggacatggtgtgtaacgtgaagaagctgatcaacgagaaaaaggaggatggcaaggtgttttggcagaatctggctggctacaagagacaggaagccctgagaccatacctgagcagcgaggaagatcggaagaagggaaagaaattcgctcggtaccagctgggcgacctgctgctgcacctggaaaagaagcacggcgaggactggggaaaggtgtacgacgaggcctgggagcggattgacaagaaagtggaaggcctgagcaagcacatcaagctggaagaggaacggagaagcgaggacgcccagagcaaggccgccctgaccgactggctgcgggctaaggccagcttcgtgatcgagggcctgaaggaggccgacaaggacgagttctgcagatgcgagctgaagctgcagaagtggtacggggacctgcggggaaagcccttcgccatcgaagccgagaacagcatcctggacatcagcggcttcagcaagcagtacaactgtgccttcatctggcagaaggacggcgtgaagaagctgaacctgtacctgatcatcaactacttcaagggcggcaagctgcggttcaagaagatcaaacctgaagccttcgaagccaacagattctacaccgtgatcaacaaaaagagcggcgagatcgtgcccatggaggtgaacttcaacttcgacgaccccaacctgatcatcctgcctctggcctttggcaagagacagggcagagaattcatctggaacgacctgctgtccctggaaaccggcagcctgaagctggccaacggaagagtgatcgagaagacactgtacaacagaagaacccggcaggatgagcctgccctgttcgtggccctgaccttcgagcggcgggaggtcctggactcctccaatatcaaaccaatgaacctgatcggcgtggcaagaggcgaaaacatccccgccgtgatcgccctgaccgaccccgagggctgcccactgagccggtttaaggatagcctgggaaacccaacccacatcctgagaatcggcgagagctataaggagaagcagcggaccatccaggccaagaaggaggtggagcagcggagagccggcggctacagccggaagtacgccagcaaagccaagaatctggcagacgatatggtgagaaacaccgctagagatctgctgtactacgccgtgacccaggatgccatgctgatcttcgccaacctgagccggggcttcggccggcagggcaagcggaccttcatggccgagagacagtacacacggatggaggactggctgaccgccaagctggcctacgagggcctgagcaagacctacctgtccaagacactggcccagtacacctccaagacatgcagcaactgtgggtttaccatcaccagcgccgactacgacagggtgctggagaagctgaagaagacagcaacaggctggatgaccacaattaacggcaaggagctgaaggtggagggccagattacctactacaacagatacaagagacagaacgtagtcaaggacctgtccgtcgagctggatagactgagcgaagaatctgtgaacaacgacatctcctcctggacaaagggcagaagcggagaagctctgagcctcctgaagaaaagattctcccatagacccgtgcaggagaagttcgtgtgcctgaactgcggcttcgagacacacgcagccgagcaagccgccctgaacatcgccagatcctggctgttcctgcggagccaggagtacaagaaataccagacaaacaagacaaccggcaacaccgataagagagccttcgtcgagacctggcagtccttttaccggaagaagcttaaggaggtgtggaaacctgccgtgcggtctggcggatctggcggaggctcctgaggagacccagggcgagctgaccagcagctgcggcagcaagaccatggccaacgtgagcctggccttcagagacgtgagcatcgacctgagccaggaggagtgggagtgcctggacgccgtgcagagagacctgtacaaggacgtgatgctggagaactacagcaacctggtgagcctgggctacaccatccccaagcccgacgtgatcaccctgctggagcaggagaaggagccctggggatctggctccggcagcggccccaagaaaaagagaaaagtctaagctgccttctgcggggcttgccttctggccatgcccttcttctctcccttgcacctgtacctcttggtctttgaataaagcctgagtaggaaggctagcaaaaaaaaaaaaaaaaaaaaaaaaaaaaaaaaaaaaaaaaaaaaaaaaaaaaaaaaaaaaaaaaaaaaaaaaaaaaaaaa

SEQ ID NO: 16668 - RNA, 9485 nt, synthetic construct
  source 1..9485: mol_type = other RNA
aggaaataagagagaaaagaagagtaagaagaaatataagagccaccatggcccctaagaagaagcgtaaagtgagccggatggaacgcctcgtctacgaggtgcggcagaagtgcagaaacatcgaggacatctgcatctcctgcggatctctgaacgtgaccctggagcacccactgttcatcggcggcatgtgccagaactgtaaaaactgttttctggagtgtgcctatcaatacgacgatgacggctaccagagctactgcaccatctgttgcggcggaagagaggtgctgatgtgtggaaataacaactgctgccggtgcttctgcgtggaatgcgtggacctgctggtgggccccggcgccgcccaggccgctattaaggaagatccttggaactgctacatgtgcggccacaagggcacatacggcctgctgagacggagagaggactggcctagcagactgcagatgttcttcgccaataaccacgaccaggagttcgacccccctaaggtgtaccctcccgtccccgccgagaagagaaagcccatccgggtcctgagcctgttcgatggcatcgccaccggtctgctggtgctgaaggacctgggcatccaggtggataggtacattgcctccgaggtgtgcgaggactccatcaccgtgggaatggtgcgtcatcagggcaagatcatgtacgtgggcgacgtgcggagcgtgacacagaagcatatccaggagtggggccctttcgacctggtgatcggcggcagcccttgcaatgacctgagcatcgtgaacccagcccggaagggcctgtacgagggaaccggcagactgttcttcgagttttacagactgctgcacgacgcccggcctaaggaaggcgacgaccggcccttcttttggctgttcgagaatgtggtggccatgggagtcagcgacaagcgggatattagccggttcctggagagcaaccccgtgatgatcgatgccaaggaagtgagcgccgcccaccgggccagatacttctggggcaatctgcctggcatgaacagacccctggccagcaccgtgaacgacaagctggagctgcaggagtgcctggagcacggccggatcgccaagttcagcaaggtgagaaccatcaccacccgaagcaacagcatcaaacaaggcaaggaccagcactttcctgtgttcatgaacgagaaggaggacatcctgtggtgtaccgagatggagagagtgttcgggttcccagtccactacacagatgtcagcaacatgtctagactggccagacagagactgctgggaagaagctggtccgtccctgtgatcagacacctgttcgcccctctgaaggagtacttcgcctgcgtgagcagcggcaacagcaacgccaacagccggggccccagcttctctagcggcctggtgccactgtccctgagagggagccacatgggccccatggagatctacaaaaccgtgagcgcctggaagcggcagcctgtgcgcgtgctgagcctgtttcggaatatcgataaagtcctgaaaagcctgggattcctggagagcggctctggctccggcggtggcaccctgaagtacgtggaggatgtgacaaacgtggtcagacgggatgtggagaagtggggccccttcgatctggtgtacggcagcacccaacccctgggcagctcttgtgaccggtgccctggctggtacatgtttcagttccaccggatcctgcagtacgccctgccgagacaggagtcccagcggccattcttttggattttcatggacaacttgctgctgaccgaggatgaccaggaaactaccactcggttcctgcagaccgaagccgtgaccctgcaggacgtgagaggccgggactaccagaacgccatgcgggtgtggtccaacatccctggactgaaaagcaagcacgcacctctgacccctaaagaagaggagtacctgcaggcccaggtgcggagcagaagcaagctggacgcccctaaggtggatctgctggtgaagaattgcctcctgcccctgagagagtacttcaagtatttcagccagaatagtctgcccctgggaggcagcggcggcggcgccctggtgacatttgaggacgtcgccgtgcggttcacccaggaggaatgggctctgctggatccttctcagaaaatcctgtaccgggacgtgatgagagagacataccggaatctgacctccgtgggcatcaactgggaatgttgggaccttgaagcctgcttcagaagcctgggaagaaacctgagagtgcaggtggtgaagagaaagtgcgagctgaccaacagcggcccctgcgccgagggcggcccaagcagcggcgcccctcctcccagcggcggcagcccagccggctccccaacctctaccgaggagggcacctctgagtccgccacccccgagagcggccctggcacctccaccgagcccagcgagggcagcgcacccggcagccctgccggcagccccacctccacagaggagggaaccagcaccgagcccagcgaaggcagcgccccaggcaccagcaccgagcctagtgagcaggagattaaacggatcaacaagatcagaagaagacttgtgaaagacagcaacaccaagaaggccggcaagacaggccccatgaaaaccctgctggttagagtgatgacacccgatctgagagagcggctggaaaacctgagaaagaagcctgaaaatatcccccagcccatcagcaatacatctagagccaacctgaataagctgctgaccgattacaccgaaatgaagaaggcgatcctgcatgtgtactgggaagagttccagaaggaccctgtgggcctgatgagccgggtggcccagcctgccagcaagaagatcgatcagaacaagctgaaacctgagatggacgagaagggcaacctgaccaccgccggctttgcctgctctcagtgtggccagcccctgttcgtgtacaagctggagcaggtgtctgagaagggcaaggcttacaccaactacttcggacggtgcaatgtggccgagcacgaaaagctgatcctgctggcccagctgaagcccgagaaggatagcgacgaagccgtgacatatagcctgggaaagtttgggcagagggccctggatttctacagcattcatgtgaccaaggagtccacccaccccgtgaagcccctggcccagatcgccggaaacagatacgcctccggacctgtgggaaaggccctgagcgacgcatgtatgggcacaatcgcctccttcctgtctaagtaccaggacatcatcatcgaacaccagaaggtggtgaagggcaaccagaagagactggagagcctgcgggagctggccggcaaggaaaacctggaataccctagcgtgaccctgccacctcagcctcacaccaaggagggcgttgatgcctacaacgaagtgatcgcccgggtgcgaatgtgggtgaacctgaacctgtggcagaagctgaagctaagcagagatgatgccaagcctctgctgagactgaagggattcccttcctttcctctggtcgagagacaggccaacgaagtggactggtgggacatggtgtgtaacgtgaagaagctgatcaacgagaaaaaggaggatggcaaggtgttttggcagaatctggctggctacaagagacaggaagccctgagaccatacctgagcagcgaggaagatcggaagaagggaaagaaattcgctcggtaccagctgggcgacctgctgctgcacctggaaaagaagcacggcgaggactggggaaaggtgtacgacgaggcctgggagcggattgacaagaaagtggaaggcctgagcaagcacatcaagctggaagaggaacggagaagcgaggacgcccagagcaaggccgccctgaccgactggctgcgggctaaggccagcttcgtgatcgagggcctgaaggaggccgacaaggacgagttctgcagatgcgagctgaagctgcagaagtggtacggggacctgcggggaaagcccttcgccatcgaagccgagaacagcatcctggacatcagcggcttcagcaagcagtacaactgtgccttcatctggcagaaggacggcgtgaagaagctgaacctgtacctgatcatcaactacttcaagggcggcaagctgcggttcaagaagatcaaacctgaagccttcgaagccaacagattctacaccgtgatcaacaaaaagagcggcgagatcgtgcccatggaggtgaacttcaacttcgacgaccccaacctgatcatcctgcctctggcctttggcaagagacagggcagagaattcatctggaacgacctgctgtccctggaaaccggcagcctgaagctggccaacggaagagtgatcgagaagacactgtacaacagaagaacccggcaggatgagcctgccctgttcgtggccctgaccttcgagcggcgggaggtcctggactcctccaatatcaaaccaatgaacctgatcggcgtggcaagaggcgaaaacatccccgccgtgatcgccctgaccgaccccgagggctgcccactgagccggtttaaggatagcctgggaaacccaacccacatcctgagaatcggcgagagctataaggagaagcagcggaccatccaggccaagaaggaggtggagcagcggagagccggcggctacagccggaagtacgccagcaaagccaagaatctggcagacgatatggtgagaaacaccgctagagatctgctgtactacgccgtgacccaggatgccatgctgatcttcgccaacctgagccggggcttcggccggcagggcaagcggaccttcatggccgagagacagtacacacggatggaggactggctgaccgccaagctggcctacgagggcctgagcaagacctacctgtccaagacactggcccagtacacctccaagacatgcagcaactgtgggtttaccatcaccagcgccgactacgacagggtgctggagaagctgaagaagacagcaacaggctggatgaccacaattaacggcaaggagctgaaggtggagggccagattacctactacaacagatacaagagacagaacgtagtcaaggacctgtccgtcgagctggatagactgagcgaagaatctgtgaacaacgacatctcctcctggacaaagggcagaagcggagaagctctgagcctcctgaagaaaagattctcccatagacccgtgcaggagaagttcgtgtgcctgaactgcggcttcgagacacacgcagccgagcaagccgccctgaacatcgccagatcctggctgttcctgcggagccaggagtacaagaaataccagacaaacaagacaaccggcaacaccgataagagagccttcgtcgagacctggcagtccttttaccggaagaagcttaaggaggtgtggaaacctgccgtgcggtctggcggatctggcggaggctccatgggcccccagggcgccaggaggcaggccttcctggccttcggcgacgtgaccgtggacttcacccagaaggagtggaggctgctgagccccgcccagagggccctgtacagggaggtgaccctggagaactacagccacctggtgagcctgggcatcctgcacagcaagcccgagctgatcaggaggctggagcagggcgaggccccctggggcgaggagaggaggaggaggcccggccccggcggcccaagcagcggcgcccctcctcccagcggcggcagcccagccggctccccaacctctaccgaggagggcacctctgagtccgccacccccgagagcggccctggcacctccaccgagcccagcgagggcagcgcacccggcagccctgccggcagccccacctccacagaggagggaaccagcaccgagcccagcgaaggcagcgccccaggcaccagcaccgagcctagtgagcaggagattaaacggatcaacaagatcagaagaagacttgtgaaagacagcaacaccaagaaggccggcaagacaggccccatgaaaaccctgctggttagagtgatgacacccgatctgagagagcggctggaaaacctgagaaagaagcctgaaaatatcccccagcccatcagcaatacatctagagccaacctgaataagctgctgaccgattacaccgaaatgaagaaggcgatcctgcatgtgtactgggaagagttccagaaggaccctgtgggcctgatgagccgggtggcccagcctgccagcaagaagatcgatcagaacaagctgaaacctgagatggacgagaagggcaacctgaccaccgccggctttgcctgctctcagtgtggccagcccctgttcgtgtacaagctggagcaggtgtctgagaagggcaaggcttacaccaactacttcggacggtgcaatgtggccgagcacgaaaagctgatcctgctggcccagctgaagcccgagaaggatagcgacgaagccgtgacatatagcctgggaaagtttgggcagagggccctggatttctacagcattcatgtgaccaaggagtccacccaccccgtgaagcccctggcccagatcgccggaaacagatacgcctccggacctgtgggaaaggccctgagcgacgcatgtatgggcacaatcgcctccttcctgtctaagtaccaggacatcatcatcgaacaccagaaggtggtgaagggcaaccagaagagactggagagcctgcgggagctggccggcaaggaaaacctggaataccctagcgtgaccctgccacctcagcctcacaccaaggagggcgttgatgcctacaacgaagtgatcgcccgggtgcgaatgtgggtgaacctgaacctgtggcagaagctgaagctaagcagagatgatgccaagcctctgctgagactgaagggattcccttcctttcctctggtcgagagacaggccaacgaagtggactggtgggacatggtgtgtaacgtgaagaagctgatcaacgagaaaaaggaggatggcaaggtgttttggcagaatctggctggctacaagagacaggaagccctgagaccatacctgagcagcgaggaagatcggaagaagggaaagaaattcgctcggtaccagctgggcgacctgctgctgcacctggaaaagaagcacggcgaggactggggaaaggtgtacgacgaggcctgggagcggattgacaagaaagtggaaggcctgagcaagcacatcaagctggaagaggaacggagaagcgaggacgcccagagcaaggccgccctgaccgactggctgcgggctaaggccagcttcgtgatcgagggcctgaaggaggccgacaaggacgagttctgcagatgcgagctgaagctgcagaagtggtacggggacctgcggggaaagcccttcgccatcgaagccgagaacagcatcctggacatcagcggcttcagcaagcagtacaactgtgccttcatctggcagaaggacggcgtgaagaagctgaacctgtacctgatcatcaactacttcaagggcggcaagctgcggttcaagaagatcaaacctgaagccttcgaagccaacagattctacaccgtgatcaacaaaaagagcggcgagatcgtgcccatggaggtgaacttcaacttcgacgaccccaacctgatcatcctgcctctggcctttggcaagagacagggcagagaattcatctggaacgacctgctgtccctggaaaccggcagcctgaagctggccaacggaagagtgatcgagaagacactgtacaacagaagaacccggcaggatgagcctgccctgttcgtggccctgaccttcgagcggcgggaggtcctggactcctccaatatcaaaccaatgaacctgatcggcgtggcaagaggcgaaaacatccccgccgtgatcgccctgaccgaccccgagggctgcccactgagccggtttaaggatagcctgggaaacccaacccacatcctgagaatcggcgagagctataaggagaagcagcggaccatccaggccaagaaggaggtggagcagcggagagccggcggctacagccggaagtacgccagcaaagccaagaatctggcagacgatatggtgagaaacaccgctagagatctgctgtactacgccgtgacccaggatgccatgctgatcttcgccaacctgagccggggcttcggccggcagggcaagcggaccttcatggccgagagacagtacacacggatggaggactggctgaccgccaagctggcctacgagggcctgagcaagacctacctgtccaagacactggcccagtacacctccaagacatgcagcaactgtgggtttaccatcaccagcgccgactacgacagggtgctggagaagctgaagaagacagcaacaggctggatgaccacaattaacggcaaggagctgaaggtggagggccagattacctactacaacagatacaagagacagaacgtagtcaaggacctgtccgtcgagctggatagactgagcgaagaatctgtgaacaacgacatctcctcctggacaaagggcagaagcggagaagctctgagcctcctgaagaaaagattctcccatagacccgtgcaggagaagttcgtgtgcctgaactgcggcttcgagacacacgcagccgagcaagccgccctgaacatcgccagatcctggctgttcctgcggagccaggagtacaagaaataccagacaaacaagacaaccggcaacaccgataagagagccttcgtcgagacctggcagtccttttaccggaagaagcttaaggaggtgtggaaacctgccgtgcggtctggcggatctggcggaggctcctatgggcccccagggcgccaggaggcaggccttcctggccttcggcgacgtgaccgtggacttcacccagaaggagtggaggctgctgagccccgcccagagggccctgtacagggaggtgaccctggagaactacagccacctggtgagcctgggcatcctgcacagcaagcccgagctgatcaggaggctggagcagggcgaggccccctggggcgaggagaggaggaggaggcccggccccggatctggctccggcagcggccccaagaaaaagagaaaagtctaagctgccttctgcggggcttgccttctggccatgcccttcttctctcccttgcacctgtacctcttggtctttgaataaagcctgagtaggaaggctagcaaaaaaaaaaaaaaaaaaaaaaaaaaaaaaaaaaaaaaaaaaaaaaaaaaaaaaaaaaaaaaaaaaaaaaaaaaaaaaaa

SEQ ID NO: 16669 - RNA, 9485 nt, synthetic construct
  source 1..9485: mol_type = other RNA
aggaaataagagagaaaagaagagtaagaagaaatataagagccaccatggcccctaagaagaagcgtaaagtgagccggatggaacgcctcgtctacgaggtgcggcagaagtgcagaaacatcgaggacatctgcatctcctgcggatctctgaacgtgaccctggagcacccactgttcatcggcggcatgtgccagaactgtaaaaactgttttctggagtgtgcctatcaatacgacgatgacggctaccagagctactgcaccatctgttgcggcggaagagaggtgctgatgtgtggaaataacaactgctgccggtgcttctgcgtggaatgcgtggacctgctggtgggccccggcgccgcccaggccgctattaaggaagatccttggaactgctacatgtgcggccacaagggcacatacggcctgctgagacggagagaggactggcctagcagactgcagatgttcttcgccaataaccacgaccaggagttcgacccccctaaggtgtaccctcccgtccccgccgagaagagaaagcccatccgggtcctgagcctgttcgatggcatcgccaccggtctgctggtgctgaaggacctgggcatccaggtggataggtacattgcctccgaggtgtgcgaggactccatcaccgtgggaatggtgcgtcatcagggcaagatcatgtacgtgggcgacgtgcggagcgtgacacagaagcatatccaggagtggggccctttcgacctggtgatcggcggcagcccttgcaatgacctgagcatcgtgaacccagcccggaagggcctgtacgagggaaccggcagactgttcttcgagttttacagactgctgcacgacgcccggcctaaggaaggcgacgaccggcccttcttttggctgttcgagaatgtggtggccatgggagtcagcgacaagcgggatattagccggttcctggagagcaaccccgtgatgatcgatgccaaggaagtgagcgccgcccaccgggccagatacttctggggcaatctgcctggcatgaacagacccctggccagcaccgtgaacgacaagctggagctgcaggagtgcctggagcacggccggatcgccaagttcagcaaggtgagaaccatcaccacccgaagcaacagcatcaaacaaggcaaggaccagcactttcctgtgttcatgaacgagaaggaggacatcctgtggtgtaccgagatggagagagtgttcgggttcccagtccactacacagatgtcagcaacatgtctagactggccagacagagactgctgggaagaagctggtccgtccctgtgatcagacacctgttcgcccctctgaaggagtacttcgcctgcgtgagcagcggcaacagcaacgccaacagccggggccccagcttctctagcggcctggtgccactgtccctgagagggagccacatgggccccatggagatctacaaaaccgtgagcgcctggaagcggcagcctgtgcgcgtgctgagcctgtttcggaatatcgataaagtcctgaaaagcctgggattcctggagagcggctctggctccggcggtggcaccctgaagtacgtggaggatgtgacaaacgtggtcagacgggatgtggagaagtggggccccttcgatctggtgtacggcagcacccaacccctgggcagctcttgtgaccggtgccctggctggtacatgtttcagttccaccggatcctgcagtacgccctgccgagacaggagtcccagcggccattcttttggattttcatggacaacttgctgctgaccgaggatgaccaggaaactaccactcggttcctgcagaccgaagccgtgaccctgcaggacgtgagaggccgggactaccagaacgccatgcgggtgtggtccaacatccctggactgaaaagcaagcacgcacctctgacccctaaagaagaggagtacctgcaggcccaggtgcggagcagaagcaagctggacgcccctaaggtggatctgctggtgaagaattgcctcctgcccctgagagagtacttcaagtatttcagccagaatagtctgcccctgggaggcagcggcggcggcgccctggtgacatttgaggacgtcgccgtgcggttcacccaggaggaatgggctctgctggatccttctcagaaaatcctgtaccgggacgtgatgagagagacataccggaatctgacctccgtgggcatcaactgggaatgttgggaccttgaagcctgcttcagaagcctgggaagaaacctgagagtgcaggtggtgaagagaaagtgcgagctgaccaacagcggcccctgcgccgagggcggcccaagcagcggcgcccctcctcccagcggcggcagcccagccggctccccaacctctaccgaggagggcacctctgagtccgccacccccgagagcggccctggcacctccaccgagcccagcgagggcagcgcacccggcagccctgccggcagccccacctccacagaggagggaaccagcaccgagcccagcgaaggcagcgccccaggcaccagcaccgagcctagtgagcaggagattaaacggatcaacaagatcagaagaagacttgtgaaagacagcaacaccaagaaggccggcaagacaggccccatgaaaaccctgctggttagagtgatgacacccgatctgagagagcggctggaaaacctgagaaagaagcctgaaaatatcccccagcccatcagcaatacatctagagccaacctgaataagctgctgaccgattacaccgaaatgaagaaggcgatcctgcatgtgtactgggaagagttccagaaggaccctgtgggcctgatgagccgggtggcccagcctgccagcaagaagatcgatcagaacaagctgaaacctgagatggacgagaagggcaacctgaccaccgccggctttgcctgctctcagtgtggccagcccctgttcgtgtacaagctggagcaggtgtctgagaagggcaaggcttacaccaactacttcggacggtgcaatgtggccgagcacgaaaagctgatcctgctggcccagctgaagcccgagaaggatagcgacgaagccgtgacatatagcctgggaaagtttgggcagagggccctggatttctacagcattcatgtgaccaaggagtccacccaccccgtgaagcccctggcccagatcgccggaaacagatacgcctccggacctgtgggaaaggccctgagcgacgcatgtatgggcacaatcgcctccttcctgtctaagtaccaggacatcatcatcgaacaccagaaggtggtgaagggcaaccagaagagactggagagcctgcgggagctggccggcaaggaaaacctggaataccctagcgtgaccctgccacctcagcctcacaccaaggagggcgttgatgcctacaacgaagtgatcgcccgggtgcgaatgtgggtgaacctgaacctgtggcagaagctgaagctaagcagagatgatgccaagcctctgctgagactgaagggattcccttcctttcctctggtcgagagacaggccaacgaagtggactggtgggacatggtgtgtaacgtgaagaagctgatcaacgagaaaaaggaggatggcaaggtgttttggcagaatctggctggctacaagagacaggaagccctgagaccatacctgagcagcgaggaagatcggaagaagggaaagaaattcgctcggtaccagctgggcgacctgctgctgcacctggaaaagaagcacggcgaggactggggaaaggtgtacgacgaggcctgggagcggattgacaagaaagtggaaggcctgagcaagcacatcaagctggaagaggaacggagaagcgaggacgcccagagcaaggccgccctgaccgactggctgcgggctaaggccagcttcgtgatcgagggcctgaaggaggccgacaaggacgagttctgcagatgcgagctgaagctgcagaagtggtacggggacctgcggggaaagcccttcgccatcgaagccgagaacagcatcctggacatcagcggcttcagcaagcagtacaactgtgccttcatctggcagaaggacggcgtgaagaagctgaacctgtacctgatcatcaactacttcaagggcggcaagctgcggttcaagaagatcaaacctgaagccttcgaagccaacagattctacaccgtgatcaacaaaaagagcggcgagatcgtgcccatggaggtgaacttcaacttcgacgaccccaacctgatcatcctgcctctggcctttggcaagagacagggcagagaattcatctggaacgacctgctgtccctggaaaccggcagcctgaagctggccaacggaagagtgatcgagaagacactgtacaacagaagaacccggcaggatgagcctgccctgttcgtggccctgaccttcgagcggcgggaggtcctggactcctccaatatcaaaccaatgaacctgatcggcgtggcaagaggcgaaaacatccccgccgtgatcgccctgaccgaccccgagggctgcccactgagccggtttaaggatagcctgggaaacccaacccacatcctgagaatcggcgagagctataaggagaagcagcggaccatccaggccaagaaggaggtggagcagcggagagccggcggctacagccggaagtacgccagcaaagccaagaatctggcagacgatatggtgagaaacaccgctagagatctgctgtactacgccgtgacccaggatgccatgctgatcttcgccaacctgagccggggcttcggccggcagggcaagcggaccttcatggccgagagacagtacacacggatggaggactggctgaccgccaagctggcctacgagggcctgagcaagacctacctgtccaagacactggcccagtacacctccaagacatgcagcaactgtgggtttaccatcaccagcgccgactacgacagggtgctggagaagctgaagaagacagcaacaggctggatgaccacaattaacggcaaggagctgaaggtggagggccagattacctactacaacagatacaagagacagaacgtagtcaaggacctgtccgtcgagctggatagactgagcgaagaatctgtgaacaacgacatctcctcctggacaaagggcagaagcggagaagctctgagcctcctgaagaaaagattctcccatagacccgtgcaggagaagttcgtgtgcctgaactgcggcttcgagacacacgcagccgagcaagccgccctgaacatcgccagatcctggctgttcctgcggagccaggagtacaagaaataccagacaaacaagacaaccggcaacaccgataagagagccttcgtcgagacctggcagtccttttaccggaagaagcttaaggaggtgtggaaacctgccgtgcggtctggcggatctggcggaggctccttccagggcagcgtgaccttcaccgacgtggccatcgacttcagccaggaggagtggaggtggctgcagcccgcccagagggacctgtacaggtgcgtgatgctggagaactacggccacctggtgagcctgggcctgagcatcagcaagcccgacgtggtgagcctgctggagcagggcaaggagccctggctgggcaagaggaacgtgaacagggacctgttcagcgtgagcgagagcaggggcggcccaagcagcggcgcccctcctcccagcggcggcagcccagccggctccccaacctctaccgaggagggcacctctgagtccgccacccccgagagcggccctggcacctccaccgagcccagcgagggcagcgcacccggcagccctgccggcagccccacctccacagaggagggaaccagcaccgagcccagcgaaggcagcgccccaggcaccagcaccgagcctagtgagcaggagattaaacggatcaacaagatcagaagaagacttgtgaaagacagcaacaccaagaaggccggcaagacaggccccatgaaaaccctgctggttagagtgatgacacccgatctgagagagcggctggaaaacctgagaaagaagcctgaaaatatcccccagcccatcagcaatacatctagagccaacctgaataagctgctgaccgattacaccgaaatgaagaaggcgatcctgcatgtgtactgggaagagttccagaaggaccctgtgggcctgatgagccgggtggcccagcctgccagcaagaagatcgatcagaacaagctgaaacctgagatggacgagaagggcaacctgaccaccgccggctttgcctgctctcagtgtggccagcccctgttcgtgtacaagctggagcaggtgtctgagaagggcaaggcttacaccaactacttcggacggtgcaatgtggccgagcacgaaaagctgatcctgctggcccagctgaagcccgagaaggatagcgacgaagccgtgacatatagcctgggaaagtttgggcagagggccctggatttctacagcattcatgtgaccaaggagtccacccaccccgtgaagcccctggcccagatcgccggaaacagatacgcctccggacctgtgggaaaggccctgagcgacgcatgtatgggcacaatcgcctccttcctgtctaagtaccaggacatcatcatcgaacaccagaaggtggtgaagggcaaccagaagagactggagagcctgcgggagctggccggcaaggaaaacctggaataccctagcgtgaccctgccacctcagcctcacaccaaggagggcgttgatgcctacaacgaagtgatcgcccgggtgcgaatgtgggtgaacctgaacctgtggcagaagctgaagctaagcagagatgatgccaagcctctgctgagactgaagggattcccttcctttcctctggtcgagagacaggccaacgaagtggactggtgggacatggtgtgtaacgtgaagaagctgatcaacgagaaaaaggaggatggcaaggtgttttggcagaatctggctggctacaagagacaggaagccctgagaccatacctgagcagcgaggaagatcggaagaagggaaagaaattcgctcggtaccagctgggcgacctgctgctgcacctggaaaagaagcacggcgaggactggggaaaggtgtacgacgaggcctgggagcggattgacaagaaagtggaaggcctgagcaagcacatcaagctggaagaggaacggagaagcgaggacgcccagagcaaggccgccctgaccgactggctgcgggctaaggccagcttcgtgatcgagggcctgaaggaggccgacaaggacgagttctgcagatgcgagctgaagctgcagaagtggtacggggacctgcggggaaagcccttcgccatcgaagccgagaacagcatcctggacatcagcggcttcagcaagcagtacaactgtgccttcatctggcagaaggacggcgtgaagaagctgaacctgtacctgatcatcaactacttcaagggcggcaagctgcggttcaagaagatcaaacctgaagccttcgaagccaacagattctacaccgtgatcaacaaaaagagcggcgagatcgtgcccatggaggtgaacttcaacttcgacgaccccaacctgatcatcctgcctctggcctttggcaagagacagggcagagaattcatctggaacgacctgctgtccctggaaaccggcagcctgaagctggccaacggaagagtgatcgagaagacactgtacaacagaagaacccggcaggatgagcctgccctgttcgtggccctgaccttcgagcggcgggaggtcctggactcctccaatatcaaaccaatgaacctgatcggcgtggcaagaggcgaaaacatccccgccgtgatcgccctgaccgaccccgagggctgcccactgagccggtttaaggatagcctgggaaacccaacccacatcctgagaatcggcgagagctataaggagaagcagcggaccatccaggccaagaaggaggtggagcagcggagagccggcggctacagccggaagtacgccagcaaagccaagaatctggcagacgatatggtgagaaacaccgctagagatctgctgtactacgccgtgacccaggatgccatgctgatcttcgccaacctgagccggggcttcggccggcagggcaagcggaccttcatggccgagagacagtacacacggatggaggactggctgaccgccaagctggcctacgagggcctgagcaagacctacctgtccaagacactggcccagtacacctccaagacatgcagcaactgtgggtttaccatcaccagcgccgactacgacagggtgctggagaagctgaagaagacagcaacaggctggatgaccacaattaacggcaaggagctgaaggtggagggccagattacctactacaacagatacaagagacagaacgtagtcaaggacctgtccgtcgagctggatagactgagcgaagaatctgtgaacaacgacatctcctcctggacaaagggcagaagcggagaagctctgagcctcctgaagaaaagattctcccatagacccgtgcaggagaagttcgtgtgcctgaactgcggcttcgagacacacgcagccgagcaagccgccctgaacatcgccagatcctggctgttcctgcggagccaggagtacaagaaataccagacaaacaagacaaccggcaacaccgataagagagccttcgtcgagacctggcagtccttttaccggaagaagcttaaggaggtgtggaaacctgccgtgcggtctggcggatctggcggaggctcctttccagggcagcgtgaccttcaccgacgtggccatcgacttcagccaggaggagtggaggtggctgcagcccgcccagagggacctgtacaggtgcgtgatgctggagaactacggccacctggtgagcctgggcctgagcatcagcaagcccgacgtggtgagcctgctggagcagggcaaggagccctggctgggcaagaggaacgtgaacagggacctgttcagcgtgagcgagagcaggggatctggctccggcagcggccccaagaaaaagagaaaagtctaagctgccttctgcggggcttgccttctggccatgcccttcttctctcccttgcacctgtacctcttggtctttgaataaagcctgagtaggaaggctagcaaaaaaaaaaaaaaaaaaaaaaaaaaaaaaaaaaaaaaaaaaaaaaaaaaaaaaaaaaaaaaaaaaaaaaaaaaaaaaaa

SEQ ID NO: 16670 - RNA, 9485 nt, synthetic construct
  source 1..9485: mol_type = other RNA
aggaaataagagagaaaagaagagtaagaagaaatataagagccaccatggcccctaagaagaagcgtaaagtgagccggatggaacgcctcgtctacgaggtgcggcagaagtgcagaaacatcgaggacatctgcatctcctgcggatctctgaacgtgaccctggagcacccactgttcatcggcggcatgtgccagaactgtaaaaactgttttctggagtgtgcctatcaatacgacgatgacggctaccagagctactgcaccatctgttgcggcggaagagaggtgctgatgtgtggaaataacaactgctgccggtgcttctgcgtggaatgcgtggacctgctggtgggccccggcgccgcccaggccgctattaaggaagatccttggaactgctacatgtgcggccacaagggcacatacggcctgctgagacggagagaggactggcctagcagactgcagatgttcttcgccaataaccacgaccaggagttcgacccccctaaggtgtaccctcccgtccccgccgagaagagaaagcccatccgggtcctgagcctgttcgatggcatcgccaccggtctgctggtgctgaaggacctgggcatccaggtggataggtacattgcctccgaggtgtgcgaggactccatcaccgtgggaatggtgcgtcatcagggcaagatcatgtacgtgggcgacgtgcggagcgtgacacagaagcatatccaggagtggggccctttcgacctggtgatcggcggcagcccttgcaatgacctgagcatcgtgaacccagcccggaagggcctgtacgagggaaccggcagactgttcttcgagttttacagactgctgcacgacgcccggcctaaggaaggcgacgaccggcccttcttttggctgttcgagaatgtggtggccatgggagtcagcgacaagcgggatattagccggttcctggagagcaaccccgtgatgatcgatgccaaggaagtgagcgccgcccaccgggccagatacttctggggcaatctgcctggcatgaacagacccctggccagcaccgtgaacgacaagctggagctgcaggagtgcctggagcacggccggatcgccaagttcagcaaggtgagaaccatcaccacccgaagcaacagcatcaaacaaggcaaggaccagcactttcctgtgttcatgaacgagaaggaggacatcctgtggtgtaccgagatggagagagtgttcgggttcccagtccactacacagatgtcagcaacatgtctagactggccagacagagactgctgggaagaagctggtccgtccctgtgatcagacacctgttcgcccctctgaaggagtacttcgcctgcgtgagcagcggcaacagcaacgccaacagccggggccccagcttctctagcggcctggtgccactgtccctgagagggagccacatgggccccatggagatctacaaaaccgtgagcgcctggaagcggcagcctgtgcgcgtgctgagcctgtttcggaatatcgataaagtcctgaaaagcctgggattcctggagagcggctctggctccggcggtggcaccctgaagtacgtggaggatgtgacaaacgtggtcagacgggatgtggagaagtggggccccttcgatctggtgtacggcagcacccaacccctgggcagctcttgtgaccggtgccctggctggtacatgtttcagttccaccggatcctgcagtacgccctgccgagacaggagtcccagcggccattcttttggattttcatggacaacttgctgctgaccgaggatgaccaggaaactaccactcggttcctgcagaccgaagccgtgaccctgcaggacgtgagaggccgggactaccagaacgccatgcgggtgtggtccaacatccctggactgaaaagcaagcacgcacctctgacccctaaagaagaggagtacctgcaggcccaggtgcggagcagaagcaagctggacgcccctaaggtggatctgctggtgaagaattgcctcctgcccctgagagagtacttcaagtatttcagccagaatagtctgcccctgggaggcagcggcggcggcgccctggtgacatttgaggacgtcgccgtgcggttcacccaggaggaatgggctctgctggatccttctcagaaaatcctgtaccgggacgtgatgagagagacataccggaatctgacctccgtgggcatcaactgggaatgttgggaccttgaagcctgcttcagaagcctgggaagaaacctgagagtgcaggtggtgaagagaaagtgcgagctgaccaacagcggcccctgcgccgagggcggcccaagcagcggcgcccctcctcccagcggcggcagcccagccggctccccaacctctaccgaggagggcacctctgagtccgccacccccgagagcggccctggcacctccaccgagcccagcgagggcagcgcacccggcagccctgccggcagccccacctccacagaggagggaaccagcaccgagcccagcgaaggcagcgccccaggcaccagcaccgagcctagtgagcaggagattaaacggatcaacaagatcagaagaagacttgtgaaagacagcaacaccaagaaggccggcaagacaggccccatgaaaaccctgctggttagagtgatgacacccgatctgagagagcggctggaaaacctgagaaagaagcctgaaaatatcccccagcccatcagcaatacatctagagccaacctgaataagctgctgaccgattacaccgaaatgaagaaggcgatcctgcatgtgtactgggaagagttccagaaggaccctgtgggcctgatgagccgggtggcccagcctgccagcaagaagatcgatcagaacaagctgaaacctgagatggacgagaagggcaacctgaccaccgccggctttgcctgctctcagtgtggccagcccctgttcgtgtacaagctggagcaggtgtctgagaagggcaaggcttacaccaactacttcggacggtgcaatgtggccgagcacgaaaagctgatcctgctggcccagctgaagcccgagaaggatagcgacgaagccgtgacatatagcctgggaaagtttgggcagagggccctggatttctacagcattcatgtgaccaaggagtccacccaccccgtgaagcccctggcccagatcgccggaaacagatacgcctccggacctgtgggaaaggccctgagcgacgcatgtatgggcacaatcgcctccttcctgtctaagtaccaggacatcatcatcgaacaccagaaggtggtgaagggcaaccagaagagactggagagcctgcgggagctggccggcaaggaaaacctggaataccctagcgtgaccctgccacctcagcctcacaccaaggagggcgttgatgcctacaacgaagtgatcgcccgggtgcgaatgtgggtgaacctgaacctgtggcagaagctgaagctaagcagagatgatgccaagcctctgctgagactgaagggattcccttcctttcctctggtcgagagacaggccaacgaagtggactggtgggacatggtgtgtaacgtgaagaagctgatcaacgagaaaaaggaggatggcaaggtgttttggcagaatctggctggctacaagagacaggaagccctgagaccatacctgagcagcgaggaagatcggaagaagggaaagaaattcgctcggtaccagctgggcgacctgctgctgcacctggaaaagaagcacggcgaggactggggaaaggtgtacgacgaggcctgggagcggattgacaagaaagtggaaggcctgagcaagcacatcaagctggaagaggaacggagaagcgaggacgcccagagcaaggccgccctgaccgactggctgcgggctaaggccagcttcgtgatcgagggcctgaaggaggccgacaaggacgagttctgcagatgcgagctgaagctgcagaagtggtacggggacctgcggggaaagcccttcgccatcgaagccgagaacagcatcctggacatcagcggcttcagcaagcagtacaactgtgccttcatctggcagaaggacggcgtgaagaagctgaacctgtacctgatcatcaactacttcaagggcggcaagctgcggttcaagaagatcaaacctgaagccttcgaagccaacagattctacaccgtgatcaacaaaaagagcggcgagatcgtgcccatggaggtgaacttcaacttcgacgaccccaacctgatcatcctgcctctggcctttggcaagagacagggcagagaattcatctggaacgacctgctgtccctggaaaccggcagcctgaagctggccaacggaagagtgatcgagaagacactgtacaacagaagaacccggcaggatgagcctgccctgttcgtggccctgaccttcgagcggcgggaggtcctggactcctccaatatcaaaccaatgaacctgatcggcgtggcaagaggcgaaaacatccccgccgtgatcgccctgaccgaccccgagggctgcccactgagccggtttaaggatagcctgggaaacccaacccacatcctgagaatcggcgagagctataaggagaagcagcggaccatccaggccaagaaggaggtggagcagcggagagccggcggctacagccggaagtacgccagcaaagccaagaatctggcagacgatatggtgagaaacaccgctagagatctgctgtactacgccgtgacccaggatgccatgctgatcttcgccaacctgagccggggcttcggccggcagggcaagcggaccttcatggccgagagacagtacacacggatggaggactggctgaccgccaagctggcctacgagggcctgagcaagacctacctgtccaagacactggcccagtacacctccaagacatgcagcaactgtgggtttaccatcaccagcgccgactacgacagggtgctggagaagctgaagaagacagcaacaggctggatgaccacaattaacggcaaggagctgaaggtggagggccagattacctactacaacagatacaagagacagaacgtagtcaaggacctgtccgtcgagctggatagactgagcgaagaatctgtgaacaacgacatctcctcctggacaaagggcagaagcggagaagctctgagcctcctgaagaaaagattctcccatagacccgtgcaggagaagttcgtgtgcctgaactgcggcttcgagacacacgcagccgagcaagccgccctgaacatcgccagatcctggctgttcctgcggagccaggagtacaagaaataccagacaaacaagacaaccggcaacaccgataagagagccttcgtcgagacctggcagtccttttaccggaagaagcttaaggaggtgtggaaacctgccgtgcggtctggcggatctggcggaggctcctggaaggagctgctgagcttcgaggacgtggccatgtacttcaccagggaggagtggaacaggctggactgggcccagaaggacctgtacagggacgtgatgctggagaactacaggaacatgatcctgctgggcttccagttccccaagcccgaggtgatctgcctgctggagcagtgggaggagccctggatcctggacctgcccagggccggcaccaggaaggccagcagcagcgcctgcggcggcccaagcagcggcgcccctcctcccagcggcggcagcccagccggctccccaacctctaccgaggagggcacctctgagtccgccacccccgagagcggccctggcacctccaccgagcccagcgagggcagcgcacccggcagccctgccggcagccccacctccacagaggagggaaccagcaccgagcccagcgaaggcagcgccccaggcaccagcaccgagcctagtgagcaggagattaaacggatcaacaagatcagaagaagacttgtgaaagacagcaacaccaagaaggccggcaagacaggccccatgaaaaccctgctggttagagtgatgacacccgatctgagagagcggctggaaaacctgagaaagaagcctgaaaatatcccccagcccatcagcaatacatctagagccaacctgaataagctgctgaccgattacaccgaaatgaagaaggcgatcctgcatgtgtactgggaagagttccagaaggaccctgtgggcctgatgagccgggtggcccagcctgccagcaagaagatcgatcagaacaagctgaaacctgagatggacgagaagggcaacctgaccaccgccggctttgcctgctctcagtgtggccagcccctgttcgtgtacaagctggagcaggtgtctgagaagggcaaggcttacaccaactacttcggacggtgcaatgtggccgagcacgaaaagctgatcctgctggcccagctgaagcccgagaaggatagcgacgaagccgtgacatatagcctgggaaagtttgggcagagggccctggatttctacagcattcatgtgaccaaggagtccacccaccccgtgaagcccctggcccagatcgccggaaacagatacgcctccggacctgtgggaaaggccctgagcgacgcatgtatgggcacaatcgcctccttcctgtctaagtaccaggacatcatcatcgaacaccagaaggtggtgaagggcaaccagaagagactggagagcctgcgggagctggccggcaaggaaaacctggaataccctagcgtgaccctgccacctcagcctcacaccaaggagggcgttgatgcctacaacgaagtgatcgcccgggtgcgaatgtgggtgaacctgaacctgtggcagaagctgaagctaagcagagatgatgccaagcctctgctgagactgaagggattcccttcctttcctctggtcgagagacaggccaacgaagtggactggtgggacatggtgtgtaacgtgaagaagctgatcaacgagaaaaaggaggatggcaaggtgttttggcagaatctggctggctacaagagacaggaagccctgagaccatacctgagcagcgaggaagatcggaagaagggaaagaaattcgctcggtaccagctgggcgacctgctgctgcacctggaaaagaagcacggcgaggactggggaaaggtgtacgacgaggcctgggagcggattgacaagaaagtggaaggcctgagcaagcacatcaagctggaagaggaacggagaagcgaggacgcccagagcaaggccgccctgaccgactggctgcgggctaaggccagcttcgtgatcgagggcctgaaggaggccgacaaggacgagttctgcagatgcgagctgaagctgcagaagtggtacggggacctgcggggaaagcccttcgccatcgaagccgagaacagcatcctggacatcagcggcttcagcaagcagtacaactgtgccttcatctggcagaaggacggcgtgaagaagctgaacctgtacctgatcatcaactacttcaagggcggcaagctgcggttcaagaagatcaaacctgaagccttcgaagccaacagattctacaccgtgatcaacaaaaagagcggcgagatcgtgcccatggaggtgaacttcaacttcgacgaccccaacctgatcatcctgcctctggcctttggcaagagacagggcagagaattcatctggaacgacctgctgtccctggaaaccggcagcctgaagctggccaacggaagagtgatcgagaagacactgtacaacagaagaacccggcaggatgagcctgccctgttcgtggccctgaccttcgagcggcgggaggtcctggactcctccaatatcaaaccaatgaacctgatcggcgtggcaagaggcgaaaacatccccgccgtgatcgccctgaccgaccccgagggctgcccactgagccggtttaaggatagcctgggaaacccaacccacatcctgagaatcggcgagagctataaggagaagcagcggaccatccaggccaagaaggaggtggagcagcggagagccggcggctacagccggaagtacgccagcaaagccaagaatctggcagacgatatggtgagaaacaccgctagagatctgctgtactacgccgtgacccaggatgccatgctgatcttcgccaacctgagccggggcttcggccggcagggcaagcggaccttcatggccgagagacagtacacacggatggaggactggctgaccgccaagctggcctacgagggcctgagcaagacctacctgtccaagacactggcccagtacacctccaagacatgcagcaactgtgggtttaccatcaccagcgccgactacgacagggtgctggagaagctgaagaagacagcaacaggctggatgaccacaattaacggcaaggagctgaaggtggagggccagattacctactacaacagatacaagagacagaacgtagtcaaggacctgtccgtcgagctggatagactgagcgaagaatctgtgaacaacgacatctcctcctggacaaagggcagaagcggagaagctctgagcctcctgaagaaaagattctcccatagacccgtgcaggagaagttcgtgtgcctgaactgcggcttcgagacacacgcagccgagcaagccgccctgaacatcgccagatcctggctgttcctgcggagccaggagtacaagaaataccagacaaacaagacaaccggcaacaccgataagagagccttcgtcgagacctggcagtccttttaccggaagaagcttaaggaggtgtggaaacctgccgtgcggtctggcggatctggcggaggctccttggaaggagctgctgagcttcgaggacgtggccatgtacttcaccagggaggagtggaacaggctggactgggcccagaaggacctgtacagggacgtgatgctggagaactacaggaacatgatcctgctgggcttccagttccccaagcccgaggtgatctgcctgctggagcagtgggaggagccctggatcctggacctgcccagggccggcaccaggaaggccagcagcagcgcctgcggatctggctccggcagcggccccaagaaaaagagaaaagtctaagctgccttctgcggggcttgccttctggccatgcccttcttctctcccttgcacctgtacctcttggtctttgaataaagcctgagtaggaaggctagcaaaaaaaaaaaaaaaaaaaaaaaaaaaaaaaaaaaaaaaaaaaaaaaaaaaaaaaaaaaaaaaaaaaaaaaaaaaaaaaa

SEQ ID NO: 16671 - RNA, 9485 nt, synthetic construct
  source 1..9485: mol_type = other RNA
aggaaataagagagaaaagaagagtaagaagaaatataagagccaccatggcccctaagaagaagcgtaaagtgagccggatggaacgcctcgtctacgaggtgcggcagaagtgcagaaacatcgaggacatctgcatctcctgcggatctctgaacgtgaccctggagcacccactgttcatcggcggcatgtgccagaactgtaaaaactgttttctggagtgtgcctatcaatacgacgatgacggctaccagagctactgcaccatctgttgcggcggaagagaggtgctgatgtgtggaaataacaactgctgccggtgcttctgcgtggaatgcgtggacctgctggtgggccccggcgccgcccaggccgctattaaggaagatccttggaactgctacatgtgcggccacaagggcacatacggcctgctgagacggagagaggactggcctagcagactgcagatgttcttcgccaataaccacgaccaggagttcgacccccctaaggtgtaccctcccgtccccgccgagaagagaaagcccatccgggtcctgagcctgttcgatggcatcgccaccggtctgctggtgctgaaggacctgggcatccaggtggataggtacattgcctccgaggtgtgcgaggactccatcaccgtgggaatggtgcgtcatcagggcaagatcatgtacgtgggcgacgtgcggagcgtgacacagaagcatatccaggagtggggccctttcgacctggtgatcggcggcagcccttgcaatgacctgagcatcgtgaacccagcccggaagggcctgtacgagggaaccggcagactgttcttcgagttttacagactgctgcacgacgcccggcctaaggaaggcgacgaccggcccttcttttggctgttcgagaatgtggtggccatgggagtcagcgacaagcgggatattagccggttcctggagagcaaccccgtgatgatcgatgccaaggaagtgagcgccgcccaccgggccagatacttctggggcaatctgcctggcatgaacagacccctggccagcaccgtgaacgacaagctggagctgcaggagtgcctggagcacggccggatcgccaagttcagcaaggtgagaaccatcaccacccgaagcaacagcatcaaacaaggcaaggaccagcactttcctgtgttcatgaacgagaaggaggacatcctgtggtgtaccgagatggagagagtgttcgggttcccagtccactacacagatgtcagcaacatgtctagactggccagacagagactgctgggaagaagctggtccgtccctgtgatcagacacctgttcgcccctctgaaggagtacttcgcctgcgtgagcagcggcaacagcaacgccaacagccggggccccagcttctctagcggcctggtgccactgtccctgagagggagccacatgggccccatggagatctacaaaaccgtgagcgcctggaagcggcagcctgtgcgcgtgctgagcctgtttcggaatatcgataaagtcctgaaaagcctgggattcctggagagcggctctggctccggcggtggcaccctgaagtacgtggaggatgtgacaaacgtggtcagacgggatgtggagaagtggggccccttcgatctggtgtacggcagcacccaacccctgggcagctcttgtgaccggtgccctggctggtacatgtttcagttccaccggatcctgcagtacgccctgccgagacaggagtcccagcggccattcttttggattttcatggacaacttgctgctgaccgaggatgaccaggaaactaccactcggttcctgcagaccgaagccgtgaccctgcaggacgtgagaggccgggactaccagaacgccatgcgggtgtggtccaacatccctggactgaaaagcaagcacgcacctctgacccctaaagaagaggagtacctgcaggcccaggtgcggagcagaagcaagctggacgcccctaaggtggatctgctggtgaagaattgcctcctgcccctgagagagtacttcaagtatttcagccagaatagtctgcccctgggaggcagcggcggcggcgccctggtgacatttgaggacgtcgccgtgcggttcacccaggaggaatgggctctgctggatccttctcagaaaatcctgtaccgggacgtgatgagagagacataccggaatctgacctccgtgggcatcaactgggaatgttgggaccttgaagcctgcttcagaagcctgggaagaaacctgagagtgcaggtggtgaagagaaagtgcgagctgaccaacagcggcccctgcgccgagggcggcccaagcagcggcgcccctcctcccagcggcggcagcccagccggctccccaacctctaccgaggagggcacctctgagtccgccacccccgagagcggccctggcacctccaccgagcccagcgagggcagcgcacccggcagccctgccggcagccccacctccacagaggagggaaccagcaccgagcccagcgaaggcagcgccccaggcaccagcaccgagcctagtgagcaggagattaaacggatcaacaagatcagaagaagacttgtgaaagacagcaacaccaagaaggccggcaagacaggccccatgaaaaccctgctggttagagtgatgacacccgatctgagagagcggctggaaaacctgagaaagaagcctgaaaatatcccccagcccatcagcaatacatctagagccaacctgaataagctgctgaccgattacaccgaaatgaagaaggcgatcctgcatgtgtactgggaagagttccagaaggaccctgtgggcctgatgagccgggtggcccagcctgccagcaagaagatcgatcagaacaagctgaaacctgagatggacgagaagggcaacctgaccaccgccggctttgcctgctctcagtgtggccagcccctgttcgtgtacaagctggagcaggtgtctgagaagggcaaggcttacaccaactacttcggacggtgcaatgtggccgagcacgaaaagctgatcctgctggcccagctgaagcccgagaaggatagcgacgaagccgtgacatatagcctgggaaagtttgggcagagggccctggatttctacagcattcatgtgaccaaggagtccacccaccccgtgaagcccctggcccagatcgccggaaacagatacgcctccggacctgtgggaaaggccctgagcgacgcatgtatgggcacaatcgcctccttcctgtctaagtaccaggacatcatcatcgaacaccagaaggtggtgaagggcaaccagaagagactggagagcctgcgggagctggccggcaaggaaaacctggaataccctagcgtgaccctgccacctcagcctcacaccaaggagggcgttgatgcctacaacgaagtgatcgcccgggtgcgaatgtgggtgaacctgaacctgtggcagaagctgaagctaagcagagatgatgccaagcctctgctgagactgaagggattcccttcctttcctctggtcgagagacaggccaacgaagtggactggtgggacatggtgtgtaacgtgaagaagctgatcaacgagaaaaaggaggatggcaaggtgttttggcagaatctggctggctacaagagacaggaagccctgagaccatacctgagcagcgaggaagatcggaagaagggaaagaaattcgctcggtaccagctgggcgacctgctgctgcacctggaaaagaagcacggcgaggactggggaaaggtgtacgacgaggcctgggagcggattgacaagaaagtggaaggcctgagcaagcacatcaagctggaagaggaacggagaagcgaggacgcccagagcaaggccgccctgaccgactggctgcgggctaaggccagcttcgtgatcgagggcctgaaggaggccgacaaggacgagttctgcagatgcgagctgaagctgcagaagtggtacggggacctgcggggaaagcccttcgccatcgaagccgagaacagcatcctggacatcagcggcttcagcaagcagtacaactgtgccttcatctggcagaaggacggcgtgaagaagctgaacctgtacctgatcatcaactacttcaagggcggcaagctgcggttcaagaagatcaaacctgaagccttcgaagccaacagattctacaccgtgatcaacaaaaagagcggcgagatcgtgcccatggaggtgaacttcaacttcgacgaccccaacctgatcatcctgcctctggcctttggcaagagacagggcagagaattcatctggaacgacctgctgtccctggaaaccggcagcctgaagctggccaacggaagagtgatcgagaagacactgtacaacagaagaacccggcaggatgagcctgccctgttcgtggccctgaccttcgagcggcgggaggtcctggactcctccaatatcaaaccaatgaacctgatcggcgtggcaagaggcgaaaacatccccgccgtgatcgccctgaccgaccccgagggctgcccactgagccggtttaaggatagcctgggaaacccaacccacatcctgagaatcggcgagagctataaggagaagcagcggaccatccaggccaagaaggaggtggagcagcggagagccggcggctacagccggaagtacgccagcaaagccaagaatctggcagacgatatggtgagaaacaccgctagagatctgctgtactacgccgtgacccaggatgccatgctgatcttcgccaacctgagccggggcttcggccggcagggcaagcggaccttcatggccgagagacagtacacacggatggaggactggctgaccgccaagctggcctacgagggcctgagcaagacctacctgtccaagacactggcccagtacacctccaagacatgcagcaactgtgggtttaccatcaccagcgccgactacgacagggtgctggagaagctgaagaagacagcaacaggctggatgaccacaattaacggcaaggagctgaaggtggagggccagattacctactacaacagatacaagagacagaacgtagtcaaggacctgtccgtcgagctggatagactgagcgaagaatctgtgaacaacgacatctcctcctggacaaagggcagaagcggagaagctctgagcctcctgaagaaaagattctcccatagacccgtgcaggagaagttcgtgtgcctgaactgcggcttcgagacacacgcagccgagcaagccgccctgaacatcgccagatcctggctgttcctgcggagccaggagtacaagaaataccagacaaacaagacaaccggcaacaccgataagagagccttcgtcgagacctggcagtccttttaccggaagaagcttaaggaggtgtggaaacctgccgtgcggtctggcggatctggcggaggctccagcctgggccccgtgagcttcaaggacgtggccgtgggcttcacccaggaggagtggaggcagctggagcccgcccagaggaggacctacagggaggtgatgctggagaactacagccacctggtggccgtgggctgccacttcatcaagcccgacgtgatcaccaagctggagaggggcgaggagccctggatcgagggcggcttcctgccccagggctgcgccgacgaggtgtggcaggccggcggcccaagcagcggcgcccctcctcccagcggcggcagcccagccggctccccaacctctaccgaggagggcacctctgagtccgccacccccgagagcggccctggcacctccaccgagcccagcgagggcagcgcacccggcagccctgccggcagccccacctccacagaggagggaaccagcaccgagcccagcgaaggcagcgccccaggcaccagcaccgagcctagtgagcaggagattaaacggatcaacaagatcagaagaagacttgtgaaagacagcaacaccaagaaggccggcaagacaggccccatgaaaaccctgctggttagagtgatgacacccgatctgagagagcggctggaaaacctgagaaagaagcctgaaaatatcccccagcccatcagcaatacatctagagccaacctgaataagctgctgaccgattacaccgaaatgaagaaggcgatcctgcatgtgtactgggaagagttccagaaggaccctgtgggcctgatgagccgggtggcccagcctgccagcaagaagatcgatcagaacaagctgaaacctgagatggacgagaagggcaacctgaccaccgccggctttgcctgctctcagtgtggccagcccctgttcgtgtacaagctggagcaggtgtctgagaagggcaaggcttacaccaactacttcggacggtgcaatgtggccgagcacgaaaagctgatcctgctggcccagctgaagcccgagaaggatagcgacgaagccgtgacatatagcctgggaaagtttgggcagagggccctggatttctacagcattcatgtgaccaaggagtccacccaccccgtgaagcccctggcccagatcgccggaaacagatacgcctccggacctgtgggaaaggccctgagcgacgcatgtatgggcacaatcgcctccttcctgtctaagtaccaggacatcatcatcgaacaccagaaggtggtgaagggcaaccagaagagactggagagcctgcgggagctggccggcaaggaaaacctggaataccctagcgtgaccctgccacctcagcctcacaccaaggagggcgttgatgcctacaacgaagtgatcgcccgggtgcgaatgtgggtgaacctgaacctgtggcagaagctgaagctaagcagagatgatgccaagcctctgctgagactgaagggattcccttcctttcctctggtcgagagacaggccaacgaagtggactggtgggacatggtgtgtaacgtgaagaagctgatcaacgagaaaaaggaggatggcaaggtgttttggcagaatctggctggctacaagagacaggaagccctgagaccatacctgagcagcgaggaagatcggaagaagggaaagaaattcgctcggtaccagctgggcgacctgctgctgcacctggaaaagaagcacggcgaggactggggaaaggtgtacgacgaggcctgggagcggattgacaagaaagtggaaggcctgagcaagcacatcaagctggaagaggaacggagaagcgaggacgcccagagcaaggccgccctgaccgactggctgcgggctaaggccagcttcgtgatcgagggcctgaaggaggccgacaaggacgagttctgcagatgcgagctgaagctgcagaagtggtacggggacctgcggggaaagcccttcgccatcgaagccgagaacagcatcctggacatcagcggcttcagcaagcagtacaactgtgccttcatctggcagaaggacggcgtgaagaagctgaacctgtacctgatcatcaactacttcaagggcggcaagctgcggttcaagaagatcaaacctgaagccttcgaagccaacagattctacaccgtgatcaacaaaaagagcggcgagatcgtgcccatggaggtgaacttcaacttcgacgaccccaacctgatcatcctgcctctggcctttggcaagagacagggcagagaattcatctggaacgacctgctgtccctggaaaccggcagcctgaagctggccaacggaagagtgatcgagaagacactgtacaacagaagaacccggcaggatgagcctgccctgttcgtggccctgaccttcgagcggcgggaggtcctggactcctccaatatcaaaccaatgaacctgatcggcgtggcaagaggcgaaaacatccccgccgtgatcgccctgaccgaccccgagggctgcccactgagccggtttaaggatagcctgggaaacccaacccacatcctgagaatcggcgagagctataaggagaagcagcggaccatccaggccaagaaggaggtggagcagcggagagccggcggctacagccggaagtacgccagcaaagccaagaatctggcagacgatatggtgagaaacaccgctagagatctgctgtactacgccgtgacccaggatgccatgctgatcttcgccaacctgagccggggcttcggccggcagggcaagcggaccttcatggccgagagacagtacacacggatggaggactggctgaccgccaagctggcctacgagggcctgagcaagacctacctgtccaagacactggcccagtacacctccaagacatgcagcaactgtgggtttaccatcaccagcgccgactacgacagggtgctggagaagctgaagaagacagcaacaggctggatgaccacaattaacggcaaggagctgaaggtggagggccagattacctactacaacagatacaagagacagaacgtagtcaaggacctgtccgtcgagctggatagactgagcgaagaatctgtgaacaacgacatctcctcctggacaaagggcagaagcggagaagctctgagcctcctgaagaaaagattctcccatagacccgtgcaggagaagttcgtgtgcctgaactgcggcttcgagacacacgcagccgagcaagccgccctgaacatcgccagatcctggctgttcctgcggagccaggagtacaagaaataccagacaaacaagacaaccggcaacaccgataagagagccttcgtcgagacctggcagtccttttaccggaagaagcttaaggaggtgtggaaacctgccgtgcggtctggcggatctggcggaggctcctagcctgggccccgtgagcttcaaggacgtggccgtgggcttcacccaggaggagtggaggcagctggagcccgcccagaggaggacctacagggaggtgatgctggagaactacagccacctggtggccgtgggctgccacttcatcaagcccgacgtgatcaccaagctggagaggggcgaggagccctggatcgagggcggcttcctgccccagggctgcgccgacgaggtgtggcaggccggatctggctccggcagcggccccaagaaaaagagaaaagtctaagctgccttctgcggggcttgccttctggccatgcccttcttctctcccttgcacctgtacctcttggtctttgaataaagcctgagtaggaaggctagcaaaaaaaaaaaaaaaaaaaaaaaaaaaaaaaaaaaaaaaaaaaaaaaaaaaaaaaaaaaaaaaaaaaaaaaaaaaaaaaa

SEQ ID NO: 16672 - RNA, 9485 nt, synthetic construct
  source 1..9485: mol_type = other RNA
aggaaataagagagaaaagaagagtaagaagaaatataagagccaccatggcccctaagaagaagcgtaaagtgagccggatggaacgcctcgtctacgaggtgcggcagaagtgcagaaacatcgaggacatctgcatctcctgcggatctctgaacgtgaccctggagcacccactgttcatcggcggcatgtgccagaactgtaaaaactgttttctggagtgtgcctatcaatacgacgatgacggctaccagagctactgcaccatctgttgcggcggaagagaggtgctgatgtgtggaaataacaactgctgccggtgcttctgcgtggaatgcgtggacctgctggtgggccccggcgccgcccaggccgctattaaggaagatccttggaactgctacatgtgcggccacaagggcacatacggcctgctgagacggagagaggactggcctagcagactgcagatgttcttcgccaataaccacgaccaggagttcgacccccctaaggtgtaccctcccgtccccgccgagaagagaaagcccatccgggtcctgagcctgttcgatggcatcgccaccggtctgctggtgctgaaggacctgggcatccaggtggataggtacattgcctccgaggtgtgcgaggactccatcaccgtgggaatggtgcgtcatcagggcaagatcatgtacgtgggcgacgtgcggagcgtgacacagaagcatatccaggagtggggccctttcgacctggtgatcggcggcagcccttgcaatgacctgagcatcgtgaacccagcccggaagggcctgtacgagggaaccggcagactgttcttcgagttttacagactgctgcacgacgcccggcctaaggaaggcgacgaccggcccttcttttggctgttcgagaatgtggtggccatgggagtcagcgacaagcgggatattagccggttcctggagagcaaccccgtgatgatcgatgccaaggaagtgagcgccgcccaccgggccagatacttctggggcaatctgcctggcatgaacagacccctggccagcaccgtgaacgacaagctggagctgcaggagtgcctggagcacggccggatcgccaagttcagcaaggtgagaaccatcaccacccgaagcaacagcatcaaacaaggcaaggaccagcactttcctgtgttcatgaacgagaaggaggacatcctgtggtgtaccgagatggagagagtgttcgggttcccagtccactacacagatgtcagcaacatgtctagactggccagacagagactgctgggaagaagctggtccgtccctgtgatcagacacctgttcgcccctctgaaggagtacttcgcctgcgtgagcagcggcaacagcaacgccaacagccggggccccagcttctctagcggcctggtgccactgtccctgagagggagccacatgggccccatggagatctacaaaaccgtgagcgcctggaagcggcagcctgtgcgcgtgctgagcctgtttcggaatatcgataaagtcctgaaaagcctgggattcctggagagcggctctggctccggcggtggcaccctgaagtacgtggaggatgtgacaaacgtggtcagacgggatgtggagaagtggggccccttcgatctggtgtacggcagcacccaacccctgggcagctcttgtgaccggtgccctggctggtacatgtttcagttccaccggatcctgcagtacgccctgccgagacaggagtcccagcggccattcttttggattttcatggacaacttgctgctgaccgaggatgaccaggaaactaccactcggttcctgcagaccgaagccgtgaccctgcaggacgtgagaggccgggactaccagaacgccatgcgggtgtggtccaacatccctggactgaaaagcaagcacgcacctctgacccctaaagaagaggagtacctgcaggcccaggtgcggagcagaagcaagctggacgcccctaaggtggatctgctggtgaagaattgcctcctgcccctgagagagtacttcaagtatttcagccagaatagtctgcccctgggaggcagcggcggcggcgccctggtgacatttgaggacgtcgccgtgcggttcacccaggaggaatgggctctgctggatccttctcagaaaatcctgtaccgggacgtgatgagagagacataccggaatctgacctccgtgggcatcaactgggaatgttgggaccttgaagcctgcttcagaagcctgggaagaaacctgagagtgcaggtggtgaagagaaagtgcgagctgaccaacagcggcccctgcgccgagggcggcccaagcagcggcgcccctcctcccagcggcggcagcccagccggctccccaacctctaccgaggagggcacctctgagtccgccacccccgagagcggccctggcacctccaccgagcccagcgagggcagcgcacccggcagccctgccggcagccccacctccacagaggagggaaccagcaccgagcccagcgaaggcagcgccccaggcaccagcaccgagcctagtgagcaggagattaaacggatcaacaagatcagaagaagacttgtgaaagacagcaacaccaagaaggccggcaagacaggccccatgaaaaccctgctggttagagtgatgacacccgatctgagagagcggctggaaaacctgagaaagaagcctgaaaatatcccccagcccatcagcaatacatctagagccaacctgaataagctgctgaccgattacaccgaaatgaagaaggcgatcctgcatgtgtactgggaagagttccagaaggaccctgtgggcctgatgagccgggtggcccagcctgccagcaagaagatcgatcagaacaagctgaaacctgagatggacgagaagggcaacctgaccaccgccggctttgcctgctctcagtgtggccagcccctgttcgtgtacaagctggagcaggtgtctgagaagggcaaggcttacaccaactacttcggacggtgcaatgtggccgagcacgaaaagctgatcctgctggcccagctgaagcccgagaaggatagcgacgaagccgtgacatatagcctgggaaagtttgggcagagggccctggatttctacagcattcatgtgaccaaggagtccacccaccccgtgaagcccctggcccagatcgccggaaacagatacgcctccggacctgtgggaaaggccctgagcgacgcatgtatgggcacaatcgcctccttcctgtctaagtaccaggacatcatcatcgaacaccagaaggtggtgaagggcaaccagaagagactggagagcctgcgggagctggccggcaaggaaaacctggaataccctagcgtgaccctgccacctcagcctcacaccaaggagggcgttgatgcctacaacgaagtgatcgcccgggtgcgaatgtgggtgaacctgaacctgtggcagaagctgaagctaagcagagatgatgccaagcctctgctgagactgaagggattcccttcctttcctctggtcgagagacaggccaacgaagtggactggtgggacatggtgtgtaacgtgaagaagctgatcaacgagaaaaaggaggatggcaaggtgttttggcagaatctggctggctacaagagacaggaagccctgagaccatacctgagcagcgaggaagatcggaagaagggaaagaaattcgctcggtaccagctgggcgacctgctgctgcacctggaaaagaagcacggcgaggactggggaaaggtgtacgacgaggcctgggagcggattgacaagaaagtggaaggcctgagcaagcacatcaagctggaagaggaacggagaagcgaggacgcccagagcaaggccgccctgaccgactggctgcgggctaaggccagcttcgtgatcgagggcctgaaggaggccgacaaggacgagttctgcagatgcgagctgaagctgcagaagtggtacggggacctgcggggaaagcccttcgccatcgaagccgagaacagcatcctggacatcagcggcttcagcaagcagtacaactgtgccttcatctggcagaaggacggcgtgaagaagctgaacctgtacctgatcatcaactacttcaagggcggcaagctgcggttcaagaagatcaaacctgaagccttcgaagccaacagattctacaccgtgatcaacaaaaagagcggcgagatcgtgcccatggaggtgaacttcaacttcgacgaccccaacctgatcatcctgcctctggcctttggcaagagacagggcagagaattcatctggaacgacctgctgtccctggaaaccggcagcctgaagctggccaacggaagagtgatcgagaagacactgtacaacagaagaacccggcaggatgagcctgccctgttcgtggccctgaccttcgagcggcgggaggtcctggactcctccaatatcaaaccaatgaacctgatcggcgtggcaagaggcgaaaacatccccgccgtgatcgccctgaccgaccccgagggctgcccactgagccggtttaaggatagcctgggaaacccaacccacatcctgagaatcggcgagagctataaggagaagcagcggaccatccaggccaagaaggaggtggagcagcggagagccggcggctacagccggaagtacgccagcaaagccaagaatctggcagacgatatggtgagaaacaccgctagagatctgctgtactacgccgtgacccaggatgccatgctgatcttcgccaacctgagccggggcttcggccggcagggcaagcggaccttcatggccgagagacagtacacacggatggaggactggctgaccgccaagctggcctacgagggcctgagcaagacctacctgtccaagacactggcccagtacacctccaagacatgcagcaactgtgggtttaccatcaccagcgccgactacgacagggtgctggagaagctgaagaagacagcaacaggctggatgaccacaattaacggcaaggagctgaaggtggagggccagattacctactacaacagatacaagagacagaacgtagtcaaggacctgtccgtcgagctggatagactgagcgaagaatctgtgaacaacgacatctcctcctggacaaagggcagaagcggagaagctctgagcctcctgaagaaaagattctcccatagacccgtgcaggagaagttcgtgtgcctgaactgcggcttcgagacacacgcagccgagcaagccgccctgaacatcgccagatcctggctgttcctgcggagccaggagtacaagaaataccagacaaacaagacaaccggcaacaccgataagagagccttcgtcgagacctggcagtccttttaccggaagaagcttaaggaggtgtggaaacctgccgtgcggtctggcggatctggcggaggctccaccctgggcctgctgagcttcaacgacgtgagcctggagttcagctgggaggagtggcagctgctggacagcgcccagaggtacctgtacagggaggtgatcctggagaactacagcaacctgctgagcgtgggctaccacggcaccaagcccgacctgatcttcaggctggagcagggcgaggagccctggatcctgaacgccaagatgagcacccagaactgccccgaggtgtgggaggacggcggcccaagcagcggcgcccctcctcccagcggcggcagcccagccggctccccaacctctaccgaggagggcacctctgagtccgccacccccgagagcggccctggcacctccaccgagcccagcgagggcagcgcacccggcagccctgccggcagccccacctccacagaggagggaaccagcaccgagcccagcgaaggcagcgccccaggcaccagcaccgagcctagtgagcaggagattaaacggatcaacaagatcagaagaagacttgtgaaagacagcaacaccaagaaggccggcaagacaggccccatgaaaaccctgctggttagagtgatgacacccgatctgagagagcggctggaaaacctgagaaagaagcctgaaaatatcccccagcccatcagcaatacatctagagccaacctgaataagctgctgaccgattacaccgaaatgaagaaggcgatcctgcatgtgtactgggaagagttccagaaggaccctgtgggcctgatgagccgggtggcccagcctgccagcaagaagatcgatcagaacaagctgaaacctgagatggacgagaagggcaacctgaccaccgccggctttgcctgctctcagtgtggccagcccctgttcgtgtacaagctggagcaggtgtctgagaagggcaaggcttacaccaactacttcggacggtgcaatgtggccgagcacgaaaagctgatcctgctggcccagctgaagcccgagaaggatagcgacgaagccgtgacatatagcctgggaaagtttgggcagagggccctggatttctacagcattcatgtgaccaaggagtccacccaccccgtgaagcccctggcccagatcgccggaaacagatacgcctccggacctgtgggaaaggccctgagcgacgcatgtatgggcacaatcgcctccttcctgtctaagtaccaggacatcatcatcgaacaccagaaggtggtgaagggcaaccagaagagactggagagcctgcgggagctggccggcaaggaaaacctggaataccctagcgtgaccctgccacctcagcctcacaccaaggagggcgttgatgcctacaacgaagtgatcgcccgggtgcgaatgtgggtgaacctgaacctgtggcagaagctgaagctaagcagagatgatgccaagcctctgctgagactgaagggattcccttcctttcctctggtcgagagacaggccaacgaagtggactggtgggacatggtgtgtaacgtgaagaagctgatcaacgagaaaaaggaggatggcaaggtgttttggcagaatctggctggctacaagagacaggaagccctgagaccatacctgagcagcgaggaagatcggaagaagggaaagaaattcgctcggtaccagctgggcgacctgctgctgcacctggaaaagaagcacggcgaggactggggaaaggtgtacgacgaggcctgggagcggattgacaagaaagtggaaggcctgagcaagcacatcaagctggaagaggaacggagaagcgaggacgcccagagcaaggccgccctgaccgactggctgcgggctaaggccagcttcgtgatcgagggcctgaaggaggccgacaaggacgagttctgcagatgcgagctgaagctgcagaagtggtacggggacctgcggggaaagcccttcgccatcgaagccgagaacagcatcctggacatcagcggcttcagcaagcagtacaactgtgccttcatctggcagaaggacggcgtgaagaagctgaacctgtacctgatcatcaactacttcaagggcggcaagctgcggttcaagaagatcaaacctgaagccttcgaagccaacagattctacaccgtgatcaacaaaaagagcggcgagatcgtgcccatggaggtgaacttcaacttcgacgaccccaacctgatcatcctgcctctggcctttggcaagagacagggcagagaattcatctggaacgacctgctgtccctggaaaccggcagcctgaagctggccaacggaagagtgatcgagaagacactgtacaacagaagaacccggcaggatgagcctgccctgttcgtggccctgaccttcgagcggcgggaggtcctggactcctccaatatcaaaccaatgaacctgatcggcgtggcaagaggcgaaaacatccccgccgtgatcgccctgaccgaccccgagggctgcccactgagccggtttaaggatagcctgggaaacccaacccacatcctgagaatcggcgagagctataaggagaagcagcggaccatccaggccaagaaggaggtggagcagcggagagccggcggctacagccggaagtacgccagcaaagccaagaatctggcagacgatatggtgagaaacaccgctagagatctgctgtactacgccgtgacccaggatgccatgctgatcttcgccaacctgagccggggcttcggccggcagggcaagcggaccttcatggccgagagacagtacacacggatggaggactggctgaccgccaagctggcctacgagggcctgagcaagacctacctgtccaagacactggcccagtacacctccaagacatgcagcaactgtgggtttaccatcaccagcgccgactacgacagggtgctggagaagctgaagaagacagcaacaggctggatgaccacaattaacggcaaggagctgaaggtggagggccagattacctactacaacagatacaagagacagaacgtagtcaaggacctgtccgtcgagctggatagactgagcgaagaatctgtgaacaacgacatctcctcctggacaaagggcagaagcggagaagctctgagcctcctgaagaaaagattctcccatagacccgtgcaggagaagttcgtgtgcctgaactgcggcttcgagacacacgcagccgagcaagccgccctgaacatcgccagatcctggctgttcctgcggagccaggagtacaagaaataccagacaaacaagacaaccggcaacaccgataagagagccttcgtcgagacctggcagtccttttaccggaagaagcttaaggaggtgtggaaacctgccgtgcggtctggcggatctggcggaggctcctaccctgggcctgctgagcttcaacgacgtgagcctggagttcagctgggaggagtggcagctgctggacagcgcccagaggtacctgtacagggaggtgatcctggagaactacagcaacctgctgagcgtgggctaccacggcaccaagcccgacctgatcttcaggctggagcagggcgaggagccctggatcctgaacgccaagatgagcacccagaactgccccgaggtgtgggaggacggatctggctccggcagcggccccaagaaaaagagaaaagtctaagctgccttctgcggggcttgccttctggccatgcccttcttctctcccttgcacctgtacctcttggtctttgaataaagcctgagtaggaaggctagcaaaaaaaaaaaaaaaaaaaaaaaaaaaaaaaaaaaaaaaaaaaaaaaaaaaaaaaaaaaaaaaaaaaaaaaaaaaaaaaa

SEQ ID NO: 16673 - RNA, 9485 nt, synthetic construct
  source 1..9485: mol_type = other RNA
aggaaataagagagaaaagaagagtaagaagaaatataagagccaccatggcccctaagaagaagcgtaaagtgagccggatggaacgcctcgtctacgaggtgcggcagaagtgcagaaacatcgaggacatctgcatctcctgcggatctctgaacgtgaccctggagcacccactgttcatcggcggcatgtgccagaactgtaaaaactgttttctggagtgtgcctatcaatacgacgatgacggctaccagagctactgcaccatctgttgcggcggaagagaggtgctgatgtgtggaaataacaactgctgccggtgcttctgcgtggaatgcgtggacctgctggtgggccccggcgccgcccaggccgctattaaggaagatccttggaactgctacatgtgcggccacaagggcacatacggcctgctgagacggagagaggactggcctagcagactgcagatgttcttcgccaataaccacgaccaggagttcgacccccctaaggtgtaccctcccgtccccgccgagaagagaaagcccatccgggtcctgagcctgttcgatggcatcgccaccggtctgctggtgctgaaggacctgggcatccaggtggataggtacattgcctccgaggtgtgcgaggactccatcaccgtgggaatggtgcgtcatcagggcaagatcatgtacgtgggcgacgtgcggagcgtgacacagaagcatatccaggagtggggccctttcgacctggtgatcggcggcagcccttgcaatgacctgagcatcgtgaacccagcccggaagggcctgtacgagggaaccggcagactgttcttcgagttttacagactgctgcacgacgcccggcctaaggaaggcgacgaccggcccttcttttggctgttcgagaatgtggtggccatgggagtcagcgacaagcgggatattagccggttcctggagagcaaccccgtgatgatcgatgccaaggaagtgagcgccgcccaccgggccagatacttctggggcaatctgcctggcatgaacagacccctggccagcaccgtgaacgacaagctggagctgcaggagtgcctggagcacggccggatcgccaagttcagcaaggtgagaaccatcaccacccgaagcaacagcatcaaacaaggcaaggaccagcactttcctgtgttcatgaacgagaaggaggacatcctgtggtgtaccgagatggagagagtgttcgggttcccagtccactacacagatgtcagcaacatgtctagactggccagacagagactgctgggaagaagctggtccgtccctgtgatcagacacctgttcgcccctctgaaggagtacttcgcctgcgtgagcagcggcaacagcaacgccaacagccggggccccagcttctctagcggcctggtgccactgtccctgagagggagccacatgggccccatggagatctacaaaaccgtgagcgcctggaagcggcagcctgtgcgcgtgctgagcctgtttcggaatatcgataaagtcctgaaaagcctgggattcctggagagcggctctggctccggcggtggcaccctgaagtacgtggaggatgtgacaaacgtggtcagacgggatgtggagaagtggggccccttcgatctggtgtacggcagcacccaacccctgggcagctcttgtgaccggtgccctggctggtacatgtttcagttccaccggatcctgcagtacgccctgccgagacaggagtcccagcggccattcttttggattttcatggacaacttgctgctgaccgaggatgaccaggaaactaccactcggttcctgcagaccgaagccgtgaccctgcaggacgtgagaggccgggactaccagaacgccatgcgggtgtggtccaacatccctggactgaaaagcaagcacgcacctctgacccctaaagaagaggagtacctgcaggcccaggtgcggagcagaagcaagctggacgcccctaaggtggatctgctggtgaagaattgcctcctgcccctgagagagtacttcaagtatttcagccagaatagtctgcccctgggaggcagcggcggcggcgccctggtgacatttgaggacgtcgccgtgcggttcacccaggaggaatgggctctgctggatccttctcagaaaatcctgtaccgggacgtgatgagagagacataccggaatctgacctccgtgggcatcaactgggaatgttgggaccttgaagcctgcttcagaagcctgggaagaaacctgagagtgcaggtggtgaagagaaagtgcgagctgaccaacagcggcccctgcgccgagggcggcccaagcagcggcgcccctcctcccagcggcggcagcccagccggctccccaacctctaccgaggagggcacctctgagtccgccacccccgagagcggccctggcacctccaccgagcccagcgagggcagcgcacccggcagccctgccggcagccccacctccacagaggagggaaccagcaccgagcccagcgaaggcagcgccccaggcaccagcaccgagcctagtgagcaggagattaaacggatcaacaagatcagaagaagacttgtgaaagacagcaacaccaagaaggccggcaagacaggccccatgaaaaccctgctggttagagtgatgacacccgatctgagagagcggctggaaaacctgagaaagaagcctgaaaatatcccccagcccatcagcaatacatctagagccaacctgaataagctgctgaccgattacaccgaaatgaagaaggcgatcctgcatgtgtactgggaagagttccagaaggaccctgtgggcctgatgagccgggtggcccagcctgccagcaagaagatcgatcagaacaagctgaaacctgagatggacgagaagggcaacctgaccaccgccggctttgcctgctctcagtgtggccagcccctgttcgtgtacaagctggagcaggtgtctgagaagggcaaggcttacaccaactacttcggacggtgcaatgtggccgagcacgaaaagctgatcctgctggcccagctgaagcccgagaaggatagcgacgaagccgtgacatatagcctgggaaagtttgggcagagggccctggatttctacagcattcatgtgaccaaggagtccacccaccccgtgaagcccctggcccagatcgccggaaacagatacgcctccggacctgtgggaaaggccctgagcgacgcatgtatgggcacaatcgcctccttcctgtctaagtaccaggacatcatcatcgaacaccagaaggtggtgaagggcaaccagaagagactggagagcctgcgggagctggccggcaaggaaaacctggaataccctagcgtgaccctgccacctcagcctcacaccaaggagggcgttgatgcctacaacgaagtgatcgcccgggtgcgaatgtgggtgaacctgaacctgtggcagaagctgaagctaagcagagatgatgccaagcctctgctgagactgaagggattcccttcctttcctctggtcgagagacaggccaacgaagtggactggtgggacatggtgtgtaacgtgaagaagctgatcaacgagaaaaaggaggatggcaaggtgttttggcagaatctggctggctacaagagacaggaagccctgagaccatacctgagcagcgaggaagatcggaagaagggaaagaaattcgctcggtaccagctgggcgacctgctgctgcacctggaaaagaagcacggcgaggactggggaaaggtgtacgacgaggcctgggagcggattgacaagaaagtggaaggcctgagcaagcacatcaagctggaagaggaacggagaagcgaggacgcccagagcaaggccgccctgaccgactggctgcgggctaaggccagcttcgtgatcgagggcctgaaggaggccgacaaggacgagttctgcagatgcgagctgaagctgcagaagtggtacggggacctgcggggaaagcccttcgccatcgaagccgagaacagcatcctggacatcagcggcttcagcaagcagtacaactgtgccttcatctggcagaaggacggcgtgaagaagctgaacctgtacctgatcatcaactacttcaagggcggcaagctgcggttcaagaagatcaaacctgaagccttcgaagccaacagattctacaccgtgatcaacaaaaagagcggcgagatcgtgcccatggaggtgaacttcaacttcgacgaccccaacctgatcatcctgcctctggcctttggcaagagacagggcagagaattcatctggaacgacctgctgtccctggaaaccggcagcctgaagctggccaacggaagagtgatcgagaagacactgtacaacagaagaacccggcaggatgagcctgccctgttcgtggccctgaccttcgagcggcgggaggtcctggactcctccaatatcaaaccaatgaacctgatcggcgtggcaagaggcgaaaacatccccgccgtgatcgccctgaccgaccccgagggctgcccactgagccggtttaaggatagcctgggaaacccaacccacatcctgagaatcggcgagagctataaggagaagcagcggaccatccaggccaagaaggaggtggagcagcggagagccggcggctacagccggaagtacgccagcaaagccaagaatctggcagacgatatggtgagaaacaccgctagagatctgctgtactacgccgtgacccaggatgccatgctgatcttcgccaacctgagccggggcttcggccggcagggcaagcggaccttcatggccgagagacagtacacacggatggaggactggctgaccgccaagctggcctacgagggcctgagcaagacctacctgtccaagacactggcccagtacacctccaagacatgcagcaactgtgggtttaccatcaccagcgccgactacgacagggtgctggagaagctgaagaagacagcaacaggctggatgaccacaattaacggcaaggagctgaaggtggagggccagattacctactacaacagatacaagagacagaacgtagtcaaggacctgtccgtcgagctggatagactgagcgaagaatctgtgaacaacgacatctcctcctggacaaagggcagaagcggagaagctctgagcctcctgaagaaaagattctcccatagacccgtgcaggagaagttcgtgtgcctgaactgcggcttcgagacacacgcagccgagcaagccgccctgaacatcgccagatcctggctgttcctgcggagccaggagtacaagaaataccagacaaacaagacaaccggcaacaccgataagagagccttcgtcgagacctggcagtccttttaccggaagaagcttaaggaggtgtggaaacctgccgtgcggtctggcggatctggcggaggctccgcccagggccacgtgaccttcgaggacgtggccgtgtacttcagctgggaggagtggggcctgctggacgaggcccagaggctgctgtacagggacgtgatgctggagaacttcagcctgatggccagcctgggcctggccagcagcatgacccacgagatcacccagctggagtggtggagggagcccttcctgcccccctgcggcgtgatgaccgccgccatgcccagggacggcaggcagggcggcccaagcagcggcgcccctcctcccagcggcggcagcccagccggctccccaacctctaccgaggagggcacctctgagtccgccacccccgagagcggccctggcacctccaccgagcccagcgagggcagcgcacccggcagccctgccggcagccccacctccacagaggagggaaccagcaccgagcccagcgaaggcagcgccccaggcaccagcaccgagcctagtgagcaggagattaaacggatcaacaagatcagaagaagacttgtgaaagacagcaacaccaagaaggccggcaagacaggccccatgaaaaccctgctggttagagtgatgacacccgatctgagagagcggctggaaaacctgagaaagaagcctgaaaatatcccccagcccatcagcaatacatctagagccaacctgaataagctgctgaccgattacaccgaaatgaagaaggcgatcctgcatgtgtactgggaagagttccagaaggaccctgtgggcctgatgagccgggtggcccagcctgccagcaagaagatcgatcagaacaagctgaaacctgagatggacgagaagggcaacctgaccaccgccggctttgcctgctctcagtgtggccagcccctgttcgtgtacaagctggagcaggtgtctgagaagggcaaggcttacaccaactacttcggacggtgcaatgtggccgagcacgaaaagctgatcctgctggcccagctgaagcccgagaaggatagcgacgaagccgtgacatatagcctgggaaagtttgggcagagggccctggatttctacagcattcatgtgaccaaggagtccacccaccccgtgaagcccctggcccagatcgccggaaacagatacgcctccggacctgtgggaaaggccctgagcgacgcatgtatgggcacaatcgcctccttcctgtctaagtaccaggacatcatcatcgaacaccagaaggtggtgaagggcaaccagaagagactggagagcctgcgggagctggccggcaaggaaaacctggaataccctagcgtgaccctgccacctcagcctcacaccaaggagggcgttgatgcctacaacgaagtgatcgcccgggtgcgaatgtgggtgaacctgaacctgtggcagaagctgaagctaagcagagatgatgccaagcctctgctgagactgaagggattcccttcctttcctctggtcgagagacaggccaacgaagtggactggtgggacatggtgtgtaacgtgaagaagctgatcaacgagaaaaaggaggatggcaaggtgttttggcagaatctggctggctacaagagacaggaagccctgagaccatacctgagcagcgaggaagatcggaagaagggaaagaaattcgctcggtaccagctgggcgacctgctgctgcacctggaaaagaagcacggcgaggactggggaaaggtgtacgacgaggcctgggagcggattgacaagaaagtggaaggcctgagcaagcacatcaagctggaagaggaacggagaagcgaggacgcccagagcaaggccgccctgaccgactggctgcgggctaaggccagcttcgtgatcgagggcctgaaggaggccgacaaggacgagttctgcagatgcgagctgaagctgcagaagtggtacggggacctgcggggaaagcccttcgccatcgaagccgagaacagcatcctggacatcagcggcttcagcaagcagtacaactgtgccttcatctggcagaaggacggcgtgaagaagctgaacctgtacctgatcatcaactacttcaagggcggcaagctgcggttcaagaagatcaaacctgaagccttcgaagccaacagattctacaccgtgatcaacaaaaagagcggcgagatcgtgcccatggaggtgaacttcaacttcgacgaccccaacctgatcatcctgcctctggcctttggcaagagacagggcagagaattcatctggaacgacctgctgtccctggaaaccggcagcctgaagctggccaacggaagagtgatcgagaagacactgtacaacagaagaacccggcaggatgagcctgccctgttcgtggccctgaccttcgagcggcgggaggtcctggactcctccaatatcaaaccaatgaacctgatcggcgtggcaagaggcgaaaacatccccgccgtgatcgccctgaccgaccccgagggctgcccactgagccggtttaaggatagcctgggaaacccaacccacatcctgagaatcggcgagagctataaggagaagcagcggaccatccaggccaagaaggaggtggagcagcggagagccggcggctacagccggaagtacgccagcaaagccaagaatctggcagacgatatggtgagaaacaccgctagagatctgctgtactacgccgtgacccaggatgccatgctgatcttcgccaacctgagccggggcttcggccggcagggcaagcggaccttcatggccgagagacagtacacacggatggaggactggctgaccgccaagctggcctacgagggcctgagcaagacctacctgtccaagacactggcccagtacacctccaagacatgcagcaactgtgggtttaccatcaccagcgccgactacgacagggtgctggagaagctgaagaagacagcaacaggctggatgaccacaattaacggcaaggagctgaaggtggagggccagattacctactacaacagatacaagagacagaacgtagtcaaggacctgtccgtcgagctggatagactgagcgaagaatctgtgaacaacgacatctcctcctggacaaagggcagaagcggagaagctctgagcctcctgaagaaaagattctcccatagacccgtgcaggagaagttcgtgtgcctgaactgcggcttcgagacacacgcagccgagcaagccgccctgaacatcgccagatcctggctgttcctgcggagccaggagtacaagaaataccagacaaacaagacaaccggcaacaccgataagagagccttcgtcgagacctggcagtccttttaccggaagaagcttaaggaggtgtggaaacctgccgtgcggtctggcggatctggcggaggctcctgcccagggccacgtgaccttcgaggacgtggccgtgtacttcagctgggaggagtggggcctgctggacgaggcccagaggctgctgtacagggacgtgatgctggagaacttcagcctgatggccagcctgggcctggccagcagcatgacccacgagatcacccagctggagtggtggagggagcccttcctgcccccctgcggcgtgatgaccgccgccatgcccagggacggcaggcagggatctggctccggcagcggccccaagaaaaagagaaaagtctaagctgccttctgcggggcttgccttctggccatgcccttcttctctcccttgcacctgtacctcttggtctttgaataaagcctgagtaggaaggctagcaaaaaaaaaaaaaaaaaaaaaaaaaaaaaaaaaaaaaaaaaaaaaaaaaaaaaaaaaaaaaaaaaaaaaaaaaaaaaaaa

SEQ ID NO: 16674 - RNA, 9485 nt, synthetic construct
  source 1..9485: mol_type = other RNA
aggaaataagagagaaaagaagagtaagaagaaatataagagccaccatggcccctaagaagaagcgtaaagtgagccggatggaacgcctcgtctacgaggtgcggcagaagtgcagaaacatcgaggacatctgcatctcctgcggatctctgaacgtgaccctggagcacccactgttcatcggcggcatgtgccagaactgtaaaaactgttttctggagtgtgcctatcaatacgacgatgacggctaccagagctactgcaccatctgttgcggcggaagagaggtgctgatgtgtggaaataacaactgctgccggtgcttctgcgtggaatgcgtggacctgctggtgggccccggcgccgcccaggccgctattaaggaagatccttggaactgctacatgtgcggccacaagggcacatacggcctgctgagacggagagaggactggcctagcagactgcagatgttcttcgccaataaccacgaccaggagttcgacccccctaaggtgtaccctcccgtccccgccgagaagagaaagcccatccgggtcctgagcctgttcgatggcatcgccaccggtctgctggtgctgaaggacctgggcatccaggtggataggtacattgcctccgaggtgtgcgaggactccatcaccgtgggaatggtgcgtcatcagggcaagatcatgtacgtgggcgacgtgcggagcgtgacacagaagcatatccaggagtggggccctttcgacctggtgatcggcggcagcccttgcaatgacctgagcatcgtgaacccagcccggaagggcctgtacgagggaaccggcagactgttcttcgagttttacagactgctgcacgacgcccggcctaaggaaggcgacgaccggcccttcttttggctgttcgagaatgtggtggccatgggagtcagcgacaagcgggatattagccggttcctggagagcaaccccgtgatgatcgatgccaaggaagtgagcgccgcccaccgggccagatacttctggggcaatctgcctggcatgaacagacccctggccagcaccgtgaacgacaagctggagctgcaggagtgcctggagcacggccggatcgccaagttcagcaaggtgagaaccatcaccacccgaagcaacagcatcaaacaaggcaaggaccagcactttcctgtgttcatgaacgagaaggaggacatcctgtggtgtaccgagatggagagagtgttcgggttcccagtccactacacagatgtcagcaacatgtctagactggccagacagagactgctgggaagaagctggtccgtccctgtgatcagacacctgttcgcccctctgaaggagtacttcgcctgcgtgagcagcggcaacagcaacgccaacagccggggccccagcttctctagcggcctggtgccactgtccctgagagggagccacatgggccccatggagatctacaaaaccgtgagcgcctggaagcggcagcctgtgcgcgtgctgagcctgtttcggaatatcgataaagtcctgaaaagcctgggattcctggagagcggctctggctccggcggtggcaccctgaagtacgtggaggatgtgacaaacgtggtcagacgggatgtggagaagtggggccccttcgatctggtgtacggcagcacccaacccctgggcagctcttgtgaccggtgccctggctggtacatgtttcagttccaccggatcctgcagtacgccctgccgagacaggagtcccagcggccattcttttggattttcatggacaacttgctgctgaccgaggatgaccaggaaactaccactcggttcctgcagaccgaagccgtgaccctgcaggacgtgagaggccgggactaccagaacgccatgcgggtgtggtccaacatccctggactgaaaagcaagcacgcacctctgacccctaaagaagaggagtacctgcaggcccaggtgcggagcagaagcaagctggacgcccctaaggtggatctgctggtgaagaattgcctcctgcccctgagagagtacttcaagtatttcagccagaatagtctgcccctgggaggcagcggcggcggcgccctggtgacatttgaggacgtcgccgtgcggttcacccaggaggaatgggctctgctggatccttctcagaaaatcctgtaccgggacgtgatgagagagacataccggaatctgacctccgtgggcatcaactgggaatgttgggaccttgaagcctgcttcagaagcctgggaagaaacctgagagtgcaggtggtgaagagaaagtgcgagctgaccaacagcggcccctgcgccgagggcggcccaagcagcggcgcccctcctcccagcggcggcagcccagccggctccccaacctctaccgaggagggcacctctgagtccgccacccccgagagcggccctggcacctccaccgagcccagcgagggcagcgcacccggcagccctgccggcagccccacctccacagaggagggaaccagcaccgagcccagcgaaggcagcgccccaggcaccagcaccgagcctagtgagcaggagattaaacggatcaacaagatcagaagaagacttgtgaaagacagcaacaccaagaaggccggcaagacaggccccatgaaaaccctgctggttagagtgatgacacccgatctgagagagcggctggaaaacctgagaaagaagcctgaaaatatcccccagcccatcagcaatacatctagagccaacctgaataagctgctgaccgattacaccgaaatgaagaaggcgatcctgcatgtgtactgggaagagttccagaaggaccctgtgggcctgatgagccgggtggcccagcctgccagcaagaagatcgatcagaacaagctgaaacctgagatggacgagaagggcaacctgaccaccgccggctttgcctgctctcagtgtggccagcccctgttcgtgtacaagctggagcaggtgtctgagaagggcaaggcttacaccaactacttcggacggtgcaatgtggccgagcacgaaaagctgatcctgctggcccagctgaagcccgagaaggatagcgacgaagccgtgacatatagcctgggaaagtttgggcagagggccctggatttctacagcattcatgtgaccaaggagtccacccaccccgtgaagcccctggcccagatcgccggaaacagatacgcctccggacctgtgggaaaggccctgagcgacgcatgtatgggcacaatcgcctccttcctgtctaagtaccaggacatcatcatcgaacaccagaaggtggtgaagggcaaccagaagagactggagagcctgcgggagctggccggcaaggaaaacctggaataccctagcgtgaccctgccacctcagcctcacaccaaggagggcgttgatgcctacaacgaagtgatcgcccgggtgcgaatgtgggtgaacctgaacctgtggcagaagctgaagctaagcagagatgatgccaagcctctgctgagactgaagggattcccttcctttcctctggtcgagagacaggccaacgaagtggactggtgggacatggtgtgtaacgtgaagaagctgatcaacgagaaaaaggaggatggcaaggtgttttggcagaatctggctggctacaagagacaggaagccctgagaccatacctgagcagcgaggaagatcggaagaagggaaagaaattcgctcggtaccagctgggcgacctgctgctgcacctggaaaagaagcacggcgaggactggggaaaggtgtacgacgaggcctgggagcggattgacaagaaagtggaaggcctgagcaagcacatcaagctggaagaggaacggagaagcgaggacgcccagagcaaggccgccctgaccgactggctgcgggctaaggccagcttcgtgatcgagggcctgaaggaggccgacaaggacgagttctgcagatgcgagctgaagctgcagaagtggtacggggacctgcggggaaagcccttcgccatcgaagccgagaacagcatcctggacatcagcggcttcagcaagcagtacaactgtgccttcatctggcagaaggacggcgtgaagaagctgaacctgtacctgatcatcaactacttcaagggcggcaagctgcggttcaagaagatcaaacctgaagccttcgaagccaacagattctacaccgtgatcaacaaaaagagcggcgagatcgtgcccatggaggtgaacttcaacttcgacgaccccaacctgatcatcctgcctctggcctttggcaagagacagggcagagaattcatctggaacgacctgctgtccctggaaaccggcagcctgaagctggccaacggaagagtgatcgagaagacactgtacaacagaagaacccggcaggatgagcctgccctgttcgtggccctgaccttcgagcggcgggaggtcctggactcctccaatatcaaaccaatgaacctgatcggcgtggcaagaggcgaaaacatccccgccgtgatcgccctgaccgaccccgagggctgcccactgagccggtttaaggatagcctgggaaacccaacccacatcctgagaatcggcgagagctataaggagaagcagcggaccatccaggccaagaaggaggtggagcagcggagagccggcggctacagccggaagtacgccagcaaagccaagaatctggcagacgatatggtgagaaacaccgctagagatctgctgtactacgccgtgacccaggatgccatgctgatcttcgccaacctgagccggggcttcggccggcagggcaagcggaccttcatggccgagagacagtacacacggatggaggactggctgaccgccaagctggcctacgagggcctgagcaagacctacctgtccaagacactggcccagtacacctccaagacatgcagcaactgtgggtttaccatcaccagcgccgactacgacagggtgctggagaagctgaagaagacagcaacaggctggatgaccacaattaacggcaaggagctgaaggtggagggccagattacctactacaacagatacaagagacagaacgtagtcaaggacctgtccgtcgagctggatagactgagcgaagaatctgtgaacaacgacatctcctcctggacaaagggcagaagcggagaagctctgagcctcctgaagaaaagattctcccatagacccgtgcaggagaagttcgtgtgcctgaactgcggcttcgagacacacgcagccgagcaagccgccctgaacatcgccagatcctggctgttcctgcggagccaggagtacaagaaataccagacaaacaagacaaccggcaacaccgataagagagccttcgtcgagacctggcagtccttttaccggaagaagcttaaggaggtgtggaaacctgccgtgcggtctggcggatctggcggaggctccatggcccccggcctgctgaccaccagggaggaggccctgatggccttcagggacgtggccgtggccttcacccagaaggagtggaagctgctgagcagcgcccagaggaccctgtacagggaggtgatgctggagaactacagccacctggtgagcctgggcatcgccttcagcaagcccaagctgatcgagcagctggagcagggcaacgagccctggagggaggagaacgagcacctgctgggcggcccaagcagcggcgcccctcctcccagcggcggcagcccagccggctccccaacctctaccgaggagggcacctctgagtccgccacccccgagagcggccctggcacctccaccgagcccagcgagggcagcgcacccggcagccctgccggcagccccacctccacagaggagggaaccagcaccgagcccagcgaaggcagcgccccaggcaccagcaccgagcctagtgagcaggagattaaacggatcaacaagatcagaagaagacttgtgaaagacagcaacaccaagaaggccggcaagacaggccccatgaaaaccctgctggttagagtgatgacacccgatctgagagagcggctggaaaacctgagaaagaagcctgaaaatatcccccagcccatcagcaatacatctagagccaacctgaataagctgctgaccgattacaccgaaatgaagaaggcgatcctgcatgtgtactgggaagagttccagaaggaccctgtgggcctgatgagccgggtggcccagcctgccagcaagaagatcgatcagaacaagctgaaacctgagatggacgagaagggcaacctgaccaccgccggctttgcctgctctcagtgtggccagcccctgttcgtgtacaagctggagcaggtgtctgagaagggcaaggcttacaccaactacttcggacggtgcaatgtggccgagcacgaaaagctgatcctgctggcccagctgaagcccgagaaggatagcgacgaagccgtgacatatagcctgggaaagtttgggcagagggccctggatttctacagcattcatgtgaccaaggagtccacccaccccgtgaagcccctggcccagatcgccggaaacagatacgcctccggacctgtgggaaaggccctgagcgacgcatgtatgggcacaatcgcctccttcctgtctaagtaccaggacatcatcatcgaacaccagaaggtggtgaagggcaaccagaagagactggagagcctgcgggagctggccggcaaggaaaacctggaataccctagcgtgaccctgccacctcagcctcacaccaaggagggcgttgatgcctacaacgaagtgatcgcccgggtgcgaatgtgggtgaacctgaacctgtggcagaagctgaagctaagcagagatgatgccaagcctctgctgagactgaagggattcccttcctttcctctggtcgagagacaggccaacgaagtggactggtgggacatggtgtgtaacgtgaagaagctgatcaacgagaaaaaggaggatggcaaggtgttttggcagaatctggctggctacaagagacaggaagccctgagaccatacctgagcagcgaggaagatcggaagaagggaaagaaattcgctcggtaccagctgggcgacctgctgctgcacctggaaaagaagcacggcgaggactggggaaaggtgtacgacgaggcctgggagcggattgacaagaaagtggaaggcctgagcaagcacatcaagctggaagaggaacggagaagcgaggacgcccagagcaaggccgccctgaccgactggctgcgggctaaggccagcttcgtgatcgagggcctgaaggaggccgacaaggacgagttctgcagatgcgagctgaagctgcagaagtggtacggggacctgcggggaaagcccttcgccatcgaagccgagaacagcatcctggacatcagcggcttcagcaagcagtacaactgtgccttcatctggcagaaggacggcgtgaagaagctgaacctgtacctgatcatcaactacttcaagggcggcaagctgcggttcaagaagatcaaacctgaagccttcgaagccaacagattctacaccgtgatcaacaaaaagagcggcgagatcgtgcccatggaggtgaacttcaacttcgacgaccccaacctgatcatcctgcctctggcctttggcaagagacagggcagagaattcatctggaacgacctgctgtccctggaaaccggcagcctgaagctggccaacggaagagtgatcgagaagacactgtacaacagaagaacccggcaggatgagcctgccctgttcgtggccctgaccttcgagcggcgggaggtcctggactcctccaatatcaaaccaatgaacctgatcggcgtggcaagaggcgaaaacatccccgccgtgatcgccctgaccgaccccgagggctgcccactgagccggtttaaggatagcctgggaaacccaacccacatcctgagaatcggcgagagctataaggagaagcagcggaccatccaggccaagaaggaggtggagcagcggagagccggcggctacagccggaagtacgccagcaaagccaagaatctggcagacgatatggtgagaaacaccgctagagatctgctgtactacgccgtgacccaggatgccatgctgatcttcgccaacctgagccggggcttcggccggcagggcaagcggaccttcatggccgagagacagtacacacggatggaggactggctgaccgccaagctggcctacgagggcctgagcaagacctacctgtccaagacactggcccagtacacctccaagacatgcagcaactgtgggtttaccatcaccagcgccgactacgacagggtgctggagaagctgaagaagacagcaacaggctggatgaccacaattaacggcaaggagctgaaggtggagggccagattacctactacaacagatacaagagacagaacgtagtcaaggacctgtccgtcgagctggatagactgagcgaagaatctgtgaacaacgacatctcctcctggacaaagggcagaagcggagaagctctgagcctcctgaagaaaagattctcccatagacccgtgcaggagaagttcgtgtgcctgaactgcggcttcgagacacacgcagccgagcaagccgccctgaacatcgccagatcctggctgttcctgcggagccaggagtacaagaaataccagacaaacaagacaaccggcaacaccgataagagagccttcgtcgagacctggcagtccttttaccggaagaagcttaaggaggtgtggaaacctgccgtgcggtctggcggatctggcggaggctcctatggcccccggcctgctgaccaccagggaggaggccctgatggccttcagggacgtggccgtggccttcacccagaaggagtggaagctgctgagcagcgcccagaggaccctgtacagggaggtgatgctggagaactacagccacctggtgagcctgggcatcgccttcagcaagcccaagctgatcgagcagctggagcagggcaacgagccctggagggaggagaacgagcacctgctgggatctggctccggcagcggccccaagaaaaagagaaaagtctaagctgccttctgcggggcttgccttctggccatgcccttcttctctcccttgcacctgtacctcttggtctttgaataaagcctgagtaggaaggctagcaaaaaaaaaaaaaaaaaaaaaaaaaaaaaaaaaaaaaaaaaaaaaaaaaaaaaaaaaaaaaaaaaaaaaaaaaaaaaaaa

SEQ ID NO: 16675 - RNA, 9485 nt, synthetic construct
  source 1..9485: mol_type = other RNA
aggaaataagagagaaaagaagagtaagaagaaatataagagccaccatggcccctaagaagaagcgtaaagtgagccggatggaacgcctcgtctacgaggtgcggcagaagtgcagaaacatcgaggacatctgcatctcctgcggatctctgaacgtgaccctggagcacccactgttcatcggcggcatgtgccagaactgtaaaaactgttttctggagtgtgcctatcaatacgacgatgacggctaccagagctactgcaccatctgttgcggcggaagagaggtgctgatgtgtggaaataacaactgctgccggtgcttctgcgtggaatgcgtggacctgctggtgggccccggcgccgcccaggccgctattaaggaagatccttggaactgctacatgtgcggccacaagggcacatacggcctgctgagacggagagaggactggcctagcagactgcagatgttcttcgccaataaccacgaccaggagttcgacccccctaaggtgtaccctcccgtccccgccgagaagagaaagcccatccgggtcctgagcctgttcgatggcatcgccaccggtctgctggtgctgaaggacctgggcatccaggtggataggtacattgcctccgaggtgtgcgaggactccatcaccgtgggaatggtgcgtcatcagggcaagatcatgtacgtgggcgacgtgcggagcgtgacacagaagcatatccaggagtggggccctttcgacctggtgatcggcggcagcccttgcaatgacctgagcatcgtgaacccagcccggaagggcctgtacgagggaaccggcagactgttcttcgagttttacagactgctgcacgacgcccggcctaaggaaggcgacgaccggcccttcttttggctgttcgagaatgtggtggccatgggagtcagcgacaagcgggatattagccggttcctggagagcaaccccgtgatgatcgatgccaaggaagtgagcgccgcccaccgggccagatacttctggggcaatctgcctggcatgaacagacccctggccagcaccgtgaacgacaagctggagctgcaggagtgcctggagcacggccggatcgccaagttcagcaaggtgagaaccatcaccacccgaagcaacagcatcaaacaaggcaaggaccagcactttcctgtgttcatgaacgagaaggaggacatcctgtggtgtaccgagatggagagagtgttcgggttcccagtccactacacagatgtcagcaacatgtctagactggccagacagagactgctgggaagaagctggtccgtccctgtgatcagacacctgttcgcccctctgaaggagtacttcgcctgcgtgagcagcggcaacagcaacgccaacagccggggccccagcttctctagcggcctggtgccactgtccctgagagggagccacatgggccccatggagatctacaaaaccgtgagcgcctggaagcggcagcctgtgcgcgtgctgagcctgtttcggaatatcgataaagtcctgaaaagcctgggattcctggagagcggctctggctccggcggtggcaccctgaagtacgtggaggatgtgacaaacgtggtcagacgggatgtggagaagtggggccccttcgatctggtgtacggcagcacccaacccctgggcagctcttgtgaccggtgccctggctggtacatgtttcagttccaccggatcctgcagtacgccctgccgagacaggagtcccagcggccattcttttggattttcatggacaacttgctgctgaccgaggatgaccaggaaactaccactcggttcctgcagaccgaagccgtgaccctgcaggacgtgagaggccgggactaccagaacgccatgcgggtgtggtccaacatccctggactgaaaagcaagcacgcacctctgacccctaaagaagaggagtacctgcaggcccaggtgcggagcagaagcaagctggacgcccctaaggtggatctgctggtgaagaattgcctcctgcccctgagagagtacttcaagtatttcagccagaatagtctgcccctgggaggcagcggcggcggcgccctggtgacatttgaggacgtcgccgtgcggttcacccaggaggaatgggctctgctggatccttctcagaaaatcctgtaccgggacgtgatgagagagacataccggaatctgacctccgtgggcatcaactgggaatgttgggaccttgaagcctgcttcagaagcctgggaagaaacctgagagtgcaggtggtgaagagaaagtgcgagctgaccaacagcggcccctgcgccgagggcggcccaagcagcggcgcccctcctcccagcggcggcagcccagccggctccccaacctctaccgaggagggcacctctgagtccgccacccccgagagcggccctggcacctccaccgagcccagcgagggcagcgcacccggcagccctgccggcagccccacctccacagaggagggaaccagcaccgagcccagcgaaggcagcgccccaggcaccagcaccgagcctagtgagcaggagattaaacggatcaacaagatcagaagaagacttgtgaaagacagcaacaccaagaaggccggcaagacaggccccatgaaaaccctgctggttagagtgatgacacccgatctgagagagcggctggaaaacctgagaaagaagcctgaaaatatcccccagcccatcagcaatacatctagagccaacctgaataagctgctgaccgattacaccgaaatgaagaaggcgatcctgcatgtgtactgggaagagttccagaaggaccctgtgggcctgatgagccgggtggcccagcctgccagcaagaagatcgatcagaacaagctgaaacctgagatggacgagaagggcaacctgaccaccgccggctttgcctgctctcagtgtggccagcccctgttcgtgtacaagctggagcaggtgtctgagaagggcaaggcttacaccaactacttcggacggtgcaatgtggccgagcacgaaaagctgatcctgctggcccagctgaagcccgagaaggatagcgacgaagccgtgacatatagcctgggaaagtttgggcagagggccctggatttctacagcattcatgtgaccaaggagtccacccaccccgtgaagcccctggcccagatcgccggaaacagatacgcctccggacctgtgggaaaggccctgagcgacgcatgtatgggcacaatcgcctccttcctgtctaagtaccaggacatcatcatcgaacaccagaaggtggtgaagggcaaccagaagagactggagagcctgcgggagctggccggcaaggaaaacctggaataccctagcgtgaccctgccacctcagcctcacaccaaggagggcgttgatgcctacaacgaagtgatcgcccgggtgcgaatgtgggtgaacctgaacctgtggcagaagctgaagctaagcagagatgatgccaagcctctgctgagactgaagggattcccttcctttcctctggtcgagagacaggccaacgaagtggactggtgggacatggtgtgtaacgtgaagaagctgatcaacgagaaaaaggaggatggcaaggtgttttggcagaatctggctggctacaagagacaggaagccctgagaccatacctgagcagcgaggaagatcggaagaagggaaagaaattcgctcggtaccagctgggcgacctgctgctgcacctggaaaagaagcacggcgaggactggggaaaggtgtacgacgaggcctgggagcggattgacaagaaagtggaaggcctgagcaagcacatcaagctggaagaggaacggagaagcgaggacgcccagagcaaggccgccctgaccgactggctgcgggctaaggccagcttcgtgatcgagggcctgaaggaggccgacaaggacgagttctgcagatgcgagctgaagctgcagaagtggtacggggacctgcggggaaagcccttcgccatcgaagccgagaacagcatcctggacatcagcggcttcagcaagcagtacaactgtgccttcatctggcagaaggacggcgtgaagaagctgaacctgtacctgatcatcaactacttcaagggcggcaagctgcggttcaagaagatcaaacctgaagccttcgaagccaacagattctacaccgtgatcaacaaaaagagcggcgagatcgtgcccatggaggtgaacttcaacttcgacgaccccaacctgatcatcctgcctctggcctttggcaagagacagggcagagaattcatctggaacgacctgctgtccctggaaaccggcagcctgaagctggccaacggaagagtgatcgagaagacactgtacaacagaagaacccggcaggatgagcctgccctgttcgtggccctgaccttcgagcggcgggaggtcctggactcctccaatatcaaaccaatgaacctgatcggcgtggcaagaggcgaaaacatccccgccgtgatcgccctgaccgaccccgagggctgcccactgagccggtttaaggatagcctgggaaacccaacccacatcctgagaatcggcgagagctataaggagaagcagcggaccatccaggccaagaaggaggtggagcagcggagagccggcggctacagccggaagtacgccagcaaagccaagaatctggcagacgatatggtgagaaacaccgctagagatctgctgtactacgccgtgacccaggatgccatgctgatcttcgccaacctgagccggggcttcggccggcagggcaagcggaccttcatggccgagagacagtacacacggatggaggactggctgaccgccaagctggcctacgagggcctgagcaagacctacctgtccaagacactggcccagtacacctccaagacatgcagcaactgtgggtttaccatcaccagcgccgactacgacagggtgctggagaagctgaagaagacagcaacaggctggatgaccacaattaacggcaaggagctgaaggtggagggccagattacctactacaacagatacaagagacagaacgtagtcaaggacctgtccgtcgagctggatagactgagcgaagaatctgtgaacaacgacatctcctcctggacaaagggcagaagcggagaagctctgagcctcctgaagaaaagattctcccatagacccgtgcaggagaagttcgtgtgcctgaactgcggcttcgagacacacgcagccgagcaagccgccctgaacatcgccagatcctggctgttcctgcggagccaggagtacaagaaataccagacaaacaagacaaccggcaacaccgataagagagccttcgtcgagacctggcagtccttttaccggaagaagcttaaggaggtgtggaaacctgccgtgcggtctggcggatctggcggaggctccaagccctgggccgtgaacttcgccgacgtggccgtgtacttcagccccgaggagtggaggtacctgaggcccgcccagagggccctgtacagggaggtgatgagggagacctacggcctgctggcctacctggacgtgggctgcgccaagcccgccctgatctgctgggtggaggaggagagcgaggtgtggggcccctgcgcccaggaccccgaggtggccatgtgcaggaccgaggtgcacggcggcccaagcagcggcgcccctcctcccagcggcggcagcccagccggctccccaacctctaccgaggagggcacctctgagtccgccacccccgagagcggccctggcacctccaccgagcccagcgagggcagcgcacccggcagccctgccggcagccccacctccacagaggagggaaccagcaccgagcccagcgaaggcagcgccccaggcaccagcaccgagcctagtgagcaggagattaaacggatcaacaagatcagaagaagacttgtgaaagacagcaacaccaagaaggccggcaagacaggccccatgaaaaccctgctggttagagtgatgacacccgatctgagagagcggctggaaaacctgagaaagaagcctgaaaatatcccccagcccatcagcaatacatctagagccaacctgaataagctgctgaccgattacaccgaaatgaagaaggcgatcctgcatgtgtactgggaagagttccagaaggaccctgtgggcctgatgagccgggtggcccagcctgccagcaagaagatcgatcagaacaagctgaaacctgagatggacgagaagggcaacctgaccaccgccggctttgcctgctctcagtgtggccagcccctgttcgtgtacaagctggagcaggtgtctgagaagggcaaggcttacaccaactacttcggacggtgcaatgtggccgagcacgaaaagctgatcctgctggcccagctgaagcccgagaaggatagcgacgaagccgtgacatatagcctgggaaagtttgggcagagggccctggatttctacagcattcatgtgaccaaggagtccacccaccccgtgaagcccctggcccagatcgccggaaacagatacgcctccggacctgtgggaaaggccctgagcgacgcatgtatgggcacaatcgcctccttcctgtctaagtaccaggacatcatcatcgaacaccagaaggtggtgaagggcaaccagaagagactggagagcctgcgggagctggccggcaaggaaaacctggaataccctagcgtgaccctgccacctcagcctcacaccaaggagggcgttgatgcctacaacgaagtgatcgcccgggtgcgaatgtgggtgaacctgaacctgtggcagaagctgaagctaagcagagatgatgccaagcctctgctgagactgaagggattcccttcctttcctctggtcgagagacaggccaacgaagtggactggtgggacatggtgtgtaacgtgaagaagctgatcaacgagaaaaaggaggatggcaaggtgttttggcagaatctggctggctacaagagacaggaagccctgagaccatacctgagcagcgaggaagatcggaagaagggaaagaaattcgctcggtaccagctgggcgacctgctgctgcacctggaaaagaagcacggcgaggactggggaaaggtgtacgacgaggcctgggagcggattgacaagaaagtggaaggcctgagcaagcacatcaagctggaagaggaacggagaagcgaggacgcccagagcaaggccgccctgaccgactggctgcgggctaaggccagcttcgtgatcgagggcctgaaggaggccgacaaggacgagttctgcagatgcgagctgaagctgcagaagtggtacggggacctgcggggaaagcccttcgccatcgaagccgagaacagcatcctggacatcagcggcttcagcaagcagtacaactgtgccttcatctggcagaaggacggcgtgaagaagctgaacctgtacctgatcatcaactacttcaagggcggcaagctgcggttcaagaagatcaaacctgaagccttcgaagccaacagattctacaccgtgatcaacaaaaagagcggcgagatcgtgcccatggaggtgaacttcaacttcgacgaccccaacctgatcatcctgcctctggcctttggcaagagacagggcagagaattcatctggaacgacctgctgtccctggaaaccggcagcctgaagctggccaacggaagagtgatcgagaagacactgtacaacagaagaacccggcaggatgagcctgccctgttcgtggccctgaccttcgagcggcgggaggtcctggactcctccaatatcaaaccaatgaacctgatcggcgtggcaagaggcgaaaacatccccgccgtgatcgccctgaccgaccccgagggctgcccactgagccggtttaaggatagcctgggaaacccaacccacatcctgagaatcggcgagagctataaggagaagcagcggaccatccaggccaagaaggaggtggagcagcggagagccggcggctacagccggaagtacgccagcaaagccaagaatctggcagacgatatggtgagaaacaccgctagagatctgctgtactacgccgtgacccaggatgccatgctgatcttcgccaacctgagccggggcttcggccggcagggcaagcggaccttcatggccgagagacagtacacacggatggaggactggctgaccgccaagctggcctacgagggcctgagcaagacctacctgtccaagacactggcccagtacacctccaagacatgcagcaactgtgggtttaccatcaccagcgccgactacgacagggtgctggagaagctgaagaagacagcaacaggctggatgaccacaattaacggcaaggagctgaaggtggagggccagattacctactacaacagatacaagagacagaacgtagtcaaggacctgtccgtcgagctggatagactgagcgaagaatctgtgaacaacgacatctcctcctggacaaagggcagaagcggagaagctctgagcctcctgaagaaaagattctcccatagacccgtgcaggagaagttcgtgtgcctgaactgcggcttcgagacacacgcagccgagcaagccgccctgaacatcgccagatcctggctgttcctgcggagccaggagtacaagaaataccagacaaacaagacaaccggcaacaccgataagagagccttcgtcgagacctggcagtccttttaccggaagaagcttaaggaggtgtggaaacctgccgtgcggtctggcggatctggcggaggctcctaagccctgggccgtgaacttcgccgacgtggccgtgtacttcagccccgaggagtggaggtacctgaggcccgcccagagggccctgtacagggaggtgatgagggagacctacggcctgctggcctacctggacgtgggctgcgccaagcccgccctgatctgctgggtggaggaggagagcgaggtgtggggcccctgcgcccaggaccccgaggtggccatgtgcaggaccgaggtgcacggatctggctccggcagcggccccaagaaaaagagaaaagtctaagctgccttctgcggggcttgccttctggccatgcccttcttctctcccttgcacctgtacctcttggtctttgaataaagcctgagtaggaaggctagcaaaaaaaaaaaaaaaaaaaaaaaaaaaaaaaaaaaaaaaaaaaaaaaaaaaaaaaaaaaaaaaaaaaaaaaaaaaaaaaa

SEQ ID NO: 16676 - RNA, 9485 nt, synthetic construct
  source 1..9485: mol_type = other RNA
aggaaataagagagaaaagaagagtaagaagaaatataagagccaccatggcccctaagaagaagcgtaaagtgagccggatggaacgcctcgtctacgaggtgcggcagaagtgcagaaacatcgaggacatctgcatctcctgcggatctctgaacgtgaccctggagcacccactgttcatcggcggcatgtgccagaactgtaaaaactgttttctggagtgtgcctatcaatacgacgatgacggctaccagagctactgcaccatctgttgcggcggaagagaggtgctgatgtgtggaaataacaactgctgccggtgcttctgcgtggaatgcgtggacctgctggtgggccccggcgccgcccaggccgctattaaggaagatccttggaactgctacatgtgcggccacaagggcacatacggcctgctgagacggagagaggactggcctagcagactgcagatgttcttcgccaataaccacgaccaggagttcgacccccctaaggtgtaccctcccgtccccgccgagaagagaaagcccatccgggtcctgagcctgttcgatggcatcgccaccggtctgctggtgctgaaggacctgggcatccaggtggataggtacattgcctccgaggtgtgcgaggactccatcaccgtgggaatggtgcgtcatcagggcaagatcatgtacgtgggcgacgtgcggagcgtgacacagaagcatatccaggagtggggccctttcgacctggtgatcggcggcagcccttgcaatgacctgagcatcgtgaacccagcccggaagggcctgtacgagggaaccggcagactgttcttcgagttttacagactgctgcacgacgcccggcctaaggaaggcgacgaccggcccttcttttggctgttcgagaatgtggtggccatgggagtcagcgacaagcgggatattagccggttcctggagagcaaccccgtgatgatcgatgccaaggaagtgagcgccgcccaccgggccagatacttctggggcaatctgcctggcatgaacagacccctggccagcaccgtgaacgacaagctggagctgcaggagtgcctggagcacggccggatcgccaagttcagcaaggtgagaaccatcaccacccgaagcaacagcatcaaacaaggcaaggaccagcactttcctgtgttcatgaacgagaaggaggacatcctgtggtgtaccgagatggagagagtgttcgggttcccagtccactacacagatgtcagcaacatgtctagactggccagacagagactgctgggaagaagctggtccgtccctgtgatcagacacctgttcgcccctctgaaggagtacttcgcctgcgtgagcagcggcaacagcaacgccaacagccggggccccagcttctctagcggcctggtgccactgtccctgagagggagccacatgggccccatggagatctacaaaaccgtgagcgcctggaagcggcagcctgtgcgcgtgctgagcctgtttcggaatatcgataaagtcctgaaaagcctgggattcctggagagcggctctggctccggcggtggcaccctgaagtacgtggaggatgtgacaaacgtggtcagacgggatgtggagaagtggggccccttcgatctggtgtacggcagcacccaacccctgggcagctcttgtgaccggtgccctggctggtacatgtttcagttccaccggatcctgcagtacgccctgccgagacaggagtcccagcggccattcttttggattttcatggacaacttgctgctgaccgaggatgaccaggaaactaccactcggttcctgcagaccgaagccgtgaccctgcaggacgtgagaggccgggactaccagaacgccatgcgggtgtggtccaacatccctggactgaaaagcaagcacgcacctctgacccctaaagaagaggagtacctgcaggcccaggtgcggagcagaagcaagctggacgcccctaaggtggatctgctggtgaagaattgcctcctgcccctgagagagtacttcaagtatttcagccagaatagtctgcccctgggaggcagcggcggcggcgccctggtgacatttgaggacgtcgccgtgcggttcacccaggaggaatgggctctgctggatccttctcagaaaatcctgtaccgggacgtgatgagagagacataccggaatctgacctccgtgggcatcaactgggaatgttgggaccttgaagcctgcttcagaagcctgggaagaaacctgagagtgcaggtggtgaagagaaagtgcgagctgaccaacagcggcccctgcgccgagggcggcccaagcagcggcgcccctcctcccagcggcggcagcccagccggctccccaacctctaccgaggagggcacctctgagtccgccacccccgagagcggccctggcacctccaccgagcccagcgagggcagcgcacccggcagccctgccggcagccccacctccacagaggagggaaccagcaccgagcccagcgaaggcagcgccccaggcaccagcaccgagcctagtgagcaggagattaaacggatcaacaagatcagaagaagacttgtgaaagacagcaacaccaagaaggccggcaagacaggccccatgaaaaccctgctggttagagtgatgacacccgatctgagagagcggctggaaaacctgagaaagaagcctgaaaatatcccccagcccatcagcaatacatctagagccaacctgaataagctgctgaccgattacaccgaaatgaagaaggcgatcctgcatgtgtactgggaagagttccagaaggaccctgtgggcctgatgagccgggtggcccagcctgccagcaagaagatcgatcagaacaagctgaaacctgagatggacgagaagggcaacctgaccaccgccggctttgcctgctctcagtgtggccagcccctgttcgtgtacaagctggagcaggtgtctgagaagggcaaggcttacaccaactacttcggacggtgcaatgtggccgagcacgaaaagctgatcctgctggcccagctgaagcccgagaaggatagcgacgaagccgtgacatatagcctgggaaagtttgggcagagggccctggatttctacagcattcatgtgaccaaggagtccacccaccccgtgaagcccctggcccagatcgccggaaacagatacgcctccggacctgtgggaaaggccctgagcgacgcatgtatgggcacaatcgcctccttcctgtctaagtaccaggacatcatcatcgaacaccagaaggtggtgaagggcaaccagaagagactggagagcctgcgggagctggccggcaaggaaaacctggaataccctagcgtgaccctgccacctcagcctcacaccaaggagggcgttgatgcctacaacgaagtgatcgcccgggtgcgaatgtgggtgaacctgaacctgtggcagaagctgaagctaagcagagatgatgccaagcctctgctgagactgaagggattcccttcctttcctctggtcgagagacaggccaacgaagtggactggtgggacatggtgtgtaacgtgaagaagctgatcaacgagaaaaaggaggatggcaaggtgttttggcagaatctggctggctacaagagacaggaagccctgagaccatacctgagcagcgaggaagatcggaagaagggaaagaaattcgctcggtaccagctgggcgacctgctgctgcacctggaaaagaagcacggcgaggactggggaaaggtgtacgacgaggcctgggagcggattgacaagaaagtggaaggcctgagcaagcacatcaagctggaagaggaacggagaagcgaggacgcccagagcaaggccgccctgaccgactggctgcgggctaaggccagcttcgtgatcgagggcctgaaggaggccgacaaggacgagttctgcagatgcgagctgaagctgcagaagtggtacggggacctgcggggaaagcccttcgccatcgaagccgagaacagcatcctggacatcagcggcttcagcaagcagtacaactgtgccttcatctggcagaaggacggcgtgaagaagctgaacctgtacctgatcatcaactacttcaagggcggcaagctgcggttcaagaagatcaaacctgaagccttcgaagccaacagattctacaccgtgatcaacaaaaagagcggcgagatcgtgcccatggaggtgaacttcaacttcgacgaccccaacctgatcatcctgcctctggcctttggcaagagacagggcagagaattcatctggaacgacctgctgtccctggaaaccggcagcctgaagctggccaacggaagagtgatcgagaagacactgtacaacagaagaacccggcaggatgagcctgccctgttcgtggccctgaccttcgagcggcgggaggtcctggactcctccaatatcaaaccaatgaacctgatcggcgtggcaagaggcgaaaacatccccgccgtgatcgccctgaccgaccccgagggctgcccactgagccggtttaaggatagcctgggaaacccaacccacatcctgagaatcggcgagagctataaggagaagcagcggaccatccaggccaagaaggaggtggagcagcggagagccggcggctacagccggaagtacgccagcaaagccaagaatctggcagacgatatggtgagaaacaccgctagagatctgctgtactacgccgtgacccaggatgccatgctgatcttcgccaacctgagccggggcttcggccggcagggcaagcggaccttcatggccgagagacagtacacacggatggaggactggctgaccgccaagctggcctacgagggcctgagcaagacctacctgtccaagacactggcccagtacacctccaagacatgcagcaactgtgggtttaccatcaccagcgccgactacgacagggtgctggagaagctgaagaagacagcaacaggctggatgaccacaattaacggcaaggagctgaaggtggagggccagattacctactacaacagatacaagagacagaacgtagtcaaggacctgtccgtcgagctggatagactgagcgaagaatctgtgaacaacgacatctcctcctggacaaagggcagaagcggagaagctctgagcctcctgaagaaaagattctcccatagacccgtgcaggagaagttcgtgtgcctgaactgcggcttcgagacacacgcagccgagcaagccgccctgaacatcgccagatcctggctgttcctgcggagccaggagtacaagaaataccagacaaacaagacaaccggcaacaccgataagagagccttcgtcgagacctggcagtccttttaccggaagaagcttaaggaggtgtggaaacctgccgtgcggtctggcggatctggcggaggctccagccagatccccctgaccttccaggacgtggccgtggacttcacctgggaggagtggggcctgctggagcccagccagaaggacatgtactgggacgtgatgctggagaactacgagaacttcgtgagcctgggcggcatccccgtgagcttccccgacgtgatcagccagatggagaggatcgaggccccctggatgaccgagaggggcgtgctggtgagcgccttcctggacagccccaacggcggcccaagcagcggcgcccctcctcccagcggcggcagcccagccggctccccaacctctaccgaggagggcacctctgagtccgccacccccgagagcggccctggcacctccaccgagcccagcgagggcagcgcacccggcagccctgccggcagccccacctccacagaggagggaaccagcaccgagcccagcgaaggcagcgccccaggcaccagcaccgagcctagtgagcaggagattaaacggatcaacaagatcagaagaagacttgtgaaagacagcaacaccaagaaggccggcaagacaggccccatgaaaaccctgctggttagagtgatgacacccgatctgagagagcggctggaaaacctgagaaagaagcctgaaaatatcccccagcccatcagcaatacatctagagccaacctgaataagctgctgaccgattacaccgaaatgaagaaggcgatcctgcatgtgtactgggaagagttccagaaggaccctgtgggcctgatgagccgggtggcccagcctgccagcaagaagatcgatcagaacaagctgaaacctgagatggacgagaagggcaacctgaccaccgccggctttgcctgctctcagtgtggccagcccctgttcgtgtacaagctggagcaggtgtctgagaagggcaaggcttacaccaactacttcggacggtgcaatgtggccgagcacgaaaagctgatcctgctggcccagctgaagcccgagaaggatagcgacgaagccgtgacatatagcctgggaaagtttgggcagagggccctggatttctacagcattcatgtgaccaaggagtccacccaccccgtgaagcccctggcccagatcgccggaaacagatacgcctccggacctgtgggaaaggccctgagcgacgcatgtatgggcacaatcgcctccttcctgtctaagtaccaggacatcatcatcgaacaccagaaggtggtgaagggcaaccagaagagactggagagcctgcgggagctggccggcaaggaaaacctggaataccctagcgtgaccctgccacctcagcctcacaccaaggagggcgttgatgcctacaacgaagtgatcgcccgggtgcgaatgtgggtgaacctgaacctgtggcagaagctgaagctaagcagagatgatgccaagcctctgctgagactgaagggattcccttcctttcctctggtcgagagacaggccaacgaagtggactggtgggacatggtgtgtaacgtgaagaagctgatcaacgagaaaaaggaggatggcaaggtgttttggcagaatctggctggctacaagagacaggaagccctgagaccatacctgagcagcgaggaagatcggaagaagggaaagaaattcgctcggtaccagctgggcgacctgctgctgcacctggaaaagaagcacggcgaggactggggaaaggtgtacgacgaggcctgggagcggattgacaagaaagtggaaggcctgagcaagcacatcaagctggaagaggaacggagaagcgaggacgcccagagcaaggccgccctgaccgactggctgcgggctaaggccagcttcgtgatcgagggcctgaaggaggccgacaaggacgagttctgcagatgcgagctgaagctgcagaagtggtacggggacctgcggggaaagcccttcgccatcgaagccgagaacagcatcctggacatcagcggcttcagcaagcagtacaactgtgccttcatctggcagaaggacggcgtgaagaagctgaacctgtacctgatcatcaactacttcaagggcggcaagctgcggttcaagaagatcaaacctgaagccttcgaagccaacagattctacaccgtgatcaacaaaaagagcggcgagatcgtgcccatggaggtgaacttcaacttcgacgaccccaacctgatcatcctgcctctggcctttggcaagagacagggcagagaattcatctggaacgacctgctgtccctggaaaccggcagcctgaagctggccaacggaagagtgatcgagaagacactgtacaacagaagaacccggcaggatgagcctgccctgttcgtggccctgaccttcgagcggcgggaggtcctggactcctccaatatcaaaccaatgaacctgatcggcgtggcaagaggcgaaaacatccccgccgtgatcgccctgaccgaccccgagggctgcccactgagccggtttaaggatagcctgggaaacccaacccacatcctgagaatcggcgagagctataaggagaagcagcggaccatccaggccaagaaggaggtggagcagcggagagccggcggctacagccggaagtacgccagcaaagccaagaatctggcagacgatatggtgagaaacaccgctagagatctgctgtactacgccgtgacccaggatgccatgctgatcttcgccaacctgagccggggcttcggccggcagggcaagcggaccttcatggccgagagacagtacacacggatggaggactggctgaccgccaagctggcctacgagggcctgagcaagacctacctgtccaagacactggcccagtacacctccaagacatgcagcaactgtgggtttaccatcaccagcgccgactacgacagggtgctggagaagctgaagaagacagcaacaggctggatgaccacaattaacggcaaggagctgaaggtggagggccagattacctactacaacagatacaagagacagaacgtagtcaaggacctgtccgtcgagctggatagactgagcgaagaatctgtgaacaacgacatctcctcctggacaaagggcagaagcggagaagctctgagcctcctgaagaaaagattctcccatagacccgtgcaggagaagttcgtgtgcctgaactgcggcttcgagacacacgcagccgagcaagccgccctgaacatcgccagatcctggctgttcctgcggagccaggagtacaagaaataccagacaaacaagacaaccggcaacaccgataagagagccttcgtcgagacctggcagtccttttaccggaagaagcttaaggaggtgtggaaacctgccgtgcggtctggcggatctggcggaggctcctagccagatccccctgaccttccaggacgtggccgtggacttcacctgggaggagtggggcctgctggagcccagccagaaggacatgtactgggacgtgatgctggagaactacgagaacttcgtgagcctgggcggcatccccgtgagcttccccgacgtgatcagccagatggagaggatcgaggccccctggatgaccgagaggggcgtgctggtgagcgccttcctggacagccccaacggatctggctccggcagcggccccaagaaaaagagaaaagtctaagctgccttctgcggggcttgccttctggccatgcccttcttctctcccttgcacctgtacctcttggtctttgaataaagcctgagtaggaaggctagcaaaaaaaaaaaaaaaaaaaaaaaaaaaaaaaaaaaaaaaaaaaaaaaaaaaaaaaaaaaaaaaaaaaaaaaaaaaaaaaa

SEQ ID NO: 16677 - RNA, 9485 nt, synthetic construct
  source 1..9485: mol_type = other RNA
aggaaataagagagaaaagaagagtaagaagaaatataagagccaccatggcccctaagaagaagcgtaaagtgagccggatggaacgcctcgtctacgaggtgcggcagaagtgcagaaacatcgaggacatctgcatctcctgcggatctctgaacgtgaccctggagcacccactgttcatcggcggcatgtgccagaactgtaaaaactgttttctggagtgtgcctatcaatacgacgatgacggctaccagagctactgcaccatctgttgcggcggaagagaggtgctgatgtgtggaaataacaactgctgccggtgcttctgcgtggaatgcgtggacctgctggtgggccccggcgccgcccaggccgctattaaggaagatccttggaactgctacatgtgcggccacaagggcacatacggcctgctgagacggagagaggactggcctagcagactgcagatgttcttcgccaataaccacgaccaggagttcgacccccctaaggtgtaccctcccgtccccgccgagaagagaaagcccatccgggtcctgagcctgttcgatggcatcgccaccggtctgctggtgctgaaggacctgggcatccaggtggataggtacattgcctccgaggtgtgcgaggactccatcaccgtgggaatggtgcgtcatcagggcaagatcatgtacgtgggcgacgtgcggagcgtgacacagaagcatatccaggagtggggccctttcgacctggtgatcggcggcagcccttgcaatgacctgagcatcgtgaacccagcccggaagggcctgtacgagggaaccggcagactgttcttcgagttttacagactgctgcacgacgcccggcctaaggaaggcgacgaccggcccttcttttggctgttcgagaatgtggtggccatgggagtcagcgacaagcgggatattagccggttcctggagagcaaccccgtgatgatcgatgccaaggaagtgagcgccgcccaccgggccagatacttctggggcaatctgcctggcatgaacagacccctggccagcaccgtgaacgacaagctggagctgcaggagtgcctggagcacggccggatcgccaagttcagcaaggtgagaaccatcaccacccgaagcaacagcatcaaacaaggcaaggaccagcactttcctgtgttcatgaacgagaaggaggacatcctgtggtgtaccgagatggagagagtgttcgggttcccagtccactacacagatgtcagcaacatgtctagactggccagacagagactgctgggaagaagctggtccgtccctgtgatcagacacctgttcgcccctctgaaggagtacttcgcctgcgtgagcagcggcaacagcaacgccaacagccggggccccagcttctctagcggcctggtgccactgtccctgagagggagccacatgggccccatggagatctacaaaaccgtgagcgcctggaagcggcagcctgtgcgcgtgctgagcctgtttcggaatatcgataaagtcctgaaaagcctgggattcctggagagcggctctggctccggcggtggcaccctgaagtacgtggaggatgtgacaaacgtggtcagacgggatgtggagaagtggggccccttcgatctggtgtacggcagcacccaacccctgggcagctcttgtgaccggtgccctggctggtacatgtttcagttccaccggatcctgcagtacgccctgccgagacaggagtcccagcggccattcttttggattttcatggacaacttgctgctgaccgaggatgaccaggaaactaccactcggttcctgcagaccgaagccgtgaccctgcaggacgtgagaggccgggactaccagaacgccatgcgggtgtggtccaacatccctggactgaaaagcaagcacgcacctctgacccctaaagaagaggagtacctgcaggcccaggtgcggagcagaagcaagctggacgcccctaaggtggatctgctggtgaagaattgcctcctgcccctgagagagtacttcaagtatttcagccagaatagtctgcccctgggaggcagcggcggcggcgccctggtgacatttgaggacgtcgccgtgcggttcacccaggaggaatgggctctgctggatccttctcagaaaatcctgtaccgggacgtgatgagagagacataccggaatctgacctccgtgggcatcaactgggaatgttgggaccttgaagcctgcttcagaagcctgggaagaaacctgagagtgcaggtggtgaagagaaagtgcgagctgaccaacagcggcccctgcgccgagggcggcccaagcagcggcgcccctcctcccagcggcggcagcccagccggctccccaacctctaccgaggagggcacctctgagtccgccacccccgagagcggccctggcacctccaccgagcccagcgagggcagcgcacccggcagccctgccggcagccccacctccacagaggagggaaccagcaccgagcccagcgaaggcagcgccccaggcaccagcaccgagcctagtgagcaggagattaaacggatcaacaagatcagaagaagacttgtgaaagacagcaacaccaagaaggccggcaagacaggccccatgaaaaccctgctggttagagtgatgacacccgatctgagagagcggctggaaaacctgagaaagaagcctgaaaatatcccccagcccatcagcaatacatctagagccaacctgaataagctgctgaccgattacaccgaaatgaagaaggcgatcctgcatgtgtactgggaagagttccagaaggaccctgtgggcctgatgagccgggtggcccagcctgccagcaagaagatcgatcagaacaagctgaaacctgagatggacgagaagggcaacctgaccaccgccggctttgcctgctctcagtgtggccagcccctgttcgtgtacaagctggagcaggtgtctgagaagggcaaggcttacaccaactacttcggacggtgcaatgtggccgagcacgaaaagctgatcctgctggcccagctgaagcccgagaaggatagcgacgaagccgtgacatatagcctgggaaagtttgggcagagggccctggatttctacagcattcatgtgaccaaggagtccacccaccccgtgaagcccctggcccagatcgccggaaacagatacgcctccggacctgtgggaaaggccctgagcgacgcatgtatgggcacaatcgcctccttcctgtctaagtaccaggacatcatcatcgaacaccagaaggtggtgaagggcaaccagaagagactggagagcctgcgggagctggccggcaaggaaaacctggaataccctagcgtgaccctgccacctcagcctcacaccaaggagggcgttgatgcctacaacgaagtgatcgcccgggtgcgaatgtgggtgaacctgaacctgtggcagaagctgaagctaagcagagatgatgccaagcctctgctgagactgaagggattcccttcctttcctctggtcgagagacaggccaacgaagtggactggtgggacatggtgtgtaacgtgaagaagctgatcaacgagaaaaaggaggatggcaaggtgttttggcagaatctggctggctacaagagacaggaagccctgagaccatacctgagcagcgaggaagatcggaagaagggaaagaaattcgctcggtaccagctgggcgacctgctgctgcacctggaaaagaagcacggcgaggactggggaaaggtgtacgacgaggcctgggagcggattgacaagaaagtggaaggcctgagcaagcacatcaagctggaagaggaacggagaagcgaggacgcccagagcaaggccgccctgaccgactggctgcgggctaaggccagcttcgtgatcgagggcctgaaggaggccgacaaggacgagttctgcagatgcgagctgaagctgcagaagtggtacggggacctgcggggaaagcccttcgccatcgaagccgagaacagcatcctggacatcagcggcttcagcaagcagtacaactgtgccttcatctggcagaaggacggcgtgaagaagctgaacctgtacctgatcatcaactacttcaagggcggcaagctgcggttcaagaagatcaaacctgaagccttcgaagccaacagattctacaccgtgatcaacaaaaagagcggcgagatcgtgcccatggaggtgaacttcaacttcgacgaccccaacctgatcatcctgcctctggcctttggcaagagacagggcagagaattcatctggaacgacctgctgtccctggaaaccggcagcctgaagctggccaacggaagagtgatcgagaagacactgtacaacagaagaacccggcaggatgagcctgccctgttcgtggccctgaccttcgagcggcgggaggtcctggactcctccaatatcaaaccaatgaacctgatcggcgtggcaagaggcgaaaacatccccgccgtgatcgccctgaccgaccccgagggctgcccactgagccggtttaaggatagcctgggaaacccaacccacatcctgagaatcggcgagagctataaggagaagcagcggaccatccaggccaagaaggaggtggagcagcggagagccggcggctacagccggaagtacgccagcaaagccaagaatctggcagacgatatggtgagaaacaccgctagagatctgctgtactacgccgtgacccaggatgccatgctgatcttcgccaacctgagccggggcttcggccggcagggcaagcggaccttcatggccgagagacagtacacacggatggaggactggctgaccgccaagctggcctacgagggcctgagcaagacctacctgtccaagacactggcccagtacacctccaagacatgcagcaactgtgggtttaccatcaccagcgccgactacgacagggtgctggagaagctgaagaagacagcaacaggctggatgaccacaattaacggcaaggagctgaaggtggagggccagattacctactacaacagatacaagagacagaacgtagtcaaggacctgtccgtcgagctggatagactgagcgaagaatctgtgaacaacgacatctcctcctggacaaagggcagaagcggagaagctctgagcctcctgaagaaaagattctcccatagacccgtgcaggagaagttcgtgtgcctgaactgcggcttcgagacacacgcagccgagcaagccgccctgaacatcgccagatcctggctgttcctgcggagccaggagtacaagaaataccagacaaacaagacaaccggcaacaccgataagagagccttcgtcgagacctggcagtccttttaccggaagaagcttaaggaggtgtggaaacctgccgtgcggtctggcggatctggcggaggctccttccaggaggccgtgaccttcaaggacgtggccgtggccttcaccgaggaggagctgggcctgctggacagcgcccagaggaagctgtacagggacgtgatgctggagaacttcaggaacctggtgagcgtgggccaccagagcttcaagcccgacatgatcagccagctggagagggaggagaagctgtggatgaaggagttccagacccagaggggcaagcacagcggcttcctgtgcttcggcggcccaagcagcggcgcccctcctcccagcggcggcagcccagccggctccccaacctctaccgaggagggcacctctgagtccgccacccccgagagcggccctggcacctccaccgagcccagcgagggcagcgcacccggcagccctgccggcagccccacctccacagaggagggaaccagcaccgagcccagcgaaggcagcgccccaggcaccagcaccgagcctagtgagcaggagattaaacggatcaacaagatcagaagaagacttgtgaaagacagcaacaccaagaaggccggcaagacaggccccatgaaaaccctgctggttagagtgatgacacccgatctgagagagcggctggaaaacctgagaaagaagcctgaaaatatcccccagcccatcagcaatacatctagagccaacctgaataagctgctgaccgattacaccgaaatgaagaaggcgatcctgcatgtgtactgggaagagttccagaaggaccctgtgggcctgatgagccgggtggcccagcctgccagcaagaagatcgatcagaacaagctgaaacctgagatggacgagaagggcaacctgaccaccgccggctttgcctgctctcagtgtggccagcccctgttcgtgtacaagctggagcaggtgtctgagaagggcaaggcttacaccaactacttcggacggtgcaatgtggccgagcacgaaaagctgatcctgctggcccagctgaagcccgagaaggatagcgacgaagccgtgacatatagcctgggaaagtttgggcagagggccctggatttctacagcattcatgtgaccaaggagtccacccaccccgtgaagcccctggcccagatcgccggaaacagatacgcctccggacctgtgggaaaggccctgagcgacgcatgtatgggcacaatcgcctccttcctgtctaagtaccaggacatcatcatcgaacaccagaaggtggtgaagggcaaccagaagagactggagagcctgcgggagctggccggcaaggaaaacctggaataccctagcgtgaccctgccacctcagcctcacaccaaggagggcgttgatgcctacaacgaagtgatcgcccgggtgcgaatgtgggtgaacctgaacctgtggcagaagctgaagctaagcagagatgatgccaagcctctgctgagactgaagggattcccttcctttcctctggtcgagagacaggccaacgaagtggactggtgggacatggtgtgtaacgtgaagaagctgatcaacgagaaaaaggaggatggcaaggtgttttggcagaatctggctggctacaagagacaggaagccctgagaccatacctgagcagcgaggaagatcggaagaagggaaagaaattcgctcggtaccagctgggcgacctgctgctgcacctggaaaagaagcacggcgaggactggggaaaggtgtacgacgaggcctgggagcggattgacaagaaagtggaaggcctgagcaagcacatcaagctggaagaggaacggagaagcgaggacgcccagagcaaggccgccctgaccgactggctgcgggctaaggccagcttcgtgatcgagggcctgaaggaggccgacaaggacgagttctgcagatgcgagctgaagctgcagaagtggtacggggacctgcggggaaagcccttcgccatcgaagccgagaacagcatcctggacatcagcggcttcagcaagcagtacaactgtgccttcatctggcagaaggacggcgtgaagaagctgaacctgtacctgatcatcaactacttcaagggcggcaagctgcggttcaagaagatcaaacctgaagccttcgaagccaacagattctacaccgtgatcaacaaaaagagcggcgagatcgtgcccatggaggtgaacttcaacttcgacgaccccaacctgatcatcctgcctctggcctttggcaagagacagggcagagaattcatctggaacgacctgctgtccctggaaaccggcagcctgaagctggccaacggaagagtgatcgagaagacactgtacaacagaagaacccggcaggatgagcctgccctgttcgtggccctgaccttcgagcggcgggaggtcctggactcctccaatatcaaaccaatgaacctgatcggcgtggcaagaggcgaaaacatccccgccgtgatcgccctgaccgaccccgagggctgcccactgagccggtttaaggatagcctgggaaacccaacccacatcctgagaatcggcgagagctataaggagaagcagcggaccatccaggccaagaaggaggtggagcagcggagagccggcggctacagccggaagtacgccagcaaagccaagaatctggcagacgatatggtgagaaacaccgctagagatctgctgtactacgccgtgacccaggatgccatgctgatcttcgccaacctgagccggggcttcggccggcagggcaagcggaccttcatggccgagagacagtacacacggatggaggactggctgaccgccaagctggcctacgagggcctgagcaagacctacctgtccaagacactggcccagtacacctccaagacatgcagcaactgtgggtttaccatcaccagcgccgactacgacagggtgctggagaagctgaagaagacagcaacaggctggatgaccacaattaacggcaaggagctgaaggtggagggccagattacctactacaacagatacaagagacagaacgtagtcaaggacctgtccgtcgagctggatagactgagcgaagaatctgtgaacaacgacatctcctcctggacaaagggcagaagcggagaagctctgagcctcctgaagaaaagattctcccatagacccgtgcaggagaagttcgtgtgcctgaactgcggcttcgagacacacgcagccgagcaagccgccctgaacatcgccagatcctggctgttcctgcggagccaggagtacaagaaataccagacaaacaagacaaccggcaacaccgataagagagccttcgtcgagacctggcagtccttttaccggaagaagcttaaggaggtgtggaaacctgccgtgcggtctggcggatctggcggaggctcctttccaggaggccgtgaccttcaaggacgtggccgtggccttcaccgaggaggagctgggcctgctggacagcgcccagaggaagctgtacagggacgtgatgctggagaacttcaggaacctggtgagcgtgggccaccagagcttcaagcccgacatgatcagccagctggagagggaggagaagctgtggatgaaggagttccagacccagaggggcaagcacagcggcttcctgtgcttcggatctggctccggcagcggccccaagaaaaagagaaaagtctaagctgccttctgcggggcttgccttctggccatgcccttcttctctcccttgcacctgtacctcttggtctttgaataaagcctgagtaggaaggctagcaaaaaaaaaaaaaaaaaaaaaaaaaaaaaaaaaaaaaaaaaaaaaaaaaaaaaaaaaaaaaaaaaaaaaaaaaaaaaaaa

SEQ ID NO: 16678 - RNA, 9485 nt, synthetic construct
  source 1..9485: mol_type = other RNA
aggaaataagagagaaaagaagagtaagaagaaatataagagccaccatggcccctaagaagaagcgtaaagtgagccggatggaacgcctcgtctacgaggtgcggcagaagtgcagaaacatcgaggacatctgcatctcctgcggatctctgaacgtgaccctggagcacccactgttcatcggcggcatgtgccagaactgtaaaaactgttttctggagtgtgcctatcaatacgacgatgacggctaccagagctactgcaccatctgttgcggcggaagagaggtgctgatgtgtggaaataacaactgctgccggtgcttctgcgtggaatgcgtggacctgctggtgggccccggcgccgcccaggccgctattaaggaagatccttggaactgctacatgtgcggccacaagggcacatacggcctgctgagacggagagaggactggcctagcagactgcagatgttcttcgccaataaccacgaccaggagttcgacccccctaaggtgtaccctcccgtccccgccgagaagagaaagcccatccgggtcctgagcctgttcgatggcatcgccaccggtctgctggtgctgaaggacctgggcatccaggtggataggtacattgcctccgaggtgtgcgaggactccatcaccgtgggaatggtgcgtcatcagggcaagatcatgtacgtgggcgacgtgcggagcgtgacacagaagcatatccaggagtggggccctttcgacctggtgatcggcggcagcccttgcaatgacctgagcatcgtgaacccagcccggaagggcctgtacgagggaaccggcagactgttcttcgagttttacagactgctgcacgacgcccggcctaaggaaggcgacgaccggcccttcttttggctgttcgagaatgtggtggccatgggagtcagcgacaagcgggatattagccggttcctggagagcaaccccgtgatgatcgatgccaaggaagtgagcgccgcccaccgggccagatacttctggggcaatctgcctggcatgaacagacccctggccagcaccgtgaacgacaagctggagctgcaggagtgcctggagcacggccggatcgccaagttcagcaaggtgagaaccatcaccacccgaagcaacagcatcaaacaaggcaaggaccagcactttcctgtgttcatgaacgagaaggaggacatcctgtggtgtaccgagatggagagagtgttcgggttcccagtccactacacagatgtcagcaacatgtctagactggccagacagagactgctgggaagaagctggtccgtccctgtgatcagacacctgttcgcccctctgaaggagtacttcgcctgcgtgagcagcggcaacagcaacgccaacagccggggccccagcttctctagcggcctggtgccactgtccctgagagggagccacatgggccccatggagatctacaaaaccgtgagcgcctggaagcggcagcctgtgcgcgtgctgagcctgtttcggaatatcgataaagtcctgaaaagcctgggattcctggagagcggctctggctccggcggtggcaccctgaagtacgtggaggatgtgacaaacgtggtcagacgggatgtggagaagtggggccccttcgatctggtgtacggcagcacccaacccctgggcagctcttgtgaccggtgccctggctggtacatgtttcagttccaccggatcctgcagtacgccctgccgagacaggagtcccagcggccattcttttggattttcatggacaacttgctgctgaccgaggatgaccaggaaactaccactcggttcctgcagaccgaagccgtgaccctgcaggacgtgagaggccgggactaccagaacgccatgcgggtgtggtccaacatccctggactgaaaagcaagcacgcacctctgacccctaaagaagaggagtacctgcaggcccaggtgcggagcagaagcaagctggacgcccctaaggtggatctgctggtgaagaattgcctcctgcccctgagagagtacttcaagtatttcagccagaatagtctgcccctgggaggcagcggcggcggcgccctggtgacatttgaggacgtcgccgtgcggttcacccaggaggaatgggctctgctggatccttctcagaaaatcctgtaccgggacgtgatgagagagacataccggaatctgacctccgtgggcatcaactgggaatgttgggaccttgaagcctgcttcagaagcctgggaagaaacctgagagtgcaggtggtgaagagaaagtgcgagctgaccaacagcggcccctgcgccgagggcggcccaagcagcggcgcccctcctcccagcggcggcagcccagccggctccccaacctctaccgaggagggcacctctgagtccgccacccccgagagcggccctggcacctccaccgagcccagcgagggcagcgcacccggcagccctgccggcagccccacctccacagaggagggaaccagcaccgagcccagcgaaggcagcgccccaggcaccagcaccgagcctagtgagcaggagattaaacggatcaacaagatcagaagaagacttgtgaaagacagcaacaccaagaaggccggcaagacaggccccatgaaaaccctgctggttagagtgatgacacccgatctgagagagcggctggaaaacctgagaaagaagcctgaaaatatcccccagcccatcagcaatacatctagagccaacctgaataagctgctgaccgattacaccgaaatgaagaaggcgatcctgcatgtgtactgggaagagttccagaaggaccctgtgggcctgatgagccgggtggcccagcctgccagcaagaagatcgatcagaacaagctgaaacctgagatggacgagaagggcaacctgaccaccgccggctttgcctgctctcagtgtggccagcccctgttcgtgtacaagctggagcaggtgtctgagaagggcaaggcttacaccaactacttcggacggtgcaatgtggccgagcacgaaaagctgatcctgctggcccagctgaagcccgagaaggatagcgacgaagccgtgacatatagcctgggaaagtttgggcagagggccctggatttctacagcattcatgtgaccaaggagtccacccaccccgtgaagcccctggcccagatcgccggaaacagatacgcctccggacctgtgggaaaggccctgagcgacgcatgtatgggcacaatcgcctccttcctgtctaagtaccaggacatcatcatcgaacaccagaaggtggtgaagggcaaccagaagagactggagagcctgcgggagctggccggcaaggaaaacctggaataccctagcgtgaccctgccacctcagcctcacaccaaggagggcgttgatgcctacaacgaagtgatcgcccgggtgcgaatgtgggtgaacctgaacctgtggcagaagctgaagctaagcagagatgatgccaagcctctgctgagactgaagggattcccttcctttcctctggtcgagagacaggccaacgaagtggactggtgggacatggtgtgtaacgtgaagaagctgatcaacgagaaaaaggaggatggcaaggtgttttggcagaatctggctggctacaagagacaggaagccctgagaccatacctgagcagcgaggaagatcggaagaagggaaagaaattcgctcggtaccagctgggcgacctgctgctgcacctggaaaagaagcacggcgaggactggggaaaggtgtacgacgaggcctgggagcggattgacaagaaagtggaaggcctgagcaagcacatcaagctggaagaggaacggagaagcgaggacgcccagagcaaggccgccctgaccgactggctgcgggctaaggccagcttcgtgatcgagggcctgaaggaggccgacaaggacgagttctgcagatgcgagctgaagctgcagaagtggtacggggacctgcggggaaagcccttcgccatcgaagccgagaacagcatcctggacatcagcggcttcagcaagcagtacaactgtgccttcatctggcagaaggacggcgtgaagaagctgaacctgtacctgatcatcaactacttcaagggcggcaagctgcggttcaagaagatcaaacctgaagccttcgaagccaacagattctacaccgtgatcaacaaaaagagcggcgagatcgtgcccatggaggtgaacttcaacttcgacgaccccaacctgatcatcctgcctctggcctttggcaagagacagggcagagaattcatctggaacgacctgctgtccctggaaaccggcagcctgaagctggccaacggaagagtgatcgagaagacactgtacaacagaagaacccggcaggatgagcctgccctgttcgtggccctgaccttcgagcggcgggaggtcctggactcctccaatatcaaaccaatgaacctgatcggcgtggcaagaggcgaaaacatccccgccgtgatcgccctgaccgaccccgagggctgcccactgagccggtttaaggatagcctgggaaacccaacccacatcctgagaatcggcgagagctataaggagaagcagcggaccatccaggccaagaaggaggtggagcagcggagagccggcggctacagccggaagtacgccagcaaagccaagaatctggcagacgatatggtgagaaacaccgctagagatctgctgtactacgccgtgacccaggatgccatgctgatcttcgccaacctgagccggggcttcggccggcagggcaagcggaccttcatggccgagagacagtacacacggatggaggactggctgaccgccaagctggcctacgagggcctgagcaagacctacctgtccaagacactggcccagtacacctccaagacatgcagcaactgtgggtttaccatcaccagcgccgactacgacagggtgctggagaagctgaagaagacagcaacaggctggatgaccacaattaacggcaaggagctgaaggtggagggccagattacctactacaacagatacaagagacagaacgtagtcaaggacctgtccgtcgagctggatagactgagcgaagaatctgtgaacaacgacatctcctcctggacaaagggcagaagcggagaagctctgagcctcctgaagaaaagattctcccatagacccgtgcaggagaagttcgtgtgcctgaactgcggcttcgagacacacgcagccgagcaagccgccctgaacatcgccagatcctggctgttcctgcggagccaggagtacaagaaataccagacaaacaagacaaccggcaacaccgataagagagccttcgtcgagacctggcagtccttttaccggaagaagcttaaggaggtgtggaaacctgccgtgcggtctggcggatctggcggaggctccagcctgggcagcgtgaccttcaccgacgtggccatcgacttcagccaggacgagtgggagtggctgaacctggcccagaggagcctgtacaagaaggtgatgctggagaactacaggaacctggtgagcgtgggcctgtgcatcagcaagcccgtggtgatcagcctgctggagcaggagaaggacccctgggtgatcaagggcggcatgaacaggggcctgtgccccgacctggagtgcgtgggcggcccaagcagcggcgcccctcctcccagcggcggcagcccagccggctccccaacctctaccgaggagggcacctctgagtccgccacccccgagagcggccctggcacctccaccgagcccagcgagggcagcgcacccggcagccctgccggcagccccacctccacagaggagggaaccagcaccgagcccagcgaaggcagcgccccaggcaccagcaccgagcctagtgagcaggagattaaacggatcaacaagatcagaagaagacttgtgaaagacagcaacaccaagaaggccggcaagacaggccccatgaaaaccctgctggttagagtgatgacacccgatctgagagagcggctggaaaacctgagaaagaagcctgaaaatatcccccagcccatcagcaatacatctagagccaacctgaataagctgctgaccgattacaccgaaatgaagaaggcgatcctgcatgtgtactgggaagagttccagaaggaccctgtgggcctgatgagccgggtggcccagcctgccagcaagaagatcgatcagaacaagctgaaacctgagatggacgagaagggcaacctgaccaccgccggctttgcctgctctcagtgtggccagcccctgttcgtgtacaagctggagcaggtgtctgagaagggcaaggcttacaccaactacttcggacggtgcaatgtggccgagcacgaaaagctgatcctgctggcccagctgaagcccgagaaggatagcgacgaagccgtgacatatagcctgggaaagtttgggcagagggccctggatttctacagcattcatgtgaccaaggagtccacccaccccgtgaagcccctggcccagatcgccggaaacagatacgcctccggacctgtgggaaaggccctgagcgacgcatgtatgggcacaatcgcctccttcctgtctaagtaccaggacatcatcatcgaacaccagaaggtggtgaagggcaaccagaagagactggagagcctgcgggagctggccggcaaggaaaacctggaataccctagcgtgaccctgccacctcagcctcacaccaaggagggcgttgatgcctacaacgaagtgatcgcccgggtgcgaatgtgggtgaacctgaacctgtggcagaagctgaagctaagcagagatgatgccaagcctctgctgagactgaagggattcccttcctttcctctggtcgagagacaggccaacgaagtggactggtgggacatggtgtgtaacgtgaagaagctgatcaacgagaaaaaggaggatggcaaggtgttttggcagaatctggctggctacaagagacaggaagccctgagaccatacctgagcagcgaggaagatcggaagaagggaaagaaattcgctcggtaccagctgggcgacctgctgctgcacctggaaaagaagcacggcgaggactggggaaaggtgtacgacgaggcctgggagcggattgacaagaaagtggaaggcctgagcaagcacatcaagctggaagaggaacggagaagcgaggacgcccagagcaaggccgccctgaccgactggctgcgggctaaggccagcttcgtgatcgagggcctgaaggaggccgacaaggacgagttctgcagatgcgagctgaagctgcagaagtggtacggggacctgcggggaaagcccttcgccatcgaagccgagaacagcatcctggacatcagcggcttcagcaagcagtacaactgtgccttcatctggcagaaggacggcgtgaagaagctgaacctgtacctgatcatcaactacttcaagggcggcaagctgcggttcaagaagatcaaacctgaagccttcgaagccaacagattctacaccgtgatcaacaaaaagagcggcgagatcgtgcccatggaggtgaacttcaacttcgacgaccccaacctgatcatcctgcctctggcctttggcaagagacagggcagagaattcatctggaacgacctgctgtccctggaaaccggcagcctgaagctggccaacggaagagtgatcgagaagacactgtacaacagaagaacccggcaggatgagcctgccctgttcgtggccctgaccttcgagcggcgggaggtcctggactcctccaatatcaaaccaatgaacctgatcggcgtggcaagaggcgaaaacatccccgccgtgatcgccctgaccgaccccgagggctgcccactgagccggtttaaggatagcctgggaaacccaacccacatcctgagaatcggcgagagctataaggagaagcagcggaccatccaggccaagaaggaggtggagcagcggagagccggcggctacagccggaagtacgccagcaaagccaagaatctggcagacgatatggtgagaaacaccgctagagatctgctgtactacgccgtgacccaggatgccatgctgatcttcgccaacctgagccggggcttcggccggcagggcaagcggaccttcatggccgagagacagtacacacggatggaggactggctgaccgccaagctggcctacgagggcctgagcaagacctacctgtccaagacactggcccagtacacctccaagacatgcagcaactgtgggtttaccatcaccagcgccgactacgacagggtgctggagaagctgaagaagacagcaacaggctggatgaccacaattaacggcaaggagctgaaggtggagggccagattacctactacaacagatacaagagacagaacgtagtcaaggacctgtccgtcgagctggatagactgagcgaagaatctgtgaacaacgacatctcctcctggacaaagggcagaagcggagaagctctgagcctcctgaagaaaagattctcccatagacccgtgcaggagaagttcgtgtgcctgaactgcggcttcgagacacacgcagccgagcaagccgccctgaacatcgccagatcctggctgttcctgcggagccaggagtacaagaaataccagacaaacaagacaaccggcaacaccgataagagagccttcgtcgagacctggcagtccttttaccggaagaagcttaaggaggtgtggaaacctgccgtgcggtctggcggatctggcggaggctcctagcctgggcagcgtgaccttcaccgacgtggccatcgacttcagccaggacgagtgggagtggctgaacctggcccagaggagcctgtacaagaaggtgatgctggagaactacaggaacctggtgagcgtgggcctgtgcatcagcaagcccgtggtgatcagcctgctggagcaggagaaggacccctgggtgatcaagggcggcatgaacaggggcctgtgccccgacctggagtgcgtgggatctggctccggcagcggccccaagaaaaagagaaaagtctaagctgccttctgcggggcttgccttctggccatgcccttcttctctcccttgcacctgtacctcttggtctttgaataaagcctgagtaggaaggctagcaaaaaaaaaaaaaaaaaaaaaaaaaaaaaaaaaaaaaaaaaaaaaaaaaaaaaaaaaaaaaaaaaaaaaaaaaaaaaaaa

SEQ ID NO: 16679 - RNA, 9485 nt, synthetic construct
  source 1..9485: mol_type = other RNA
aggaaataagagagaaaagaagagtaagaagaaatataagagccaccatggcccctaagaagaagcgtaaagtgagccggatggaacgcctcgtctacgaggtgcggcagaagtgcagaaacatcgaggacatctgcatctcctgcggatctctgaacgtgaccctggagcacccactgttcatcggcggcatgtgccagaactgtaaaaactgttttctggagtgtgcctatcaatacgacgatgacggctaccagagctactgcaccatctgttgcggcggaagagaggtgctgatgtgtggaaataacaactgctgccggtgcttctgcgtggaatgcgtggacctgctggtgggccccggcgccgcccaggccgctattaaggaagatccttggaactgctacatgtgcggccacaagggcacatacggcctgctgagacggagagaggactggcctagcagactgcagatgttcttcgccaataaccacgaccaggagttcgacccccctaaggtgtaccctcccgtccccgccgagaagagaaagcccatccgggtcctgagcctgttcgatggcatcgccaccggtctgctggtgctgaaggacctgggcatccaggtggataggtacattgcctccgaggtgtgcgaggactccatcaccgtgggaatggtgcgtcatcagggcaagatcatgtacgtgggcgacgtgcggagcgtgacacagaagcatatccaggagtggggccctttcgacctggtgatcggcggcagcccttgcaatgacctgagcatcgtgaacccagcccggaagggcctgtacgagggaaccggcagactgttcttcgagttttacagactgctgcacgacgcccggcctaaggaaggcgacgaccggcccttcttttggctgttcgagaatgtggtggccatgggagtcagcgacaagcgggatattagccggttcctggagagcaaccccgtgatgatcgatgccaaggaagtgagcgccgcccaccgggccagatacttctggggcaatctgcctggcatgaacagacccctggccagcaccgtgaacgacaagctggagctgcaggagtgcctggagcacggccggatcgccaagttcagcaaggtgagaaccatcaccacccgaagcaacagcatcaaacaaggcaaggaccagcactttcctgtgttcatgaacgagaaggaggacatcctgtggtgtaccgagatggagagagtgttcgggttcccagtccactacacagatgtcagcaacatgtctagactggccagacagagactgctgggaagaagctggtccgtccctgtgatcagacacctgttcgcccctctgaaggagtacttcgcctgcgtgagcagcggcaacagcaacgccaacagccggggccccagcttctctagcggcctggtgccactgtccctgagagggagccacatgggccccatggagatctacaaaaccgtgagcgcctggaagcggcagcctgtgcgcgtgctgagcctgtttcggaatatcgataaagtcctgaaaagcctgggattcctggagagcggctctggctccggcggtggcaccctgaagtacgtggaggatgtgacaaacgtggtcagacgggatgtggagaagtggggccccttcgatctggtgtacggcagcacccaacccctgggcagctcttgtgaccggtgccctggctggtacatgtttcagttccaccggatcctgcagtacgccctgccgagacaggagtcccagcggccattcttttggattttcatggacaacttgctgctgaccgaggatgaccaggaaactaccactcggttcctgcagaccgaagccgtgaccctgcaggacgtgagaggccgggactaccagaacgccatgcgggtgtggtccaacatccctggactgaaaagcaagcacgcacctctgacccctaaagaagaggagtacctgcaggcccaggtgcggagcagaagcaagctggacgcccctaaggtggatctgctggtgaagaattgcctcctgcccctgagagagtacttcaagtatttcagccagaatagtctgcccctgggaggcagcggcggcggcgccctggtgacatttgaggacgtcgccgtgcggttcacccaggaggaatgggctctgctggatccttctcagaaaatcctgtaccgggacgtgatgagagagacataccggaatctgacctccgtgggcatcaactgggaatgttgggaccttgaagcctgcttcagaagcctgggaagaaacctgagagtgcaggtggtgaagagaaagtgcgagctgaccaacagcggcccctgcgccgagggcggcccaagcagcggcgcccctcctcccagcggcggcagcccagccggctccccaacctctaccgaggagggcacctctgagtccgccacccccgagagcggccctggcacctccaccgagcccagcgagggcagcgcacccggcagccctgccggcagccccacctccacagaggagggaaccagcaccgagcccagcgaaggcagcgccccaggcaccagcaccgagcctagtgagcaggagattaaacggatcaacaagatcagaagaagacttgtgaaagacagcaacaccaagaaggccggcaagacaggccccatgaaaaccctgctggttagagtgatgacacccgatctgagagagcggctggaaaacctgagaaagaagcctgaaaatatcccccagcccatcagcaatacatctagagccaacctgaataagctgctgaccgattacaccgaaatgaagaaggcgatcctgcatgtgtactgggaagagttccagaaggaccctgtgggcctgatgagccgggtggcccagcctgccagcaagaagatcgatcagaacaagctgaaacctgagatggacgagaagggcaacctgaccaccgccggctttgcctgctctcagtgtggccagcccctgttcgtgtacaagctggagcaggtgtctgagaagggcaaggcttacaccaactacttcggacggtgcaatgtggccgagcacgaaaagctgatcctgctggcccagctgaagcccgagaaggatagcgacgaagccgtgacatatagcctgggaaagtttgggcagagggccctggatttctacagcattcatgtgaccaaggagtccacccaccccgtgaagcccctggcccagatcgccggaaacagatacgcctccggacctgtgggaaaggccctgagcgacgcatgtatgggcacaatcgcctccttcctgtctaagtaccaggacatcatcatcgaacaccagaaggtggtgaagggcaaccagaagagactggagagcctgcgggagctggccggcaaggaaaacctggaataccctagcgtgaccctgccacctcagcctcacaccaaggagggcgttgatgcctacaacgaagtgatcgcccgggtgcgaatgtgggtgaacctgaacctgtggcagaagctgaagctaagcagagatgatgccaagcctctgctgagactgaagggattcccttcctttcctctggtcgagagacaggccaacgaagtggactggtgggacatggtgtgtaacgtgaagaagctgatcaacgagaaaaaggaggatggcaaggtgttttggcagaatctggctggctacaagagacaggaagccctgagaccatacctgagcagcgaggaagatcggaagaagggaaagaaattcgctcggtaccagctgggcgacctgctgctgcacctggaaaagaagcacggcgaggactggggaaaggtgtacgacgaggcctgggagcggattgacaagaaagtggaaggcctgagcaagcacatcaagctggaagaggaacggagaagcgaggacgcccagagcaaggccgccctgaccgactggctgcgggctaaggccagcttcgtgatcgagggcctgaaggaggccgacaaggacgagttctgcagatgcgagctgaagctgcagaagtggtacggggacctgcggggaaagcccttcgccatcgaagccgagaacagcatcctggacatcagcggcttcagcaagcagtacaactgtgccttcatctggcagaaggacggcgtgaagaagctgaacctgtacctgatcatcaactacttcaagggcggcaagctgcggttcaagaagatcaaacctgaagccttcgaagccaacagattctacaccgtgatcaacaaaaagagcggcgagatcgtgcccatggaggtgaacttcaacttcgacgaccccaacctgatcatcctgcctctggcctttggcaagagacagggcagagaattcatctggaacgacctgctgtccctggaaaccggcagcctgaagctggccaacggaagagtgatcgagaagacactgtacaacagaagaacccggcaggatgagcctgccctgttcgtggccctgaccttcgagcggcgggaggtcctggactcctccaatatcaaaccaatgaacctgatcggcgtggcaagaggcgaaaacatccccgccgtgatcgccctgaccgaccccgagggctgcccactgagccggtttaaggatagcctgggaaacccaacccacatcctgagaatcggcgagagctataaggagaagcagcggaccatccaggccaagaaggaggtggagcagcggagagccggcggctacagccggaagtacgccagcaaagccaagaatctggcagacgatatggtgagaaacaccgctagagatctgctgtactacgccgtgacccaggatgccatgctgatcttcgccaacctgagccggggcttcggccggcagggcaagcggaccttcatggccgagagacagtacacacggatggaggactggctgaccgccaagctggcctacgagggcctgagcaagacctacctgtccaagacactggcccagtacacctccaagacatgcagcaactgtgggtttaccatcaccagcgccgactacgacagggtgctggagaagctgaagaagacagcaacaggctggatgaccacaattaacggcaaggagctgaaggtggagggccagattacctactacaacagatacaagagacagaacgtagtcaaggacctgtccgtcgagctggatagactgagcgaagaatctgtgaacaacgacatctcctcctggacaaagggcagaagcggagaagctctgagcctcctgaagaaaagattctcccatagacccgtgcaggagaagttcgtgtgcctgaactgcggcttcgagacacacgcagccgagcaagccgccctgaacatcgccagatcctggctgttcctgcggagccaggagtacaagaaataccagacaaacaagacaaccggcaacaccgataagagagccttcgtcgagacctggcagtccttttaccggaagaagcttaaggaggtgtggaaacctgccgtgcggtctggcggatctggcggaggctccatgggccccctgcagttcagggacgtggccatcgagttcagcctggaggagtggcactgcctggacaccgcccagaggaacctgtacaggaacgtgatgctggagaactacagcaacctggtgttcctgggcatcgtggtgagcaagcccgacctgatcaccaggctggagcagggcaagaagcccctgaccatgaagaggcacgagatggtggccaaccccagcggccccggcgtgttcgtgggcggcccaagcagcggcgcccctcctcccagcggcggcagcccagccggctccccaacctctaccgaggagggcacctctgagtccgccacccccgagagcggccctggcacctccaccgagcccagcgagggcagcgcacccggcagccctgccggcagccccacctccacagaggagggaaccagcaccgagcccagcgaaggcagcgccccaggcaccagcaccgagcctagtgagcaggagattaaacggatcaacaagatcagaagaagacttgtgaaagacagcaacaccaagaaggccggcaagacaggccccatgaaaaccctgctggttagagtgatgacacccgatctgagagagcggctggaaaacctgagaaagaagcctgaaaatatcccccagcccatcagcaatacatctagagccaacctgaataagctgctgaccgattacaccgaaatgaagaaggcgatcctgcatgtgtactgggaagagttccagaaggaccctgtgggcctgatgagccgggtggcccagcctgccagcaagaagatcgatcagaacaagctgaaacctgagatggacgagaagggcaacctgaccaccgccggctttgcctgctctcagtgtggccagcccctgttcgtgtacaagctggagcaggtgtctgagaagggcaaggcttacaccaactacttcggacggtgcaatgtggccgagcacgaaaagctgatcctgctggcccagctgaagcccgagaaggatagcgacgaagccgtgacatatagcctgggaaagtttgggcagagggccctggatttctacagcattcatgtgaccaaggagtccacccaccccgtgaagcccctggcccagatcgccggaaacagatacgcctccggacctgtgggaaaggccctgagcgacgcatgtatgggcacaatcgcctccttcctgtctaagtaccaggacatcatcatcgaacaccagaaggtggtgaagggcaaccagaagagactggagagcctgcgggagctggccggcaaggaaaacctggaataccctagcgtgaccctgccacctcagcctcacaccaaggagggcgttgatgcctacaacgaagtgatcgcccgggtgcgaatgtgggtgaacctgaacctgtggcagaagctgaagctaagcagagatgatgccaagcctctgctgagactgaagggattcccttcctttcctctggtcgagagacaggccaacgaagtggactggtgggacatggtgtgtaacgtgaagaagctgatcaacgagaaaaaggaggatggcaaggtgttttggcagaatctggctggctacaagagacaggaagccctgagaccatacctgagcagcgaggaagatcggaagaagggaaagaaattcgctcggtaccagctgggcgacctgctgctgcacctggaaaagaagcacggcgaggactggggaaaggtgtacgacgaggcctgggagcggattgacaagaaagtggaaggcctgagcaagcacatcaagctggaagaggaacggagaagcgaggacgcccagagcaaggccgccctgaccgactggctgcgggctaaggccagcttcgtgatcgagggcctgaaggaggccgacaaggacgagttctgcagatgcgagctgaagctgcagaagtggtacggggacctgcggggaaagcccttcgccatcgaagccgagaacagcatcctggacatcagcggcttcagcaagcagtacaactgtgccttcatctggcagaaggacggcgtgaagaagctgaacctgtacctgatcatcaactacttcaagggcggcaagctgcggttcaagaagatcaaacctgaagccttcgaagccaacagattctacaccgtgatcaacaaaaagagcggcgagatcgtgcccatggaggtgaacttcaacttcgacgaccccaacctgatcatcctgcctctggcctttggcaagagacagggcagagaattcatctggaacgacctgctgtccctggaaaccggcagcctgaagctggccaacggaagagtgatcgagaagacactgtacaacagaagaacccggcaggatgagcctgccctgttcgtggccctgaccttcgagcggcgggaggtcctggactcctccaatatcaaaccaatgaacctgatcggcgtggcaagaggcgaaaacatccccgccgtgatcgccctgaccgaccccgagggctgcccactgagccggtttaaggatagcctgggaaacccaacccacatcctgagaatcggcgagagctataaggagaagcagcggaccatccaggccaagaaggaggtggagcagcggagagccggcggctacagccggaagtacgccagcaaagccaagaatctggcagacgatatggtgagaaacaccgctagagatctgctgtactacgccgtgacccaggatgccatgctgatcttcgccaacctgagccggggcttcggccggcagggcaagcggaccttcatggccgagagacagtacacacggatggaggactggctgaccgccaagctggcctacgagggcctgagcaagacctacctgtccaagacactggcccagtacacctccaagacatgcagcaactgtgggtttaccatcaccagcgccgactacgacagggtgctggagaagctgaagaagacagcaacaggctggatgaccacaattaacggcaaggagctgaaggtggagggccagattacctactacaacagatacaagagacagaacgtagtcaaggacctgtccgtcgagctggatagactgagcgaagaatctgtgaacaacgacatctcctcctggacaaagggcagaagcggagaagctctgagcctcctgaagaaaagattctcccatagacccgtgcaggagaagttcgtgtgcctgaactgcggcttcgagacacacgcagccgagcaagccgccctgaacatcgccagatcctggctgttcctgcggagccaggagtacaagaaataccagacaaacaagacaaccggcaacaccgataagagagccttcgtcgagacctggcagtccttttaccggaagaagcttaaggaggtgtggaaacctgccgtgcggtctggcggatctggcggaggctcctatgggccccctgcagttcagggacgtggccatcgagttcagcctggaggagtggcactgcctggacaccgcccagaggaacctgtacaggaacgtgatgctggagaactacagcaacctggtgttcctgggcatcgtggtgagcaagcccgacctgatcaccaggctggagcagggcaagaagcccctgaccatgaagaggcacgagatggtggccaaccccagcggccccggcgtgttcgtgggatctggctccggcagcggccccaagaaaaagagaaaagtctaagctgccttctgcggggcttgccttctggccatgcccttcttctctcccttgcacctgtacctcttggtctttgaataaagcctgagtaggaaggctagcaaaaaaaaaaaaaaaaaaaaaaaaaaaaaaaaaaaaaaaaaaaaaaaaaaaaaaaaaaaaaaaaaaaaaaaaaaaaaaaa

SEQ ID NO: 16680 - RNA, 9485 nt, synthetic construct
  source 1..9485: mol_type = other RNA
aggaaataagagagaaaagaagagtaagaagaaatataagagccaccatggcccctaagaagaagcgtaaagtgagccggatggaacgcctcgtctacgaggtgcggcagaagtgcagaaacatcgaggacatctgcatctcctgcggatctctgaacgtgaccctggagcacccactgttcatcggcggcatgtgccagaactgtaaaaactgttttctggagtgtgcctatcaatacgacgatgacggctaccagagctactgcaccatctgttgcggcggaagagaggtgctgatgtgtggaaataacaactgctgccggtgcttctgcgtggaatgcgtggacctgctggtgggccccggcgccgcccaggccgctattaaggaagatccttggaactgctacatgtgcggccacaagggcacatacggcctgctgagacggagagaggactggcctagcagactgcagatgttcttcgccaataaccacgaccaggagttcgacccccctaaggtgtaccctcccgtccccgccgagaagagaaagcccatccgggtcctgagcctgttcgatggcatcgccaccggtctgctggtgctgaaggacctgggcatccaggtggataggtacattgcctccgaggtgtgcgaggactccatcaccgtgggaatggtgcgtcatcagggcaagatcatgtacgtgggcgacgtgcggagcgtgacacagaagcatatccaggagtggggccctttcgacctggtgatcggcggcagcccttgcaatgacctgagcatcgtgaacccagcccggaagggcctgtacgagggaaccggcagactgttcttcgagttttacagactgctgcacgacgcccggcctaaggaaggcgacgaccggcccttcttttggctgttcgagaatgtggtggccatgggagtcagcgacaagcgggatattagccggttcctggagagcaaccccgtgatgatcgatgccaaggaagtgagcgccgcccaccgggccagatacttctggggcaatctgcctggcatgaacagacccctggccagcaccgtgaacgacaagctggagctgcaggagtgcctggagcacggccggatcgccaagttcagcaaggtgagaaccatcaccacccgaagcaacagcatcaaacaaggcaaggaccagcactttcctgtgttcatgaacgagaaggaggacatcctgtggtgtaccgagatggagagagtgttcgggttcccagtccactacacagatgtcagcaacatgtctagactggccagacagagactgctgggaagaagctggtccgtccctgtgatcagacacctgttcgcccctctgaaggagtacttcgcctgcgtgagcagcggcaacagcaacgccaacagccggggccccagcttctctagcggcctggtgccactgtccctgagagggagccacatgggccccatggagatctacaaaaccgtgagcgcctggaagcggcagcctgtgcgcgtgctgagcctgtttcggaatatcgataaagtcctgaaaagcctgggattcctggagagcggctctggctccggcggtggcaccctgaagtacgtggaggatgtgacaaacgtggtcagacgggatgtggagaagtggggccccttcgatctggtgtacggcagcacccaacccctgggcagctcttgtgaccggtgccctggctggtacatgtttcagttccaccggatcctgcagtacgccctgccgagacaggagtcccagcggccattcttttggattttcatggacaacttgctgctgaccgaggatgaccaggaaactaccactcggttcctgcagaccgaagccgtgaccctgcaggacgtgagaggccgggactaccagaacgccatgcgggtgtggtccaacatccctggactgaaaagcaagcacgcacctctgacccctaaagaagaggagtacctgcaggcccaggtgcggagcagaagcaagctggacgcccctaaggtggatctgctggtgaagaattgcctcctgcccctgagagagtacttcaagtatttcagccagaatagtctgcccctgggaggcagcggcggcggcgccctggtgacatttgaggacgtcgccgtgcggttcacccaggaggaatgggctctgctggatccttctcagaaaatcctgtaccgggacgtgatgagagagacataccggaatctgacctccgtgggcatcaactgggaatgttgggaccttgaagcctgcttcagaagcctgggaagaaacctgagagtgcaggtggtgaagagaaagtgcgagctgaccaacagcggcccctgcgccgagggcggcccaagcagcggcgcccctcctcccagcggcggcagcccagccggctccccaacctctaccgaggagggcacctctgagtccgccacccccgagagcggccctggcacctccaccgagcccagcgagggcagcgcacccggcagccctgccggcagccccacctccacagaggagggaaccagcaccgagcccagcgaaggcagcgccccaggcaccagcaccgagcctagtgagcaggagattaaacggatcaacaagatcagaagaagacttgtgaaagacagcaacaccaagaaggccggcaagacaggccccatgaaaaccctgctggttagagtgatgacacccgatctgagagagcggctggaaaacctgagaaagaagcctgaaaatatcccccagcccatcagcaatacatctagagccaacctgaataagctgctgaccgattacaccgaaatgaagaaggcgatcctgcatgtgtactgggaagagttccagaaggaccctgtgggcctgatgagccgggtggcccagcctgccagcaagaagatcgatcagaacaagctgaaacctgagatggacgagaagggcaacctgaccaccgccggctttgcctgctctcagtgtggccagcccctgttcgtgtacaagctggagcaggtgtctgagaagggcaaggcttacaccaactacttcggacggtgcaatgtggccgagcacgaaaagctgatcctgctggcccagctgaagcccgagaaggatagcgacgaagccgtgacatatagcctgggaaagtttgggcagagggccctggatttctacagcattcatgtgaccaaggagtccacccaccccgtgaagcccctggcccagatcgccggaaacagatacgcctccggacctgtgggaaaggccctgagcgacgcatgtatgggcacaatcgcctccttcctgtctaagtaccaggacatcatcatcgaacaccagaaggtggtgaagggcaaccagaagagactggagagcctgcgggagctggccggcaaggaaaacctggaataccctagcgtgaccctgccacctcagcctcacaccaaggagggcgttgatgcctacaacgaagtgatcgcccgggtgcgaatgtgggtgaacctgaacctgtggcagaagctgaagctaagcagagatgatgccaagcctctgctgagactgaagggattcccttcctttcctctggtcgagagacaggccaacgaagtggactggtgggacatggtgtgtaacgtgaagaagctgatcaacgagaaaaaggaggatggcaaggtgttttggcagaatctggctggctacaagagacaggaagccctgagaccatacctgagcagcgaggaagatcggaagaagggaaagaaattcgctcggtaccagctgggcgacctgctgctgcacctggaaaagaagcacggcgaggactggggaaaggtgtacgacgaggcctgggagcggattgacaagaaagtggaaggcctgagcaagcacatcaagctggaagaggaacggagaagcgaggacgcccagagcaaggccgccctgaccgactggctgcgggctaaggccagcttcgtgatcgagggcctgaaggaggccgacaaggacgagttctgcagatgcgagctgaagctgcagaagtggtacggggacctgcggggaaagcccttcgccatcgaagccgagaacagcatcctggacatcagcggcttcagcaagcagtacaactgtgccttcatctggcagaaggacggcgtgaagaagctgaacctgtacctgatcatcaactacttcaagggcggcaagctgcggttcaagaagatcaaacctgaagccttcgaagccaacagattctacaccgtgatcaacaaaaagagcggcgagatcgtgcccatggaggtgaacttcaacttcgacgaccccaacctgatcatcctgcctctggcctttggcaagagacagggcagagaattcatctggaacgacctgctgtccctggaaaccggcagcctgaagctggccaacggaagagtgatcgagaagacactgtacaacagaagaacccggcaggatgagcctgccctgttcgtggccctgaccttcgagcggcgggaggtcctggactcctccaatatcaaaccaatgaacctgatcggcgtggcaagaggcgaaaacatccccgccgtgatcgccctgaccgaccccgagggctgcccactgagccggtttaaggatagcctgggaaacccaacccacatcctgagaatcggcgagagctataaggagaagcagcggaccatccaggccaagaaggaggtggagcagcggagagccggcggctacagccggaagtacgccagcaaagccaagaatctggcagacgatatggtgagaaacaccgctagagatctgctgtactacgccgtgacccaggatgccatgctgatcttcgccaacctgagccggggcttcggccggcagggcaagcggaccttcatggccgagagacagtacacacggatggaggactggctgaccgccaagctggcctacgagggcctgagcaagacctacctgtccaagacactggcccagtacacctccaagacatgcagcaactgtgggtttaccatcaccagcgccgactacgacagggtgctggagaagctgaagaagacagcaacaggctggatgaccacaattaacggcaaggagctgaaggtggagggccagattacctactacaacagatacaagagacagaacgtagtcaaggacctgtccgtcgagctggatagactgagcgaagaatctgtgaacaacgacatctcctcctggacaaagggcagaagcggagaagctctgagcctcctgaagaaaagattctcccatagacccgtgcaggagaagttcgtgtgcctgaactgcggcttcgagacacacgcagccgagcaagccgccctgaacatcgccagatcctggctgttcctgcggagccaggagtacaagaaataccagacaaacaagacaaccggcaacaccgataagagagccttcgtcgagacctggcagtccttttaccggaagaagcttaaggaggtgtggaaacctgccgtgcggtctggcggatctggcggaggctcctgctggggcctgctgagcttcaaggacatcagcatggacttcacctgggaggagtggcagctgctggacagcgcccagaagtacctgtacagggacgtgatcctggagaactacaggaacctggtgagcgtgggctaccacggcaccaagcccgacctgatcttcaagctggagcagggcgaggagccctggatcaggaacgccaagatcagcaggcccaggtgcagcgagggctggaaggagggcggcccaagcagcggcgcccctcctcccagcggcggcagcccagccggctccccaacctctaccgaggagggcacctctgagtccgccacccccgagagcggccctggcacctccaccgagcccagcgagggcagcgcacccggcagccctgccggcagccccacctccacagaggagggaaccagcaccgagcccagcgaaggcagcgccccaggcaccagcaccgagcctagtgagcaggagattaaacggatcaacaagatcagaagaagacttgtgaaagacagcaacaccaagaaggccggcaagacaggccccatgaaaaccctgctggttagagtgatgacacccgatctgagagagcggctggaaaacctgagaaagaagcctgaaaatatcccccagcccatcagcaatacatctagagccaacctgaataagctgctgaccgattacaccgaaatgaagaaggcgatcctgcatgtgtactgggaagagttccagaaggaccctgtgggcctgatgagccgggtggcccagcctgccagcaagaagatcgatcagaacaagctgaaacctgagatggacgagaagggcaacctgaccaccgccggctttgcctgctctcagtgtggccagcccctgttcgtgtacaagctggagcaggtgtctgagaagggcaaggcttacaccaactacttcggacggtgcaatgtggccgagcacgaaaagctgatcctgctggcccagctgaagcccgagaaggatagcgacgaagccgtgacatatagcctgggaaagtttgggcagagggccctggatttctacagcattcatgtgaccaaggagtccacccaccccgtgaagcccctggcccagatcgccggaaacagatacgcctccggacctgtgggaaaggccctgagcgacgcatgtatgggcacaatcgcctccttcctgtctaagtaccaggacatcatcatcgaacaccagaaggtggtgaagggcaaccagaagagactggagagcctgcgggagctggccggcaaggaaaacctggaataccctagcgtgaccctgccacctcagcctcacaccaaggagggcgttgatgcctacaacgaagtgatcgcccgggtgcgaatgtgggtgaacctgaacctgtggcagaagctgaagctaagcagagatgatgccaagcctctgctgagactgaagggattcccttcctttcctctggtcgagagacaggccaacgaagtggactggtgggacatggtgtgtaacgtgaagaagctgatcaacgagaaaaaggaggatggcaaggtgttttggcagaatctggctggctacaagagacaggaagccctgagaccatacctgagcagcgaggaagatcggaagaagggaaagaaattcgctcggtaccagctgggcgacctgctgctgcacctggaaaagaagcacggcgaggactggggaaaggtgtacgacgaggcctgggagcggattgacaagaaagtggaaggcctgagcaagcacatcaagctggaagaggaacggagaagcgaggacgcccagagcaaggccgccctgaccgactggctgcgggctaaggccagcttcgtgatcgagggcctgaaggaggccgacaaggacgagttctgcagatgcgagctgaagctgcagaagtggtacggggacctgcggggaaagcccttcgccatcgaagccgagaacagcatcctggacatcagcggcttcagcaagcagtacaactgtgccttcatctggcagaaggacggcgtgaagaagctgaacctgtacctgatcatcaactacttcaagggcggcaagctgcggttcaagaagatcaaacctgaagccttcgaagccaacagattctacaccgtgatcaacaaaaagagcggcgagatcgtgcccatggaggtgaacttcaacttcgacgaccccaacctgatcatcctgcctctggcctttggcaagagacagggcagagaattcatctggaacgacctgctgtccctggaaaccggcagcctgaagctggccaacggaagagtgatcgagaagacactgtacaacagaagaacccggcaggatgagcctgccctgttcgtggccctgaccttcgagcggcgggaggtcctggactcctccaatatcaaaccaatgaacctgatcggcgtggcaagaggcgaaaacatccccgccgtgatcgccctgaccgaccccgagggctgcccactgagccggtttaaggatagcctgggaaacccaacccacatcctgagaatcggcgagagctataaggagaagcagcggaccatccaggccaagaaggaggtggagcagcggagagccggcggctacagccggaagtacgccagcaaagccaagaatctggcagacgatatggtgagaaacaccgctagagatctgctgtactacgccgtgacccaggatgccatgctgatcttcgccaacctgagccggggcttcggccggcagggcaagcggaccttcatggccgagagacagtacacacggatggaggactggctgaccgccaagctggcctacgagggcctgagcaagacctacctgtccaagacactggcccagtacacctccaagacatgcagcaactgtgggtttaccatcaccagcgccgactacgacagggtgctggagaagctgaagaagacagcaacaggctggatgaccacaattaacggcaaggagctgaaggtggagggccagattacctactacaacagatacaagagacagaacgtagtcaaggacctgtccgtcgagctggatagactgagcgaagaatctgtgaacaacgacatctcctcctggacaaagggcagaagcggagaagctctgagcctcctgaagaaaagattctcccatagacccgtgcaggagaagttcgtgtgcctgaactgcggcttcgagacacacgcagccgagcaagccgccctgaacatcgccagatcctggctgttcctgcggagccaggagtacaagaaataccagacaaacaagacaaccggcaacaccgataagagagccttcgtcgagacctggcagtccttttaccggaagaagcttaaggaggtgtggaaacctgccgtgcggtctggcggatctggcggaggctccttgctggggcctgctgagcttcaaggacatcagcatggacttcacctgggaggagtggcagctgctggacagcgcccagaagtacctgtacagggacgtgatcctggagaactacaggaacctggtgagcgtgggctaccacggcaccaagcccgacctgatcttcaagctggagcagggcgaggagccctggatcaggaacgccaagatcagcaggcccaggtgcagcgagggctggaaggagggatctggctccggcagcggccccaagaaaaagagaaaagtctaagctgccttctgcggggcttgccttctggccatgcccttcttctctcccttgcacctgtacctcttggtctttgaataaagcctgagtaggaaggctagcaaaaaaaaaaaaaaaaaaaaaaaaaaaaaaaaaaaaaaaaaaaaaaaaaaaaaaaaaaaaaaaaaaaaaaaaaaaaaaaa

SEQ ID NO: 16681 - RNA, 9485 nt, synthetic construct
  source 1..9485: mol_type = other RNA
aggaaataagagagaaaagaagagtaagaagaaatataagagccaccatggcccctaagaagaagcgtaaagtgagccggatggaacgcctcgtctacgaggtgcggcagaagtgcagaaacatcgaggacatctgcatctcctgcggatctctgaacgtgaccctggagcacccactgttcatcggcggcatgtgccagaactgtaaaaactgttttctggagtgtgcctatcaatacgacgatgacggctaccagagctactgcaccatctgttgcggcggaagagaggtgctgatgtgtggaaataacaactgctgccggtgcttctgcgtggaatgcgtggacctgctggtgggccccggcgccgcccaggccgctattaaggaagatccttggaactgctacatgtgcggccacaagggcacatacggcctgctgagacggagagaggactggcctagcagactgcagatgttcttcgccaataaccacgaccaggagttcgacccccctaaggtgtaccctcccgtccccgccgagaagagaaagcccatccgggtcctgagcctgttcgatggcatcgccaccggtctgctggtgctgaaggacctgggcatccaggtggataggtacattgcctccgaggtgtgcgaggactccatcaccgtgggaatggtgcgtcatcagggcaagatcatgtacgtgggcgacgtgcggagcgtgacacagaagcatatccaggagtggggccctttcgacctggtgatcggcggcagcccttgcaatgacctgagcatcgtgaacccagcccggaagggcctgtacgagggaaccggcagactgttcttcgagttttacagactgctgcacgacgcccggcctaaggaaggcgacgaccggcccttcttttggctgttcgagaatgtggtggccatgggagtcagcgacaagcgggatattagccggttcctggagagcaaccccgtgatgatcgatgccaaggaagtgagcgccgcccaccgggccagatacttctggggcaatctgcctggcatgaacagacccctggccagcaccgtgaacgacaagctggagctgcaggagtgcctggagcacggccggatcgccaagttcagcaaggtgagaaccatcaccacccgaagcaacagcatcaaacaaggcaaggaccagcactttcctgtgttcatgaacgagaaggaggacatcctgtggtgtaccgagatggagagagtgttcgggttcccagtccactacacagatgtcagcaacatgtctagactggccagacagagactgctgggaagaagctggtccgtccctgtgatcagacacctgttcgcccctctgaaggagtacttcgcctgcgtgagcagcggcaacagcaacgccaacagccggggccccagcttctctagcggcctggtgccactgtccctgagagggagccacatgggccccatggagatctacaaaaccgtgagcgcctggaagcggcagcctgtgcgcgtgctgagcctgtttcggaatatcgataaagtcctgaaaagcctgggattcctggagagcggctctggctccggcggtggcaccctgaagtacgtggaggatgtgacaaacgtggtcagacgggatgtggagaagtggggccccttcgatctggtgtacggcagcacccaacccctgggcagctcttgtgaccggtgccctggctggtacatgtttcagttccaccggatcctgcagtacgccctgccgagacaggagtcccagcggccattcttttggattttcatggacaacttgctgctgaccgaggatgaccaggaaactaccactcggttcctgcagaccgaagccgtgaccctgcaggacgtgagaggccgggactaccagaacgccatgcgggtgtggtccaacatccctggactgaaaagcaagcacgcacctctgacccctaaagaagaggagtacctgcaggcccaggtgcggagcagaagcaagctggacgcccctaaggtggatctgctggtgaagaattgcctcctgcccctgagagagtacttcaagtatttcagccagaatagtctgcccctgggaggcagcggcggcggcgccctggtgacatttgaggacgtcgccgtgcggttcacccaggaggaatgggctctgctggatccttctcagaaaatcctgtaccgggacgtgatgagagagacataccggaatctgacctccgtgggcatcaactgggaatgttgggaccttgaagcctgcttcagaagcctgggaagaaacctgagagtgcaggtggtgaagagaaagtgcgagctgaccaacagcggcccctgcgccgagggcggcccaagcagcggcgcccctcctcccagcggcggcagcccagccggctccccaacctctaccgaggagggcacctctgagtccgccacccccgagagcggccctggcacctccaccgagcccagcgagggcagcgcacccggcagccctgccggcagccccacctccacagaggagggaaccagcaccgagcccagcgaaggcagcgccccaggcaccagcaccgagcctagtgagcaggagattaaacggatcaacaagatcagaagaagacttgtgaaagacagcaacaccaagaaggccggcaagacaggccccatgaaaaccctgctggttagagtgatgacacccgatctgagagagcggctggaaaacctgagaaagaagcctgaaaatatcccccagcccatcagcaatacatctagagccaacctgaataagctgctgaccgattacaccgaaatgaagaaggcgatcctgcatgtgtactgggaagagttccagaaggaccctgtgggcctgatgagccgggtggcccagcctgccagcaagaagatcgatcagaacaagctgaaacctgagatggacgagaagggcaacctgaccaccgccggctttgcctgctctcagtgtggccagcccctgttcgtgtacaagctggagcaggtgtctgagaagggcaaggcttacaccaactacttcggacggtgcaatgtggccgagcacgaaaagctgatcctgctggcccagctgaagcccgagaaggatagcgacgaagccgtgacatatagcctgggaaagtttgggcagagggccctggatttctacagcattcatgtgaccaaggagtccacccaccccgtgaagcccctggcccagatcgccggaaacagatacgcctccggacctgtgggaaaggccctgagcgacgcatgtatgggcacaatcgcctccttcctgtctaagtaccaggacatcatcatcgaacaccagaaggtggtgaagggcaaccagaagagactggagagcctgcgggagctggccggcaaggaaaacctggaataccctagcgtgaccctgccacctcagcctcacaccaaggagggcgttgatgcctacaacgaagtgatcgcccgggtgcgaatgtgggtgaacctgaacctgtggcagaagctgaagctaagcagagatgatgccaagcctctgctgagactgaagggattcccttcctttcctctggtcgagagacaggccaacgaagtggactggtgggacatggtgtgtaacgtgaagaagctgatcaacgagaaaaaggaggatggcaaggtgttttggcagaatctggctggctacaagagacaggaagccctgagaccatacctgagcagcgaggaagatcggaagaagggaaagaaattcgctcggtaccagctgggcgacctgctgctgcacctggaaaagaagcacggcgaggactggggaaaggtgtacgacgaggcctgggagcggattgacaagaaagtggaaggcctgagcaagcacatcaagctggaagaggaacggagaagcgaggacgcccagagcaaggccgccctgaccgactggctgcgggctaaggccagcttcgtgatcgagggcctgaaggaggccgacaaggacgagttctgcagatgcgagctgaagctgcagaagtggtacggggacctgcggggaaagcccttcgccatcgaagccgagaacagcatcctggacatcagcggcttcagcaagcagtacaactgtgccttcatctggcagaaggacggcgtgaagaagctgaacctgtacctgatcatcaactacttcaagggcggcaagctgcggttcaagaagatcaaacctgaagccttcgaagccaacagattctacaccgtgatcaacaaaaagagcggcgagatcgtgcccatggaggtgaacttcaacttcgacgaccccaacctgatcatcctgcctctggcctttggcaagagacagggcagagaattcatctggaacgacctgctgtccctggaaaccggcagcctgaagctggccaacggaagagtgatcgagaagacactgtacaacagaagaacccggcaggatgagcctgccctgttcgtggccctgaccttcgagcggcgggaggtcctggactcctccaatatcaaaccaatgaacctgatcggcgtggcaagaggcgaaaacatccccgccgtgatcgccctgaccgaccccgagggctgcccactgagccggtttaaggatagcctgggaaacccaacccacatcctgagaatcggcgagagctataaggagaagcagcggaccatccaggccaagaaggaggtggagcagcggagagccggcggctacagccggaagtacgccagcaaagccaagaatctggcagacgatatggtgagaaacaccgctagagatctgctgtactacgccgtgacccaggatgccatgctgatcttcgccaacctgagccggggcttcggccggcagggcaagcggaccttcatggccgagagacagtacacacggatggaggactggctgaccgccaagctggcctacgagggcctgagcaagacctacctgtccaagacactggcccagtacacctccaagacatgcagcaactgtgggtttaccatcaccagcgccgactacgacagggtgctggagaagctgaagaagacagcaacaggctggatgaccacaattaacggcaaggagctgaaggtggagggccagattacctactacaacagatacaagagacagaacgtagtcaaggacctgtccgtcgagctggatagactgagcgaagaatctgtgaacaacgacatctcctcctggacaaagggcagaagcggagaagctctgagcctcctgaagaaaagattctcccatagacccgtgcaggagaagttcgtgtgcctgaactgcggcttcgagacacacgcagccgagcaagccgccctgaacatcgccagatcctggctgttcctgcggagccaggagtacaagaaataccagacaaacaagacaaccggcaacaccgataagagagccttcgtcgagacctggcagtccttttaccggaagaagcttaaggaggtgtggaaacctgccgtgcggtctggcggatctggcggaggctcccccatcaccttcgacgacgtggccatcatcttcagccccgaggagtgggagtgcctggacagcgcccagagggacctgtacagggacgtgatggtggagaactgcaggaacctgctgagcgtggaggccagcaggcacggcaccaagggcttcagcagcaagaaggacatgaagaggagcttccaggaggagctgagcaggaggctgagcaagtgcggcgccgacatcttccaccccaggaagggcggcccaagcagcggcgcccctcctcccagcggcggcagcccagccggctccccaacctctaccgaggagggcacctctgagtccgccacccccgagagcggccctggcacctccaccgagcccagcgagggcagcgcacccggcagccctgccggcagccccacctccacagaggagggaaccagcaccgagcccagcgaaggcagcgccccaggcaccagcaccgagcctagtgagcaggagattaaacggatcaacaagatcagaagaagacttgtgaaagacagcaacaccaagaaggccggcaagacaggccccatgaaaaccctgctggttagagtgatgacacccgatctgagagagcggctggaaaacctgagaaagaagcctgaaaatatcccccagcccatcagcaatacatctagagccaacctgaataagctgctgaccgattacaccgaaatgaagaaggcgatcctgcatgtgtactgggaagagttccagaaggaccctgtgggcctgatgagccgggtggcccagcctgccagcaagaagatcgatcagaacaagctgaaacctgagatggacgagaagggcaacctgaccaccgccggctttgcctgctctcagtgtggccagcccctgttcgtgtacaagctggagcaggtgtctgagaagggcaaggcttacaccaactacttcggacggtgcaatgtggccgagcacgaaaagctgatcctgctggcccagctgaagcccgagaaggatagcgacgaagccgtgacatatagcctgggaaagtttgggcagagggccctggatttctacagcattcatgtgaccaaggagtccacccaccccgtgaagcccctggcccagatcgccggaaacagatacgcctccggacctgtgggaaaggccctgagcgacgcatgtatgggcacaatcgcctccttcctgtctaagtaccaggacatcatcatcgaacaccagaaggtggtgaagggcaaccagaagagactggagagcctgcgggagctggccggcaaggaaaacctggaataccctagcgtgaccctgccacctcagcctcacaccaaggagggcgttgatgcctacaacgaagtgatcgcccgggtgcgaatgtgggtgaacctgaacctgtggcagaagctgaagctaagcagagatgatgccaagcctctgctgagactgaagggattcccttcctttcctctggtcgagagacaggccaacgaagtggactggtgggacatggtgtgtaacgtgaagaagctgatcaacgagaaaaaggaggatggcaaggtgttttggcagaatctggctggctacaagagacaggaagccctgagaccatacctgagcagcgaggaagatcggaagaagggaaagaaattcgctcggtaccagctgggcgacctgctgctgcacctggaaaagaagcacggcgaggactggggaaaggtgtacgacgaggcctgggagcggattgacaagaaagtggaaggcctgagcaagcacatcaagctggaagaggaacggagaagcgaggacgcccagagcaaggccgccctgaccgactggctgcgggctaaggccagcttcgtgatcgagggcctgaaggaggccgacaaggacgagttctgcagatgcgagctgaagctgcagaagtggtacggggacctgcggggaaagcccttcgccatcgaagccgagaacagcatcctggacatcagcggcttcagcaagcagtacaactgtgccttcatctggcagaaggacggcgtgaagaagctgaacctgtacctgatcatcaactacttcaagggcggcaagctgcggttcaagaagatcaaacctgaagccttcgaagccaacagattctacaccgtgatcaacaaaaagagcggcgagatcgtgcccatggaggtgaacttcaacttcgacgaccccaacctgatcatcctgcctctggcctttggcaagagacagggcagagaattcatctggaacgacctgctgtccctggaaaccggcagcctgaagctggccaacggaagagtgatcgagaagacactgtacaacagaagaacccggcaggatgagcctgccctgttcgtggccctgaccttcgagcggcgggaggtcctggactcctccaatatcaaaccaatgaacctgatcggcgtggcaagaggcgaaaacatccccgccgtgatcgccctgaccgaccccgagggctgcccactgagccggtttaaggatagcctgggaaacccaacccacatcctgagaatcggcgagagctataaggagaagcagcggaccatccaggccaagaaggaggtggagcagcggagagccggcggctacagccggaagtacgccagcaaagccaagaatctggcagacgatatggtgagaaacaccgctagagatctgctgtactacgccgtgacccaggatgccatgctgatcttcgccaacctgagccggggcttcggccggcagggcaagcggaccttcatggccgagagacagtacacacggatggaggactggctgaccgccaagctggcctacgagggcctgagcaagacctacctgtccaagacactggcccagtacacctccaagacatgcagcaactgtgggtttaccatcaccagcgccgactacgacagggtgctggagaagctgaagaagacagcaacaggctggatgaccacaattaacggcaaggagctgaaggtggagggccagattacctactacaacagatacaagagacagaacgtagtcaaggacctgtccgtcgagctggatagactgagcgaagaatctgtgaacaacgacatctcctcctggacaaagggcagaagcggagaagctctgagcctcctgaagaaaagattctcccatagacccgtgcaggagaagttcgtgtgcctgaactgcggcttcgagacacacgcagccgagcaagccgccctgaacatcgccagatcctggctgttcctgcggagccaggagtacaagaaataccagacaaacaagacaaccggcaacaccgataagagagccttcgtcgagacctggcagtccttttaccggaagaagcttaaggaggtgtggaaacctgccgtgcggtctggcggatctggcggaggctcctcccatcaccttcgacgacgtggccatcatcttcagccccgaggagtgggagtgcctggacagcgcccagagggacctgtacagggacgtgatggtggagaactgcaggaacctgctgagcgtggaggccagcaggcacggcaccaagggcttcagcagcaagaaggacatgaagaggagcttccaggaggagctgagcaggaggctgagcaagtgcggcgccgacatcttccaccccaggaagggatctggctccggcagcggccccaagaaaaagagaaaagtctaagctgccttctgcggggcttgccttctggccatgcccttcttctctcccttgcacctgtacctcttggtctttgaataaagcctgagtaggaaggctagcaaaaaaaaaaaaaaaaaaaaaaaaaaaaaaaaaaaaaaaaaaaaaaaaaaaaaaaaaaaaaaaaaaaaaaaaaaaaaaaa

SEQ ID NO: 16682 - RNA, 9485 nt, synthetic construct
  source 1..9485: mol_type = other RNA
aggaaataagagagaaaagaagagtaagaagaaatataagagccaccatggcccctaagaagaagcgtaaagtgagccggatggaacgcctcgtctacgaggtgcggcagaagtgcagaaacatcgaggacatctgcatctcctgcggatctctgaacgtgaccctggagcacccactgttcatcggcggcatgtgccagaactgtaaaaactgttttctggagtgtgcctatcaatacgacgatgacggctaccagagctactgcaccatctgttgcggcggaagagaggtgctgatgtgtggaaataacaactgctgccggtgcttctgcgtggaatgcgtggacctgctggtgggccccggcgccgcccaggccgctattaaggaagatccttggaactgctacatgtgcggccacaagggcacatacggcctgctgagacggagagaggactggcctagcagactgcagatgttcttcgccaataaccacgaccaggagttcgacccccctaaggtgtaccctcccgtccccgccgagaagagaaagcccatccgggtcctgagcctgttcgatggcatcgccaccggtctgctggtgctgaaggacctgggcatccaggtggataggtacattgcctccgaggtgtgcgaggactccatcaccgtgggaatggtgcgtcatcagggcaagatcatgtacgtgggcgacgtgcggagcgtgacacagaagcatatccaggagtggggccctttcgacctggtgatcggcggcagcccttgcaatgacctgagcatcgtgaacccagcccggaagggcctgtacgagggaaccggcagactgttcttcgagttttacagactgctgcacgacgcccggcctaaggaaggcgacgaccggcccttcttttggctgttcgagaatgtggtggccatgggagtcagcgacaagcgggatattagccggttcctggagagcaaccccgtgatgatcgatgccaaggaagtgagcgccgcccaccgggccagatacttctggggcaatctgcctggcatgaacagacccctggccagcaccgtgaacgacaagctggagctgcaggagtgcctggagcacggccggatcgccaagttcagcaaggtgagaaccatcaccacccgaagcaacagcatcaaacaaggcaaggaccagcactttcctgtgttcatgaacgagaaggaggacatcctgtggtgtaccgagatggagagagtgttcgggttcccagtccactacacagatgtcagcaacatgtctagactggccagacagagactgctgggaagaagctggtccgtccctgtgatcagacacctgttcgcccctctgaaggagtacttcgcctgcgtgagcagcggcaacagcaacgccaacagccggggccccagcttctctagcggcctggtgccactgtccctgagagggagccacatgggccccatggagatctacaaaaccgtgagcgcctggaagcggcagcctgtgcgcgtgctgagcctgtttcggaatatcgataaagtcctgaaaagcctgggattcctggagagcggctctggctccggcggtggcaccctgaagtacgtggaggatgtgacaaacgtggtcagacgggatgtggagaagtggggccccttcgatctggtgtacggcagcacccaacccctgggcagctcttgtgaccggtgccctggctggtacatgtttcagttccaccggatcctgcagtacgccctgccgagacaggagtcccagcggccattcttttggattttcatggacaacttgctgctgaccgaggatgaccaggaaactaccactcggttcctgcagaccgaagccgtgaccctgcaggacgtgagaggccgggactaccagaacgccatgcgggtgtggtccaacatccctggactgaaaagcaagcacgcacctctgacccctaaagaagaggagtacctgcaggcccaggtgcggagcagaagcaagctggacgcccctaaggtggatctgctggtgaagaattgcctcctgcccctgagagagtacttcaagtatttcagccagaatagtctgcccctgggaggcagcggcggcggcgccctggtgacatttgaggacgtcgccgtgcggttcacccaggaggaatgggctctgctggatccttctcagaaaatcctgtaccgggacgtgatgagagagacataccggaatctgacctccgtgggcatcaactgggaatgttgggaccttgaagcctgcttcagaagcctgggaagaaacctgagagtgcaggtggtgaagagaaagtgcgagctgaccaacagcggcccctgcgccgagggcggcccaagcagcggcgcccctcctcccagcggcggcagcccagccggctccccaacctctaccgaggagggcacctctgagtccgccacccccgagagcggccctggcacctccaccgagcccagcgagggcagcgcacccggcagccctgccggcagccccacctccacagaggagggaaccagcaccgagcccagcgaaggcagcgccccaggcaccagcaccgagcctagtgagcaggagattaaacggatcaacaagatcagaagaagacttgtgaaagacagcaacaccaagaaggccggcaagacaggccccatgaaaaccctgctggttagagtgatgacacccgatctgagagagcggctggaaaacctgagaaagaagcctgaaaatatcccccagcccatcagcaatacatctagagccaacctgaataagctgctgaccgattacaccgaaatgaagaaggcgatcctgcatgtgtactgggaagagttccagaaggaccctgtgggcctgatgagccgggtggcccagcctgccagcaagaagatcgatcagaacaagctgaaacctgagatggacgagaagggcaacctgaccaccgccggctttgcctgctctcagtgtggccagcccctgttcgtgtacaagctggagcaggtgtctgagaagggcaaggcttacaccaactacttcggacggtgcaatgtggccgagcacgaaaagctgatcctgctggcccagctgaagcccgagaaggatagcgacgaagccgtgacatatagcctgggaaagtttgggcagagggccctggatttctacagcattcatgtgaccaaggagtccacccaccccgtgaagcccctggcccagatcgccggaaacagatacgcctccggacctgtgggaaaggccctgagcgacgcatgtatgggcacaatcgcctccttcctgtctaagtaccaggacatcatcatcgaacaccagaaggtggtgaagggcaaccagaagagactggagagcctgcgggagctggccggcaaggaaaacctggaataccctagcgtgaccctgccacctcagcctcacaccaaggagggcgttgatgcctacaacgaagtgatcgcccgggtgcgaatgtgggtgaacctgaacctgtggcagaagctgaagctaagcagagatgatgccaagcctctgctgagactgaagggattcccttcctttcctctggtcgagagacaggccaacgaagtggactggtgggacatggtgtgtaacgtgaagaagctgatcaacgagaaaaaggaggatggcaaggtgttttggcagaatctggctggctacaagagacaggaagccctgagaccatacctgagcagcgaggaagatcggaagaagggaaagaaattcgctcggtaccagctgggcgacctgctgctgcacctggaaaagaagcacggcgaggactggggaaaggtgtacgacgaggcctgggagcggattgacaagaaagtggaaggcctgagcaagcacatcaagctggaagaggaacggagaagcgaggacgcccagagcaaggccgccctgaccgactggctgcgggctaaggccagcttcgtgatcgagggcctgaaggaggccgacaaggacgagttctgcagatgcgagctgaagctgcagaagtggtacggggacctgcggggaaagcccttcgccatcgaagccgagaacagcatcctggacatcagcggcttcagcaagcagtacaactgtgccttcatctggcagaaggacggcgtgaagaagctgaacctgtacctgatcatcaactacttcaagggcggcaagctgcggttcaagaagatcaaacctgaagccttcgaagccaacagattctacaccgtgatcaacaaaaagagcggcgagatcgtgcccatggaggtgaacttcaacttcgacgaccccaacctgatcatcctgcctctggcctttggcaagagacagggcagagaattcatctggaacgacctgctgtccctggaaaccggcagcctgaagctggccaacggaagagtgatcgagaagacactgtacaacagaagaacccggcaggatgagcctgccctgttcgtggccctgaccttcgagcggcgggaggtcctggactcctccaatatcaaaccaatgaacctgatcggcgtggcaagaggcgaaaacatccccgccgtgatcgccctgaccgaccccgagggctgcccactgagccggtttaaggatagcctgggaaacccaacccacatcctgagaatcggcgagagctataaggagaagcagcggaccatccaggccaagaaggaggtggagcagcggagagccggcggctacagccggaagtacgccagcaaagccaagaatctggcagacgatatggtgagaaacaccgctagagatctgctgtactacgccgtgacccaggatgccatgctgatcttcgccaacctgagccggggcttcggccggcagggcaagcggaccttcatggccgagagacagtacacacggatggaggactggctgaccgccaagctggcctacgagggcctgagcaagacctacctgtccaagacactggcccagtacacctccaagacatgcagcaactgtgggtttaccatcaccagcgccgactacgacagggtgctggagaagctgaagaagacagcaacaggctggatgaccacaattaacggcaaggagctgaaggtggagggccagattacctactacaacagatacaagagacagaacgtagtcaaggacctgtccgtcgagctggatagactgagcgaagaatctgtgaacaacgacatctcctcctggacaaagggcagaagcggagaagctctgagcctcctgaagaaaagattctcccatagacccgtgcaggagaagttcgtgtgcctgaactgcggcttcgagacacacgcagccgagcaagccgccctgaacatcgccagatcctggctgttcctgcggagccaggagtacaagaaataccagacaaacaagacaaccggcaacaccgataagagagccttcgtcgagacctggcagtccttttaccggaagaagcttaaggaggtgtggaaacctgccgtgcggtctggcggatctggcggaggctccccccaggagagcgtggccttcgacgacgtggccgtgtacttcaccaagaaggagtgggccatcatggtgcccgaccagagggccctgtacagggacgtgatgctggagaactacgaggccgtggccttcgtggtgccccccaccagcaagcccgccctggtgagccacctggagcagggcaaggagccctgcttcacccagccccagggcgtgctgagcaggagcaactggagggccggcttcggcggcccaagcagcggcgcccctcctcccagcggcggcagcccagccggctccccaacctctaccgaggagggcacctctgagtccgccacccccgagagcggccctggcacctccaccgagcccagcgagggcagcgcacccggcagccctgccggcagccccacctccacagaggagggaaccagcaccgagcccagcgaaggcagcgccccaggcaccagcaccgagcctagtgagcaggagattaaacggatcaacaagatcagaagaagacttgtgaaagacagcaacaccaagaaggccggcaagacaggccccatgaaaaccctgctggttagagtgatgacacccgatctgagagagcggctggaaaacctgagaaagaagcctgaaaatatcccccagcccatcagcaatacatctagagccaacctgaataagctgctgaccgattacaccgaaatgaagaaggcgatcctgcatgtgtactgggaagagttccagaaggaccctgtgggcctgatgagccgggtggcccagcctgccagcaagaagatcgatcagaacaagctgaaacctgagatggacgagaagggcaacctgaccaccgccggctttgcctgctctcagtgtggccagcccctgttcgtgtacaagctggagcaggtgtctgagaagggcaaggcttacaccaactacttcggacggtgcaatgtggccgagcacgaaaagctgatcctgctggcccagctgaagcccgagaaggatagcgacgaagccgtgacatatagcctgggaaagtttgggcagagggccctggatttctacagcattcatgtgaccaaggagtccacccaccccgtgaagcccctggcccagatcgccggaaacagatacgcctccggacctgtgggaaaggccctgagcgacgcatgtatgggcacaatcgcctccttcctgtctaagtaccaggacatcatcatcgaacaccagaaggtggtgaagggcaaccagaagagactggagagcctgcgggagctggccggcaaggaaaacctggaataccctagcgtgaccctgccacctcagcctcacaccaaggagggcgttgatgcctacaacgaagtgatcgcccgggtgcgaatgtgggtgaacctgaacctgtggcagaagctgaagctaagcagagatgatgccaagcctctgctgagactgaagggattcccttcctttcctctggtcgagagacaggccaacgaagtggactggtgggacatggtgtgtaacgtgaagaagctgatcaacgagaaaaaggaggatggcaaggtgttttggcagaatctggctggctacaagagacaggaagccctgagaccatacctgagcagcgaggaagatcggaagaagggaaagaaattcgctcggtaccagctgggcgacctgctgctgcacctggaaaagaagcacggcgaggactggggaaaggtgtacgacgaggcctgggagcggattgacaagaaagtggaaggcctgagcaagcacatcaagctggaagaggaacggagaagcgaggacgcccagagcaaggccgccctgaccgactggctgcgggctaaggccagcttcgtgatcgagggcctgaaggaggccgacaaggacgagttctgcagatgcgagctgaagctgcagaagtggtacggggacctgcggggaaagcccttcgccatcgaagccgagaacagcatcctggacatcagcggcttcagcaagcagtacaactgtgccttcatctggcagaaggacggcgtgaagaagctgaacctgtacctgatcatcaactacttcaagggcggcaagctgcggttcaagaagatcaaacctgaagccttcgaagccaacagattctacaccgtgatcaacaaaaagagcggcgagatcgtgcccatggaggtgaacttcaacttcgacgaccccaacctgatcatcctgcctctggcctttggcaagagacagggcagagaattcatctggaacgacctgctgtccctggaaaccggcagcctgaagctggccaacggaagagtgatcgagaagacactgtacaacagaagaacccggcaggatgagcctgccctgttcgtggccctgaccttcgagcggcgggaggtcctggactcctccaatatcaaaccaatgaacctgatcggcgtggcaagaggcgaaaacatccccgccgtgatcgccctgaccgaccccgagggctgcccactgagccggtttaaggatagcctgggaaacccaacccacatcctgagaatcggcgagagctataaggagaagcagcggaccatccaggccaagaaggaggtggagcagcggagagccggcggctacagccggaagtacgccagcaaagccaagaatctggcagacgatatggtgagaaacaccgctagagatctgctgtactacgccgtgacccaggatgccatgctgatcttcgccaacctgagccggggcttcggccggcagggcaagcggaccttcatggccgagagacagtacacacggatggaggactggctgaccgccaagctggcctacgagggcctgagcaagacctacctgtccaagacactggcccagtacacctccaagacatgcagcaactgtgggtttaccatcaccagcgccgactacgacagggtgctggagaagctgaagaagacagcaacaggctggatgaccacaattaacggcaaggagctgaaggtggagggccagattacctactacaacagatacaagagacagaacgtagtcaaggacctgtccgtcgagctggatagactgagcgaagaatctgtgaacaacgacatctcctcctggacaaagggcagaagcggagaagctctgagcctcctgaagaaaagattctcccatagacccgtgcaggagaagttcgtgtgcctgaactgcggcttcgagacacacgcagccgagcaagccgccctgaacatcgccagatcctggctgttcctgcggagccaggagtacaagaaataccagacaaacaagacaaccggcaacaccgataagagagccttcgtcgagacctggcagtccttttaccggaagaagcttaaggaggtgtggaaacctgccgtgcggtctggcggatctggcggaggctcctccccaggagagcgtggccttcgacgacgtggccgtgtacttcaccaagaaggagtgggccatcatggtgcccgaccagagggccctgtacagggacgtgatgctggagaactacgaggccgtggccttcgtggtgccccccaccagcaagcccgccctggtgagccacctggagcagggcaaggagccctgcttcacccagccccagggcgtgctgagcaggagcaactggagggccggcttcggatctggctccggcagcggccccaagaaaaagagaaaagtctaagctgccttctgcggggcttgccttctggccatgcccttcttctctcccttgcacctgtacctcttggtctttgaataaagcctgagtaggaaggctagcaaaaaaaaaaaaaaaaaaaaaaaaaaaaaaaaaaaaaaaaaaaaaaaaaaaaaaaaaaaaaaaaaaaaaaaaaaaaaaaa

SEQ ID NO: 16683 - RNA, 9485 nt, synthetic construct
  source 1..9485: mol_type = other RNA
aggaaataagagagaaaagaagagtaagaagaaatataagagccaccatggcccctaagaagaagcgtaaagtgagccggatggaacgcctcgtctacgaggtgcggcagaagtgcagaaacatcgaggacatctgcatctcctgcggatctctgaacgtgaccctggagcacccactgttcatcggcggcatgtgccagaactgtaaaaactgttttctggagtgtgcctatcaatacgacgatgacggctaccagagctactgcaccatctgttgcggcggaagagaggtgctgatgtgtggaaataacaactgctgccggtgcttctgcgtggaatgcgtggacctgctggtgggccccggcgccgcccaggccgctattaaggaagatccttggaactgctacatgtgcggccacaagggcacatacggcctgctgagacggagagaggactggcctagcagactgcagatgttcttcgccaataaccacgaccaggagttcgacccccctaaggtgtaccctcccgtccccgccgagaagagaaagcccatccgggtcctgagcctgttcgatggcatcgccaccggtctgctggtgctgaaggacctgggcatccaggtggataggtacattgcctccgaggtgtgcgaggactccatcaccgtgggaatggtgcgtcatcagggcaagatcatgtacgtgggcgacgtgcggagcgtgacacagaagcatatccaggagtggggccctttcgacctggtgatcggcggcagcccttgcaatgacctgagcatcgtgaacccagcccggaagggcctgtacgagggaaccggcagactgttcttcgagttttacagactgctgcacgacgcccggcctaaggaaggcgacgaccggcccttcttttggctgttcgagaatgtggtggccatgggagtcagcgacaagcgggatattagccggttcctggagagcaaccccgtgatgatcgatgccaaggaagtgagcgccgcccaccgggccagatacttctggggcaatctgcctggcatgaacagacccctggccagcaccgtgaacgacaagctggagctgcaggagtgcctggagcacggccggatcgccaagttcagcaaggtgagaaccatcaccacccgaagcaacagcatcaaacaaggcaaggaccagcactttcctgtgttcatgaacgagaaggaggacatcctgtggtgtaccgagatggagagagtgttcgggttcccagtccactacacagatgtcagcaacatgtctagactggccagacagagactgctgggaagaagctggtccgtccctgtgatcagacacctgttcgcccctctgaaggagtacttcgcctgcgtgagcagcggcaacagcaacgccaacagccggggccccagcttctctagcggcctggtgccactgtccctgagagggagccacatgggccccatggagatctacaaaaccgtgagcgcctggaagcggcagcctgtgcgcgtgctgagcctgtttcggaatatcgataaagtcctgaaaagcctgggattcctggagagcggctctggctccggcggtggcaccctgaagtacgtggaggatgtgacaaacgtggtcagacgggatgtggagaagtggggccccttcgatctggtgtacggcagcacccaacccctgggcagctcttgtgaccggtgccctggctggtacatgtttcagttccaccggatcctgcagtacgccctgccgagacaggagtcccagcggccattcttttggattttcatggacaacttgctgctgaccgaggatgaccaggaaactaccactcggttcctgcagaccgaagccgtgaccctgcaggacgtgagaggccgggactaccagaacgccatgcgggtgtggtccaacatccctggactgaaaagcaagcacgcacctctgacccctaaagaagaggagtacctgcaggcccaggtgcggagcagaagcaagctggacgcccctaaggtggatctgctggtgaagaattgcctcctgcccctgagagagtacttcaagtatttcagccagaatagtctgcccctgggaggcagcggcggcggcgccctggtgacatttgaggacgtcgccgtgcggttcacccaggaggaatgggctctgctggatccttctcagaaaatcctgtaccgggacgtgatgagagagacataccggaatctgacctccgtgggcatcaactgggaatgttgggaccttgaagcctgcttcagaagcctgggaagaaacctgagagtgcaggtggtgaagagaaagtgcgagctgaccaacagcggcccctgcgccgagggcggcccaagcagcggcgcccctcctcccagcggcggcagcccagccggctccccaacctctaccgaggagggcacctctgagtccgccacccccgagagcggccctggcacctccaccgagcccagcgagggcagcgcacccggcagccctgccggcagccccacctccacagaggagggaaccagcaccgagcccagcgaaggcagcgccccaggcaccagcaccgagcctagtgagcaggagattaaacggatcaacaagatcagaagaagacttgtgaaagacagcaacaccaagaaggccggcaagacaggccccatgaaaaccctgctggttagagtgatgacacccgatctgagagagcggctggaaaacctgagaaagaagcctgaaaatatcccccagcccatcagcaatacatctagagccaacctgaataagctgctgaccgattacaccgaaatgaagaaggcgatcctgcatgtgtactgggaagagttccagaaggaccctgtgggcctgatgagccgggtggcccagcctgccagcaagaagatcgatcagaacaagctgaaacctgagatggacgagaagggcaacctgaccaccgccggctttgcctgctctcagtgtggccagcccctgttcgtgtacaagctggagcaggtgtctgagaagggcaaggcttacaccaactacttcggacggtgcaatgtggccgagcacgaaaagctgatcctgctggcccagctgaagcccgagaaggatagcgacgaagccgtgacatatagcctgggaaagtttgggcagagggccctggatttctacagcattcatgtgaccaaggagtccacccaccccgtgaagcccctggcccagatcgccggaaacagatacgcctccggacctgtgggaaaggccctgagcgacgcatgtatgggcacaatcgcctccttcctgtctaagtaccaggacatcatcatcgaacaccagaaggtggtgaagggcaaccagaagagactggagagcctgcgggagctggccggcaaggaaaacctggaataccctagcgtgaccctgccacctcagcctcacaccaaggagggcgttgatgcctacaacgaagtgatcgcccgggtgcgaatgtgggtgaacctgaacctgtggcagaagctgaagctaagcagagatgatgccaagcctctgctgagactgaagggattcccttcctttcctctggtcgagagacaggccaacgaagtggactggtgggacatggtgtgtaacgtgaagaagctgatcaacgagaaaaaggaggatggcaaggtgttttggcagaatctggctggctacaagagacaggaagccctgagaccatacctgagcagcgaggaagatcggaagaagggaaagaaattcgctcggtaccagctgggcgacctgctgctgcacctggaaaagaagcacggcgaggactggggaaaggtgtacgacgaggcctgggagcggattgacaagaaagtggaaggcctgagcaagcacatcaagctggaagaggaacggagaagcgaggacgcccagagcaaggccgccctgaccgactggctgcgggctaaggccagcttcgtgatcgagggcctgaaggaggccgacaaggacgagttctgcagatgcgagctgaagctgcagaagtggtacggggacctgcggggaaagcccttcgccatcgaagccgagaacagcatcctggacatcagcggcttcagcaagcagtacaactgtgccttcatctggcagaaggacggcgtgaagaagctgaacctgtacctgatcatcaactacttcaagggcggcaagctgcggttcaagaagatcaaacctgaagccttcgaagccaacagattctacaccgtgatcaacaaaaagagcggcgagatcgtgcccatggaggtgaacttcaacttcgacgaccccaacctgatcatcctgcctctggcctttggcaagagacagggcagagaattcatctggaacgacctgctgtccctggaaaccggcagcctgaagctggccaacggaagagtgatcgagaagacactgtacaacagaagaacccggcaggatgagcctgccctgttcgtggccctgaccttcgagcggcgggaggtcctggactcctccaatatcaaaccaatgaacctgatcggcgtggcaagaggcgaaaacatccccgccgtgatcgccctgaccgaccccgagggctgcccactgagccggtttaaggatagcctgggaaacccaacccacatcctgagaatcggcgagagctataaggagaagcagcggaccatccaggccaagaaggaggtggagcagcggagagccggcggctacagccggaagtacgccagcaaagccaagaatctggcagacgatatggtgagaaacaccgctagagatctgctgtactacgccgtgacccaggatgccatgctgatcttcgccaacctgagccggggcttcggccggcagggcaagcggaccttcatggccgagagacagtacacacggatggaggactggctgaccgccaagctggcctacgagggcctgagcaagacctacctgtccaagacactggcccagtacacctccaagacatgcagcaactgtgggtttaccatcaccagcgccgactacgacagggtgctggagaagctgaagaagacagcaacaggctggatgaccacaattaacggcaaggagctgaaggtggagggccagattacctactacaacagatacaagagacagaacgtagtcaaggacctgtccgtcgagctggatagactgagcgaagaatctgtgaacaacgacatctcctcctggacaaagggcagaagcggagaagctctgagcctcctgaagaaaagattctcccatagacccgtgcaggagaagttcgtgtgcctgaactgcggcttcgagacacacgcagccgagcaagccgccctgaacatcgccagatcctggctgttcctgcggagccaggagtacaagaaataccagacaaacaagacaaccggcaacaccgataagagagccttcgtcgagacctggcagtccttttaccggaagaagcttaaggaggtgtggaaacctgccgtgcggtctggcggatctggcggaggctccagccagggccacgtgaccttcgaggacatcgccgtgtacttcagccaggaggagtggggcctgctggacgaggcccagaggtgcctgtaccacgacgtgatgctggagaacttcagcctgatgaccagcgtggccggcctgagccagaacaaccacaaggacagctgcctgcagtggaaggtgcccgtgagcatgaacaacgtggcccagtgcagccccgacgaggtgcactacacccccatgggcggcccaagcagcggcgcccctcctcccagcggcggcagcccagccggctccccaacctctaccgaggagggcacctctgagtccgccacccccgagagcggccctggcacctccaccgagcccagcgagggcagcgcacccggcagccctgccggcagccccacctccacagaggagggaaccagcaccgagcccagcgaaggcagcgccccaggcaccagcaccgagcctagtgagcaggagattaaacggatcaacaagatcagaagaagacttgtgaaagacagcaacaccaagaaggccggcaagacaggccccatgaaaaccctgctggttagagtgatgacacccgatctgagagagcggctggaaaacctgagaaagaagcctgaaaatatcccccagcccatcagcaatacatctagagccaacctgaataagctgctgaccgattacaccgaaatgaagaaggcgatcctgcatgtgtactgggaagagttccagaaggaccctgtgggcctgatgagccgggtggcccagcctgccagcaagaagatcgatcagaacaagctgaaacctgagatggacgagaagggcaacctgaccaccgccggctttgcctgctctcagtgtggccagcccctgttcgtgtacaagctggagcaggtgtctgagaagggcaaggcttacaccaactacttcggacggtgcaatgtggccgagcacgaaaagctgatcctgctggcccagctgaagcccgagaaggatagcgacgaagccgtgacatatagcctgggaaagtttgggcagagggccctggatttctacagcattcatgtgaccaaggagtccacccaccccgtgaagcccctggcccagatcgccggaaacagatacgcctccggacctgtgggaaaggccctgagcgacgcatgtatgggcacaatcgcctccttcctgtctaagtaccaggacatcatcatcgaacaccagaaggtggtgaagggcaaccagaagagactggagagcctgcgggagctggccggcaaggaaaacctggaataccctagcgtgaccctgccacctcagcctcacaccaaggagggcgttgatgcctacaacgaagtgatcgcccgggtgcgaatgtgggtgaacctgaacctgtggcagaagctgaagctaagcagagatgatgccaagcctctgctgagactgaagggattcccttcctttcctctggtcgagagacaggccaacgaagtggactggtgggacatggtgtgtaacgtgaagaagctgatcaacgagaaaaaggaggatggcaaggtgttttggcagaatctggctggctacaagagacaggaagccctgagaccatacctgagcagcgaggaagatcggaagaagggaaagaaattcgctcggtaccagctgggcgacctgctgctgcacctggaaaagaagcacggcgaggactggggaaaggtgtacgacgaggcctgggagcggattgacaagaaagtggaaggcctgagcaagcacatcaagctggaagaggaacggagaagcgaggacgcccagagcaaggccgccctgaccgactggctgcgggctaaggccagcttcgtgatcgagggcctgaaggaggccgacaaggacgagttctgcagatgcgagctgaagctgcagaagtggtacggggacctgcggggaaagcccttcgccatcgaagccgagaacagcatcctggacatcagcggcttcagcaagcagtacaactgtgccttcatctggcagaaggacggcgtgaagaagctgaacctgtacctgatcatcaactacttcaagggcggcaagctgcggttcaagaagatcaaacctgaagccttcgaagccaacagattctacaccgtgatcaacaaaaagagcggcgagatcgtgcccatggaggtgaacttcaacttcgacgaccccaacctgatcatcctgcctctggcctttggcaagagacagggcagagaattcatctggaacgacctgctgtccctggaaaccggcagcctgaagctggccaacggaagagtgatcgagaagacactgtacaacagaagaacccggcaggatgagcctgccctgttcgtggccctgaccttcgagcggcgggaggtcctggactcctccaatatcaaaccaatgaacctgatcggcgtggcaagaggcgaaaacatccccgccgtgatcgccctgaccgaccccgagggctgcccactgagccggtttaaggatagcctgggaaacccaacccacatcctgagaatcggcgagagctataaggagaagcagcggaccatccaggccaagaaggaggtggagcagcggagagccggcggctacagccggaagtacgccagcaaagccaagaatctggcagacgatatggtgagaaacaccgctagagatctgctgtactacgccgtgacccaggatgccatgctgatcttcgccaacctgagccggggcttcggccggcagggcaagcggaccttcatggccgagagacagtacacacggatggaggactggctgaccgccaagctggcctacgagggcctgagcaagacctacctgtccaagacactggcccagtacacctccaagacatgcagcaactgtgggtttaccatcaccagcgccgactacgacagggtgctggagaagctgaagaagacagcaacaggctggatgaccacaattaacggcaaggagctgaaggtggagggccagattacctactacaacagatacaagagacagaacgtagtcaaggacctgtccgtcgagctggatagactgagcgaagaatctgtgaacaacgacatctcctcctggacaaagggcagaagcggagaagctctgagcctcctgaagaaaagattctcccatagacccgtgcaggagaagttcgtgtgcctgaactgcggcttcgagacacacgcagccgagcaagccgccctgaacatcgccagatcctggctgttcctgcggagccaggagtacaagaaataccagacaaacaagacaaccggcaacaccgataagagagccttcgtcgagacctggcagtccttttaccggaagaagcttaaggaggtgtggaaacctgccgtgcggtctggcggatctggcggaggctcctagccagggccacgtgaccttcgaggacatcgccgtgtacttcagccaggaggagtggggcctgctggacgaggcccagaggtgcctgtaccacgacgtgatgctggagaacttcagcctgatgaccagcgtggccggcctgagccagaacaaccacaaggacagctgcctgcagtggaaggtgcccgtgagcatgaacaacgtggcccagtgcagccccgacgaggtgcactacacccccatgggatctggctccggcagcggccccaagaaaaagagaaaagtctaagctgccttctgcggggcttgccttctggccatgcccttcttctctcccttgcacctgtacctcttggtctttgaataaagcctgagtaggaaggctagcaaaaaaaaaaaaaaaaaaaaaaaaaaaaaaaaaaaaaaaaaaaaaaaaaaaaaaaaaaaaaaaaaaaaaaaaaaaaaaaa

SEQ ID NO: 16684 - RNA, 9485 nt, synthetic construct
  source 1..9485: mol_type = other RNA
aggaaataagagagaaaagaagagtaagaagaaatataagagccaccatggcccctaagaagaagcgtaaagtgagccggatggaacgcctcgtctacgaggtgcggcagaagtgcagaaacatcgaggacatctgcatctcctgcggatctctgaacgtgaccctggagcacccactgttcatcggcggcatgtgccagaactgtaaaaactgttttctggagtgtgcctatcaatacgacgatgacggctaccagagctactgcaccatctgttgcggcggaagagaggtgctgatgtgtggaaataacaactgctgccggtgcttctgcgtggaatgcgtggacctgctggtgggccccggcgccgcccaggccgctattaaggaagatccttggaactgctacatgtgcggccacaagggcacatacggcctgctgagacggagagaggactggcctagcagactgcagatgttcttcgccaataaccacgaccaggagttcgacccccctaaggtgtaccctcccgtccccgccgagaagagaaagcccatccgggtcctgagcctgttcgatggcatcgccaccggtctgctggtgctgaaggacctgggcatccaggtggataggtacattgcctccgaggtgtgcgaggactccatcaccgtgggaatggtgcgtcatcagggcaagatcatgtacgtgggcgacgtgcggagcgtgacacagaagcatatccaggagtggggccctttcgacctggtgatcggcggcagcccttgcaatgacctgagcatcgtgaacccagcccggaagggcctgtacgagggaaccggcagactgttcttcgagttttacagactgctgcacgacgcccggcctaaggaaggcgacgaccggcccttcttttggctgttcgagaatgtggtggccatgggagtcagcgacaagcgggatattagccggttcctggagagcaaccccgtgatgatcgatgccaaggaagtgagcgccgcccaccgggccagatacttctggggcaatctgcctggcatgaacagacccctggccagcaccgtgaacgacaagctggagctgcaggagtgcctggagcacggccggatcgccaagttcagcaaggtgagaaccatcaccacccgaagcaacagcatcaaacaaggcaaggaccagcactttcctgtgttcatgaacgagaaggaggacatcctgtggtgtaccgagatggagagagtgttcgggttcccagtccactacacagatgtcagcaacatgtctagactggccagacagagactgctgggaagaagctggtccgtccctgtgatcagacacctgttcgcccctctgaaggagtacttcgcctgcgtgagcagcggcaacagcaacgccaacagccggggccccagcttctctagcggcctggtgccactgtccctgagagggagccacatgggccccatggagatctacaaaaccgtgagcgcctggaagcggcagcctgtgcgcgtgctgagcctgtttcggaatatcgataaagtcctgaaaagcctgggattcctggagagcggctctggctccggcggtggcaccctgaagtacgtggaggatgtgacaaacgtggtcagacgggatgtggagaagtggggccccttcgatctggtgtacggcagcacccaacccctgggcagctcttgtgaccggtgccctggctggtacatgtttcagttccaccggatcctgcagtacgccctgccgagacaggagtcccagcggccattcttttggattttcatggacaacttgctgctgaccgaggatgaccaggaaactaccactcggttcctgcagaccgaagccgtgaccctgcaggacgtgagaggccgggactaccagaacgccatgcgggtgtggtccaacatccctggactgaaaagcaagcacgcacctctgacccctaaagaagaggagtacctgcaggcccaggtgcggagcagaagcaagctggacgcccctaaggtggatctgctggtgaagaattgcctcctgcccctgagagagtacttcaagtatttcagccagaatagtctgcccctgggaggcagcggcggcggcgccctggtgacatttgaggacgtcgccgtgcggttcacccaggaggaatgggctctgctggatccttctcagaaaatcctgtaccgggacgtgatgagagagacataccggaatctgacctccgtgggcatcaactgggaatgttgggaccttgaagcctgcttcagaagcctgggaagaaacctgagagtgcaggtggtgaagagaaagtgcgagctgaccaacagcggcccctgcgccgagggcggcccaagcagcggcgcccctcctcccagcggcggcagcccagccggctccccaacctctaccgaggagggcacctctgagtccgccacccccgagagcggccctggcacctccaccgagcccagcgagggcagcgcacccggcagccctgccggcagccccacctccacagaggagggaaccagcaccgagcccagcgaaggcagcgccccaggcaccagcaccgagcctagtgagcaggagattaaacggatcaacaagatcagaagaagacttgtgaaagacagcaacaccaagaaggccggcaagacaggccccatgaaaaccctgctggttagagtgatgacacccgatctgagagagcggctggaaaacctgagaaagaagcctgaaaatatcccccagcccatcagcaatacatctagagccaacctgaataagctgctgaccgattacaccgaaatgaagaaggcgatcctgcatgtgtactgggaagagttccagaaggaccctgtgggcctgatgagccgggtggcccagcctgccagcaagaagatcgatcagaacaagctgaaacctgagatggacgagaagggcaacctgaccaccgccggctttgcctgctctcagtgtggccagcccctgttcgtgtacaagctggagcaggtgtctgagaagggcaaggcttacaccaactacttcggacggtgcaatgtggccgagcacgaaaagctgatcctgctggcccagctgaagcccgagaaggatagcgacgaagccgtgacatatagcctgggaaagtttgggcagagggccctggatttctacagcattcatgtgaccaaggagtccacccaccccgtgaagcccctggcccagatcgccggaaacagatacgcctccggacctgtgggaaaggccctgagcgacgcatgtatgggcacaatcgcctccttcctgtctaagtaccaggacatcatcatcgaacaccagaaggtggtgaagggcaaccagaagagactggagagcctgcgggagctggccggcaaggaaaacctggaataccctagcgtgaccctgccacctcagcctcacaccaaggagggcgttgatgcctacaacgaagtgatcgcccgggtgcgaatgtgggtgaacctgaacctgtggcagaagctgaagctaagcagagatgatgccaagcctctgctgagactgaagggattcccttcctttcctctggtcgagagacaggccaacgaagtggactggtgggacatggtgtgtaacgtgaagaagctgatcaacgagaaaaaggaggatggcaaggtgttttggcagaatctggctggctacaagagacaggaagccctgagaccatacctgagcagcgaggaagatcggaagaagggaaagaaattcgctcggtaccagctgggcgacctgctgctgcacctggaaaagaagcacggcgaggactggggaaaggtgtacgacgaggcctgggagcggattgacaagaaagtggaaggcctgagcaagcacatcaagctggaagaggaacggagaagcgaggacgcccagagcaaggccgccctgaccgactggctgcgggctaaggccagcttcgtgatcgagggcctgaaggaggccgacaaggacgagttctgcagatgcgagctgaagctgcagaagtggtacggggacctgcggggaaagcccttcgccatcgaagccgagaacagcatcctggacatcagcggcttcagcaagcagtacaactgtgccttcatctggcagaaggacggcgtgaagaagctgaacctgtacctgatcatcaactacttcaagggcggcaagctgcggttcaagaagatcaaacctgaagccttcgaagccaacagattctacaccgtgatcaacaaaaagagcggcgagatcgtgcccatggaggtgaacttcaacttcgacgaccccaacctgatcatcctgcctctggcctttggcaagagacagggcagagaattcatctggaacgacctgctgtccctggaaaccggcagcctgaagctggccaacggaagagtgatcgagaagacactgtacaacagaagaacccggcaggatgagcctgccctgttcgtggccctgaccttcgagcggcgggaggtcctggactcctccaatatcaaaccaatgaacctgatcggcgtggcaagaggcgaaaacatccccgccgtgatcgccctgaccgaccccgagggctgcccactgagccggtttaaggatagcctgggaaacccaacccacatcctgagaatcggcgagagctataaggagaagcagcggaccatccaggccaagaaggaggtggagcagcggagagccggcggctacagccggaagtacgccagcaaagccaagaatctggcagacgatatggtgagaaacaccgctagagatctgctgtactacgccgtgacccaggatgccatgctgatcttcgccaacctgagccggggcttcggccggcagggcaagcggaccttcatggccgagagacagtacacacggatggaggactggctgaccgccaagctggcctacgagggcctgagcaagacctacctgtccaagacactggcccagtacacctccaagacatgcagcaactgtgggtttaccatcaccagcgccgactacgacagggtgctggagaagctgaagaagacagcaacaggctggatgaccacaattaacggcaaggagctgaaggtggagggccagattacctactacaacagatacaagagacagaacgtagtcaaggacctgtccgtcgagctggatagactgagcgaagaatctgtgaacaacgacatctcctcctggacaaagggcagaagcggagaagctctgagcctcctgaagaaaagattctcccatagacccgtgcaggagaagttcgtgtgcctgaactgcggcttcgagacacacgcagccgagcaagccgccctgaacatcgccagatcctggctgttcctgcggagccaggagtacaagaaataccagacaaacaagacaaccggcaacaccgataagagagccttcgtcgagacctggcagtccttttaccggaagaagcttaaggaggtgtggaaacctgccgtgcggtctggcggatctggcggaggctccgtgcacggcagcgtgaccttcagggacgtggccatcgacttctgccaggaggagtgggagtgcctgggccccatccagagggacctgtacagggacgtgatgctggagaactacagcaacctgatcgccgtgggcagcaccatcagcaagcccgacgtgatcgccctgctggagcagggcaccgagccctggatgggcgtgaggaaggacaggagcaggtggtaccccggcctgaacagcggcggcggcccaagcagcggcgcccctcctcccagcggcggcagcccagccggctccccaacctctaccgaggagggcacctctgagtccgccacccccgagagcggccctggcacctccaccgagcccagcgagggcagcgcacccggcagccctgccggcagccccacctccacagaggagggaaccagcaccgagcccagcgaaggcagcgccccaggcaccagcaccgagcctagtgagcaggagattaaacggatcaacaagatcagaagaagacttgtgaaagacagcaacaccaagaaggccggcaagacaggccccatgaaaaccctgctggttagagtgatgacacccgatctgagagagcggctggaaaacctgagaaagaagcctgaaaatatcccccagcccatcagcaatacatctagagccaacctgaataagctgctgaccgattacaccgaaatgaagaaggcgatcctgcatgtgtactgggaagagttccagaaggaccctgtgggcctgatgagccgggtggcccagcctgccagcaagaagatcgatcagaacaagctgaaacctgagatggacgagaagggcaacctgaccaccgccggctttgcctgctctcagtgtggccagcccctgttcgtgtacaagctggagcaggtgtctgagaagggcaaggcttacaccaactacttcggacggtgcaatgtggccgagcacgaaaagctgatcctgctggcccagctgaagcccgagaaggatagcgacgaagccgtgacatatagcctgggaaagtttgggcagagggccctggatttctacagcattcatgtgaccaaggagtccacccaccccgtgaagcccctggcccagatcgccggaaacagatacgcctccggacctgtgggaaaggccctgagcgacgcatgtatgggcacaatcgcctccttcctgtctaagtaccaggacatcatcatcgaacaccagaaggtggtgaagggcaaccagaagagactggagagcctgcgggagctggccggcaaggaaaacctggaataccctagcgtgaccctgccacctcagcctcacaccaaggagggcgttgatgcctacaacgaagtgatcgcccgggtgcgaatgtgggtgaacctgaacctgtggcagaagctgaagctaagcagagatgatgccaagcctctgctgagactgaagggattcccttcctttcctctggtcgagagacaggccaacgaagtggactggtgggacatggtgtgtaacgtgaagaagctgatcaacgagaaaaaggaggatggcaaggtgttttggcagaatctggctggctacaagagacaggaagccctgagaccatacctgagcagcgaggaagatcggaagaagggaaagaaattcgctcggtaccagctgggcgacctgctgctgcacctggaaaagaagcacggcgaggactggggaaaggtgtacgacgaggcctgggagcggattgacaagaaagtggaaggcctgagcaagcacatcaagctggaagaggaacggagaagcgaggacgcccagagcaaggccgccctgaccgactggctgcgggctaaggccagcttcgtgatcgagggcctgaaggaggccgacaaggacgagttctgcagatgcgagctgaagctgcagaagtggtacggggacctgcggggaaagcccttcgccatcgaagccgagaacagcatcctggacatcagcggcttcagcaagcagtacaactgtgccttcatctggcagaaggacggcgtgaagaagctgaacctgtacctgatcatcaactacttcaagggcggcaagctgcggttcaagaagatcaaacctgaagccttcgaagccaacagattctacaccgtgatcaacaaaaagagcggcgagatcgtgcccatggaggtgaacttcaacttcgacgaccccaacctgatcatcctgcctctggcctttggcaagagacagggcagagaattcatctggaacgacctgctgtccctggaaaccggcagcctgaagctggccaacggaagagtgatcgagaagacactgtacaacagaagaacccggcaggatgagcctgccctgttcgtggccctgaccttcgagcggcgggaggtcctggactcctccaatatcaaaccaatgaacctgatcggcgtggcaagaggcgaaaacatccccgccgtgatcgccctgaccgaccccgagggctgcccactgagccggtttaaggatagcctgggaaacccaacccacatcctgagaatcggcgagagctataaggagaagcagcggaccatccaggccaagaaggaggtggagcagcggagagccggcggctacagccggaagtacgccagcaaagccaagaatctggcagacgatatggtgagaaacaccgctagagatctgctgtactacgccgtgacccaggatgccatgctgatcttcgccaacctgagccggggcttcggccggcagggcaagcggaccttcatggccgagagacagtacacacggatggaggactggctgaccgccaagctggcctacgagggcctgagcaagacctacctgtccaagacactggcccagtacacctccaagacatgcagcaactgtgggtttaccatcaccagcgccgactacgacagggtgctggagaagctgaagaagacagcaacaggctggatgaccacaattaacggcaaggagctgaaggtggagggccagattacctactacaacagatacaagagacagaacgtagtcaaggacctgtccgtcgagctggatagactgagcgaagaatctgtgaacaacgacatctcctcctggacaaagggcagaagcggagaagctctgagcctcctgaagaaaagattctcccatagacccgtgcaggagaagttcgtgtgcctgaactgcggcttcgagacacacgcagccgagcaagccgccctgaacatcgccagatcctggctgttcctgcggagccaggagtacaagaaataccagacaaacaagacaaccggcaacaccgataagagagccttcgtcgagacctggcagtccttttaccggaagaagcttaaggaggtgtggaaacctgccgtgcggtctggcggatctggcggaggctcctgtgcacggcagcgtgaccttcagggacgtggccatcgacttctgccaggaggagtgggagtgcctgggccccatccagagggacctgtacagggacgtgatgctggagaactacagcaacctgatcgccgtgggcagcaccatcagcaagcccgacgtgatcgccctgctggagcagggcaccgagccctggatgggcgtgaggaaggacaggagcaggtggtaccccggcctgaacagcggcggatctggctccggcagcggccccaagaaaaagagaaaagtctaagctgccttctgcggggcttgccttctggccatgcccttcttctctcccttgcacctgtacctcttggtctttgaataaagcctgagtaggaaggctagcaaaaaaaaaaaaaaaaaaaaaaaaaaaaaaaaaaaaaaaaaaaaaaaaaaaaaaaaaaaaaaaaaaaaaaaaaaaaaaaa

SEQ ID NO: 16685 - RNA, 9485 nt, synthetic construct
  source 1..9485: mol_type = other RNA
aggaaataagagagaaaagaagagtaagaagaaatataagagccaccatggcccctaagaagaagcgtaaagtgagccggatggaacgcctcgtctacgaggtgcggcagaagtgcagaaacatcgaggacatctgcatctcctgcggatctctgaacgtgaccctggagcacccactgttcatcggcggcatgtgccagaactgtaaaaactgttttctggagtgtgcctatcaatacgacgatgacggctaccagagctactgcaccatctgttgcggcggaagagaggtgctgatgtgtggaaataacaactgctgccggtgcttctgcgtggaatgcgtggacctgctggtgggccccggcgccgcccaggccgctattaaggaagatccttggaactgctacatgtgcggccacaagggcacatacggcctgctgagacggagagaggactggcctagcagactgcagatgttcttcgccaataaccacgaccaggagttcgacccccctaaggtgtaccctcccgtccccgccgagaagagaaagcccatccgggtcctgagcctgttcgatggcatcgccaccggtctgctggtgctgaaggacctgggcatccaggtggataggtacattgcctccgaggtgtgcgaggactccatcaccgtgggaatggtgcgtcatcagggcaagatcatgtacgtgggcgacgtgcggagcgtgacacagaagcatatccaggagtggggccctttcgacctggtgatcggcggcagcccttgcaatgacctgagcatcgtgaacccagcccggaagggcctgtacgagggaaccggcagactgttcttcgagttttacagactgctgcacgacgcccggcctaaggaaggcgacgaccggcccttcttttggctgttcgagaatgtggtggccatgggagtcagcgacaagcgggatattagccggttcctggagagcaaccccgtgatgatcgatgccaaggaagtgagcgccgcccaccgggccagatacttctggggcaatctgcctggcatgaacagacccctggccagcaccgtgaacgacaagctggagctgcaggagtgcctggagcacggccggatcgccaagttcagcaaggtgagaaccatcaccacccgaagcaacagcatcaaacaaggcaaggaccagcactttcctgtgttcatgaacgagaaggaggacatcctgtggtgtaccgagatggagagagtgttcgggttcccagtccactacacagatgtcagcaacatgtctagactggccagacagagactgctgggaagaagctggtccgtccctgtgatcagacacctgttcgcccctctgaaggagtacttcgcctgcgtgagcagcggcaacagcaacgccaacagccggggccccagcttctctagcggcctggtgccactgtccctgagagggagccacatgggccccatggagatctacaaaaccgtgagcgcctggaagcggcagcctgtgcgcgtgctgagcctgtttcggaatatcgataaagtcctgaaaagcctgggattcctggagagcggctctggctccggcggtggcaccctgaagtacgtggaggatgtgacaaacgtggtcagacgggatgtggagaagtggggccccttcgatctggtgtacggcagcacccaacccctgggcagctcttgtgaccggtgccctggctggtacatgtttcagttccaccggatcctgcagtacgccctgccgagacaggagtcccagcggccattcttttggattttcatggacaacttgctgctgaccgaggatgaccaggaaactaccactcggttcctgcagaccgaagccgtgaccctgcaggacgtgagaggccgggactaccagaacgccatgcgggtgtggtccaacatccctggactgaaaagcaagcacgcacctctgacccctaaagaagaggagtacctgcaggcccaggtgcggagcagaagcaagctggacgcccctaaggtggatctgctggtgaagaattgcctcctgcccctgagagagtacttcaagtatttcagccagaatagtctgcccctgggaggcagcggcggcggcgccctggtgacatttgaggacgtcgccgtgcggttcacccaggaggaatgggctctgctggatccttctcagaaaatcctgtaccgggacgtgatgagagagacataccggaatctgacctccgtgggcatcaactgggaatgttgggaccttgaagcctgcttcagaagcctgggaagaaacctgagagtgcaggtggtgaagagaaagtgcgagctgaccaacagcggcccctgcgccgagggcggcccaagcagcggcgcccctcctcccagcggcggcagcccagccggctccccaacctctaccgaggagggcacctctgagtccgccacccccgagagcggccctggcacctccaccgagcccagcgagggcagcgcacccggcagccctgccggcagccccacctccacagaggagggaaccagcaccgagcccagcgaaggcagcgccccaggcaccagcaccgagcctagtgagcaggagattaaacggatcaacaagatcagaagaagacttgtgaaagacagcaacaccaagaaggccggcaagacaggccccatgaaaaccctgctggttagagtgatgacacccgatctgagagagcggctggaaaacctgagaaagaagcctgaaaatatcccccagcccatcagcaatacatctagagccaacctgaataagctgctgaccgattacaccgaaatgaagaaggcgatcctgcatgtgtactgggaagagttccagaaggaccctgtgggcctgatgagccgggtggcccagcctgccagcaagaagatcgatcagaacaagctgaaacctgagatggacgagaagggcaacctgaccaccgccggctttgcctgctctcagtgtggccagcccctgttcgtgtacaagctggagcaggtgtctgagaagggcaaggcttacaccaactacttcggacggtgcaatgtggccgagcacgaaaagctgatcctgctggcccagctgaagcccgagaaggatagcgacgaagccgtgacatatagcctgggaaagtttgggcagagggccctggatttctacagcattcatgtgaccaaggagtccacccaccccgtgaagcccctggcccagatcgccggaaacagatacgcctccggacctgtgggaaaggccctgagcgacgcatgtatgggcacaatcgcctccttcctgtctaagtaccaggacatcatcatcgaacaccagaaggtggtgaagggcaaccagaagagactggagagcctgcgggagctggccggcaaggaaaacctggaataccctagcgtgaccctgccacctcagcctcacaccaaggagggcgttgatgcctacaacgaagtgatcgcccgggtgcgaatgtgggtgaacctgaacctgtggcagaagctgaagctaagcagagatgatgccaagcctctgctgagactgaagggattcccttcctttcctctggtcgagagacaggccaacgaagtggactggtgggacatggtgtgtaacgtgaagaagctgatcaacgagaaaaaggaggatggcaaggtgttttggcagaatctggctggctacaagagacaggaagccctgagaccatacctgagcagcgaggaagatcggaagaagggaaagaaattcgctcggtaccagctgggcgacctgctgctgcacctggaaaagaagcacggcgaggactggggaaaggtgtacgacgaggcctgggagcggattgacaagaaagtggaaggcctgagcaagcacatcaagctggaagaggaacggagaagcgaggacgcccagagcaaggccgccctgaccgactggctgcgggctaaggccagcttcgtgatcgagggcctgaaggaggccgacaaggacgagttctgcagatgcgagctgaagctgcagaagtggtacggggacctgcggggaaagcccttcgccatcgaagccgagaacagcatcctggacatcagcggcttcagcaagcagtacaactgtgccttcatctggcagaaggacggcgtgaagaagctgaacctgtacctgatcatcaactacttcaagggcggcaagctgcggttcaagaagatcaaacctgaagccttcgaagccaacagattctacaccgtgatcaacaaaaagagcggcgagatcgtgcccatggaggtgaacttcaacttcgacgaccccaacctgatcatcctgcctctggcctttggcaagagacagggcagagaattcatctggaacgacctgctgtccctggaaaccggcagcctgaagctggccaacggaagagtgatcgagaagacactgtacaacagaagaacccggcaggatgagcctgccctgttcgtggccctgaccttcgagcggcgggaggtcctggactcctccaatatcaaaccaatgaacctgatcggcgtggcaagaggcgaaaacatccccgccgtgatcgccctgaccgaccccgagggctgcccactgagccggtttaaggatagcctgggaaacccaacccacatcctgagaatcggcgagagctataaggagaagcagcggaccatccaggccaagaaggaggtggagcagcggagagccggcggctacagccggaagtacgccagcaaagccaagaatctggcagacgatatggtgagaaacaccgctagagatctgctgtactacgccgtgacccaggatgccatgctgatcttcgccaacctgagccggggcttcggccggcagggcaagcggaccttcatggccgagagacagtacacacggatggaggactggctgaccgccaagctggcctacgagggcctgagcaagacctacctgtccaagacactggcccagtacacctccaagacatgcagcaactgtgggtttaccatcaccagcgccgactacgacagggtgctggagaagctgaagaagacagcaacaggctggatgaccacaattaacggcaaggagctgaaggtggagggccagattacctactacaacagatacaagagacagaacgtagtcaaggacctgtccgtcgagctggatagactgagcgaagaatctgtgaacaacgacatctcctcctggacaaagggcagaagcggagaagctctgagcctcctgaagaaaagattctcccatagacccgtgcaggagaagttcgtgtgcctgaactgcggcttcgagacacacgcagccgagcaagccgccctgaacatcgccagatcctggctgttcctgcggagccaggagtacaagaaataccagacaaacaagacaaccggcaacaccgataagagagccttcgtcgagacctggcagtccttttaccggaagaagcttaaggaggtgtggaaacctgccgtgcggtctggcggatctggcggaggctccttccaggaggccgtgaccttcaaggacgtggccgtggtgttcagcgaggaggagctgggcctgctggaccccacccagaggaagctgtacagggacgtgatgctggagaacttcaggaacctggtgagcctgggccacagcagcagcaagcccgacgtgatcagccagctggagagggaggagaagctgtgcaccaaggagttccacacccagggcggcggcaggaaccagaaggagatggagggcggcccaagcagcggcgcccctcctcccagcggcggcagcccagccggctccccaacctctaccgaggagggcacctctgagtccgccacccccgagagcggccctggcacctccaccgagcccagcgagggcagcgcacccggcagccctgccggcagccccacctccacagaggagggaaccagcaccgagcccagcgaaggcagcgccccaggcaccagcaccgagcctagtgagcaggagattaaacggatcaacaagatcagaagaagacttgtgaaagacagcaacaccaagaaggccggcaagacaggccccatgaaaaccctgctggttagagtgatgacacccgatctgagagagcggctggaaaacctgagaaagaagcctgaaaatatcccccagcccatcagcaatacatctagagccaacctgaataagctgctgaccgattacaccgaaatgaagaaggcgatcctgcatgtgtactgggaagagttccagaaggaccctgtgggcctgatgagccgggtggcccagcctgccagcaagaagatcgatcagaacaagctgaaacctgagatggacgagaagggcaacctgaccaccgccggctttgcctgctctcagtgtggccagcccctgttcgtgtacaagctggagcaggtgtctgagaagggcaaggcttacaccaactacttcggacggtgcaatgtggccgagcacgaaaagctgatcctgctggcccagctgaagcccgagaaggatagcgacgaagccgtgacatatagcctgggaaagtttgggcagagggccctggatttctacagcattcatgtgaccaaggagtccacccaccccgtgaagcccctggcccagatcgccggaaacagatacgcctccggacctgtgggaaaggccctgagcgacgcatgtatgggcacaatcgcctccttcctgtctaagtaccaggacatcatcatcgaacaccagaaggtggtgaagggcaaccagaagagactggagagcctgcgggagctggccggcaaggaaaacctggaataccctagcgtgaccctgccacctcagcctcacaccaaggagggcgttgatgcctacaacgaagtgatcgcccgggtgcgaatgtgggtgaacctgaacctgtggcagaagctgaagctaagcagagatgatgccaagcctctgctgagactgaagggattcccttcctttcctctggtcgagagacaggccaacgaagtggactggtgggacatggtgtgtaacgtgaagaagctgatcaacgagaaaaaggaggatggcaaggtgttttggcagaatctggctggctacaagagacaggaagccctgagaccatacctgagcagcgaggaagatcggaagaagggaaagaaattcgctcggtaccagctgggcgacctgctgctgcacctggaaaagaagcacggcgaggactggggaaaggtgtacgacgaggcctgggagcggattgacaagaaagtggaaggcctgagcaagcacatcaagctggaagaggaacggagaagcgaggacgcccagagcaaggccgccctgaccgactggctgcgggctaaggccagcttcgtgatcgagggcctgaaggaggccgacaaggacgagttctgcagatgcgagctgaagctgcagaagtggtacggggacctgcggggaaagcccttcgccatcgaagccgagaacagcatcctggacatcagcggcttcagcaagcagtacaactgtgccttcatctggcagaaggacggcgtgaagaagctgaacctgtacctgatcatcaactacttcaagggcggcaagctgcggttcaagaagatcaaacctgaagccttcgaagccaacagattctacaccgtgatcaacaaaaagagcggcgagatcgtgcccatggaggtgaacttcaacttcgacgaccccaacctgatcatcctgcctctggcctttggcaagagacagggcagagaattcatctggaacgacctgctgtccctggaaaccggcagcctgaagctggccaacggaagagtgatcgagaagacactgtacaacagaagaacccggcaggatgagcctgccctgttcgtggccctgaccttcgagcggcgggaggtcctggactcctccaatatcaaaccaatgaacctgatcggcgtggcaagaggcgaaaacatccccgccgtgatcgccctgaccgaccccgagggctgcccactgagccggtttaaggatagcctgggaaacccaacccacatcctgagaatcggcgagagctataaggagaagcagcggaccatccaggccaagaaggaggtggagcagcggagagccggcggctacagccggaagtacgccagcaaagccaagaatctggcagacgatatggtgagaaacaccgctagagatctgctgtactacgccgtgacccaggatgccatgctgatcttcgccaacctgagccggggcttcggccggcagggcaagcggaccttcatggccgagagacagtacacacggatggaggactggctgaccgccaagctggcctacgagggcctgagcaagacctacctgtccaagacactggcccagtacacctccaagacatgcagcaactgtgggtttaccatcaccagcgccgactacgacagggtgctggagaagctgaagaagacagcaacaggctggatgaccacaattaacggcaaggagctgaaggtggagggccagattacctactacaacagatacaagagacagaacgtagtcaaggacctgtccgtcgagctggatagactgagcgaagaatctgtgaacaacgacatctcctcctggacaaagggcagaagcggagaagctctgagcctcctgaagaaaagattctcccatagacccgtgcaggagaagttcgtgtgcctgaactgcggcttcgagacacacgcagccgagcaagccgccctgaacatcgccagatcctggctgttcctgcggagccaggagtacaagaaataccagacaaacaagacaaccggcaacaccgataagagagccttcgtcgagacctggcagtccttttaccggaagaagcttaaggaggtgtggaaacctgccgtgcggtctggcggatctggcggaggctcctttccaggaggccgtgaccttcaaggacgtggccgtggtgttcagcgaggaggagctgggcctgctggaccccacccagaggaagctgtacagggacgtgatgctggagaacttcaggaacctggtgagcctgggccacagcagcagcaagcccgacgtgatcagccagctggagagggaggagaagctgtgcaccaaggagttccacacccagggcggcggcaggaaccagaaggagatggagggatctggctccggcagcggccccaagaaaaagagaaaagtctaagctgccttctgcggggcttgccttctggccatgcccttcttctctcccttgcacctgtacctcttggtctttgaataaagcctgagtaggaaggctagcaaaaaaaaaaaaaaaaaaaaaaaaaaaaaaaaaaaaaaaaaaaaaaaaaaaaaaaaaaaaaaaaaaaaaaaaaaaaaaaa

SEQ ID NO: 16686 - RNA, 9485 nt, synthetic construct
  source 1..9485: mol_type = other RNA
aggaaataagagagaaaagaagagtaagaagaaatataagagccaccatggcccctaagaagaagcgtaaagtgagccggatggaacgcctcgtctacgaggtgcggcagaagtgcagaaacatcgaggacatctgcatctcctgcggatctctgaacgtgaccctggagcacccactgttcatcggcggcatgtgccagaactgtaaaaactgttttctggagtgtgcctatcaatacgacgatgacggctaccagagctactgcaccatctgttgcggcggaagagaggtgctgatgtgtggaaataacaactgctgccggtgcttctgcgtggaatgcgtggacctgctggtgggccccggcgccgcccaggccgctattaaggaagatccttggaactgctacatgtgcggccacaagggcacatacggcctgctgagacggagagaggactggcctagcagactgcagatgttcttcgccaataaccacgaccaggagttcgacccccctaaggtgtaccctcccgtccccgccgagaagagaaagcccatccgggtcctgagcctgttcgatggcatcgccaccggtctgctggtgctgaaggacctgggcatccaggtggataggtacattgcctccgaggtgtgcgaggactccatcaccgtgggaatggtgcgtcatcagggcaagatcatgtacgtgggcgacgtgcggagcgtgacacagaagcatatccaggagtggggccctttcgacctggtgatcggcggcagcccttgcaatgacctgagcatcgtgaacccagcccggaagggcctgtacgagggaaccggcagactgttcttcgagttttacagactgctgcacgacgcccggcctaaggaaggcgacgaccggcccttcttttggctgttcgagaatgtggtggccatgggagtcagcgacaagcgggatattagccggttcctggagagcaaccccgtgatgatcgatgccaaggaagtgagcgccgcccaccgggccagatacttctggggcaatctgcctggcatgaacagacccctggccagcaccgtgaacgacaagctggagctgcaggagtgcctggagcacggccggatcgccaagttcagcaaggtgagaaccatcaccacccgaagcaacagcatcaaacaaggcaaggaccagcactttcctgtgttcatgaacgagaaggaggacatcctgtggtgtaccgagatggagagagtgttcgggttcccagtccactacacagatgtcagcaacatgtctagactggccagacagagactgctgggaagaagctggtccgtccctgtgatcagacacctgttcgcccctctgaaggagtacttcgcctgcgtgagcagcggcaacagcaacgccaacagccggggccccagcttctctagcggcctggtgccactgtccctgagagggagccacatgggccccatggagatctacaaaaccgtgagcgcctggaagcggcagcctgtgcgcgtgctgagcctgtttcggaatatcgataaagtcctgaaaagcctgggattcctggagagcggctctggctccggcggtggcaccctgaagtacgtggaggatgtgacaaacgtggtcagacgggatgtggagaagtggggccccttcgatctggtgtacggcagcacccaacccctgggcagctcttgtgaccggtgccctggctggtacatgtttcagttccaccggatcctgcagtacgccctgccgagacaggagtcccagcggccattcttttggattttcatggacaacttgctgctgaccgaggatgaccaggaaactaccactcggttcctgcagaccgaagccgtgaccctgcaggacgtgagaggccgggactaccagaacgccatgcgggtgtggtccaacatccctggactgaaaagcaagcacgcacctctgacccctaaagaagaggagtacctgcaggcccaggtgcggagcagaagcaagctggacgcccctaaggtggatctgctggtgaagaattgcctcctgcccctgagagagtacttcaagtatttcagccagaatagtctgcccctgggaggcagcggcggcggcgccctggtgacatttgaggacgtcgccgtgcggttcacccaggaggaatgggctctgctggatccttctcagaaaatcctgtaccgggacgtgatgagagagacataccggaatctgacctccgtgggcatcaactgggaatgttgggaccttgaagcctgcttcagaagcctgggaagaaacctgagagtgcaggtggtgaagagaaagtgcgagctgaccaacagcggcccctgcgccgagggcggcccaagcagcggcgcccctcctcccagcggcggcagcccagccggctccccaacctctaccgaggagggcacctctgagtccgccacccccgagagcggccctggcacctccaccgagcccagcgagggcagcgcacccggcagccctgccggcagccccacctccacagaggagggaaccagcaccgagcccagcgaaggcagcgccccaggcaccagcaccgagcctagtgagcaggagattaaacggatcaacaagatcagaagaagacttgtgaaagacagcaacaccaagaaggccggcaagacaggccccatgaaaaccctgctggttagagtgatgacacccgatctgagagagcggctggaaaacctgagaaagaagcctgaaaatatcccccagcccatcagcaatacatctagagccaacctgaataagctgctgaccgattacaccgaaatgaagaaggcgatcctgcatgtgtactgggaagagttccagaaggaccctgtgggcctgatgagccgggtggcccagcctgccagcaagaagatcgatcagaacaagctgaaacctgagatggacgagaagggcaacctgaccaccgccggctttgcctgctctcagtgtggccagcccctgttcgtgtacaagctggagcaggtgtctgagaagggcaaggcttacaccaactacttcggacggtgcaatgtggccgagcacgaaaagctgatcctgctggcccagctgaagcccgagaaggatagcgacgaagccgtgacatatagcctgggaaagtttgggcagagggccctggatttctacagcattcatgtgaccaaggagtccacccaccccgtgaagcccctggcccagatcgccggaaacagatacgcctccggacctgtgggaaaggccctgagcgacgcatgtatgggcacaatcgcctccttcctgtctaagtaccaggacatcatcatcgaacaccagaaggtggtgaagggcaaccagaagagactggagagcctgcgggagctggccggcaaggaaaacctggaataccctagcgtgaccctgccacctcagcctcacaccaaggagggcgttgatgcctacaacgaagtgatcgcccgggtgcgaatgtgggtgaacctgaacctgtggcagaagctgaagctaagcagagatgatgccaagcctctgctgagactgaagggattcccttcctttcctctggtcgagagacaggccaacgaagtggactggtgggacatggtgtgtaacgtgaagaagctgatcaacgagaaaaaggaggatggcaaggtgttttggcagaatctggctggctacaagagacaggaagccctgagaccatacctgagcagcgaggaagatcggaagaagggaaagaaattcgctcggtaccagctgggcgacctgctgctgcacctggaaaagaagcacggcgaggactggggaaaggtgtacgacgaggcctgggagcggattgacaagaaagtggaaggcctgagcaagcacatcaagctggaagaggaacggagaagcgaggacgcccagagcaaggccgccctgaccgactggctgcgggctaaggccagcttcgtgatcgagggcctgaaggaggccgacaaggacgagttctgcagatgcgagctgaagctgcagaagtggtacggggacctgcggggaaagcccttcgccatcgaagccgagaacagcatcctggacatcagcggcttcagcaagcagtacaactgtgccttcatctggcagaaggacggcgtgaagaagctgaacctgtacctgatcatcaactacttcaagggcggcaagctgcggttcaagaagatcaaacctgaagccttcgaagccaacagattctacaccgtgatcaacaaaaagagcggcgagatcgtgcccatggaggtgaacttcaacttcgacgaccccaacctgatcatcctgcctctggcctttggcaagagacagggcagagaattcatctggaacgacctgctgtccctggaaaccggcagcctgaagctggccaacggaagagtgatcgagaagacactgtacaacagaagaacccggcaggatgagcctgccctgttcgtggccctgaccttcgagcggcgggaggtcctggactcctccaatatcaaaccaatgaacctgatcggcgtggcaagaggcgaaaacatccccgccgtgatcgccctgaccgaccccgagggctgcccactgagccggtttaaggatagcctgggaaacccaacccacatcctgagaatcggcgagagctataaggagaagcagcggaccatccaggccaagaaggaggtggagcagcggagagccggcggctacagccggaagtacgccagcaaagccaagaatctggcagacgatatggtgagaaacaccgctagagatctgctgtactacgccgtgacccaggatgccatgctgatcttcgccaacctgagccggggcttcggccggcagggcaagcggaccttcatggccgagagacagtacacacggatggaggactggctgaccgccaagctggcctacgagggcctgagcaagacctacctgtccaagacactggcccagtacacctccaagacatgcagcaactgtgggtttaccatcaccagcgccgactacgacagggtgctggagaagctgaagaagacagcaacaggctggatgaccacaattaacggcaaggagctgaaggtggagggccagattacctactacaacagatacaagagacagaacgtagtcaaggacctgtccgtcgagctggatagactgagcgaagaatctgtgaacaacgacatctcctcctggacaaagggcagaagcggagaagctctgagcctcctgaagaaaagattctcccatagacccgtgcaggagaagttcgtgtgcctgaactgcggcttcgagacacacgcagccgagcaagccgccctgaacatcgccagatcctggctgttcctgcggagccaggagtacaagaaataccagacaaacaagacaaccggcaacaccgataagagagccttcgtcgagacctggcagtccttttaccggaagaagcttaaggaggtgtggaaacctgccgtgcggtctggcggatctggcggaggctcccagctgcaggagaccatgaccttcaaggacgtggaggtgaccttcagccaggacgagtggggcctgctggacagcgcccagaggaacctgtacagggacgtgatgctggagaactacaggaacatggccttcctggtgggccccttcaccaagcccgccctgatcagctggctggaggccagggagccctggggcctgaacgtgcaggtggcccagcccaagaggaaccccggcgccgcccccggcggcccaagcagcggcgcccctcctcccagcggcggcagcccagccggctccccaacctctaccgaggagggcacctctgagtccgccacccccgagagcggccctggcacctccaccgagcccagcgagggcagcgcacccggcagccctgccggcagccccacctccacagaggagggaaccagcaccgagcccagcgaaggcagcgccccaggcaccagcaccgagcctagtgagcaggagattaaacggatcaacaagatcagaagaagacttgtgaaagacagcaacaccaagaaggccggcaagacaggccccatgaaaaccctgctggttagagtgatgacacccgatctgagagagcggctggaaaacctgagaaagaagcctgaaaatatcccccagcccatcagcaatacatctagagccaacctgaataagctgctgaccgattacaccgaaatgaagaaggcgatcctgcatgtgtactgggaagagttccagaaggaccctgtgggcctgatgagccgggtggcccagcctgccagcaagaagatcgatcagaacaagctgaaacctgagatggacgagaagggcaacctgaccaccgccggctttgcctgctctcagtgtggccagcccctgttcgtgtacaagctggagcaggtgtctgagaagggcaaggcttacaccaactacttcggacggtgcaatgtggccgagcacgaaaagctgatcctgctggcccagctgaagcccgagaaggatagcgacgaagccgtgacatatagcctgggaaagtttgggcagagggccctggatttctacagcattcatgtgaccaaggagtccacccaccccgtgaagcccctggcccagatcgccggaaacagatacgcctccggacctgtgggaaaggccctgagcgacgcatgtatgggcacaatcgcctccttcctgtctaagtaccaggacatcatcatcgaacaccagaaggtggtgaagggcaaccagaagagactggagagcctgcgggagctggccggcaaggaaaacctggaataccctagcgtgaccctgccacctcagcctcacaccaaggagggcgttgatgcctacaacgaagtgatcgcccgggtgcgaatgtgggtgaacctgaacctgtggcagaagctgaagctaagcagagatgatgccaagcctctgctgagactgaagggattcccttcctttcctctggtcgagagacaggccaacgaagtggactggtgggacatggtgtgtaacgtgaagaagctgatcaacgagaaaaaggaggatggcaaggtgttttggcagaatctggctggctacaagagacaggaagccctgagaccatacctgagcagcgaggaagatcggaagaagggaaagaaattcgctcggtaccagctgggcgacctgctgctgcacctggaaaagaagcacggcgaggactggggaaaggtgtacgacgaggcctgggagcggattgacaagaaagtggaaggcctgagcaagcacatcaagctggaagaggaacggagaagcgaggacgcccagagcaaggccgccctgaccgactggctgcgggctaaggccagcttcgtgatcgagggcctgaaggaggccgacaaggacgagttctgcagatgcgagctgaagctgcagaagtggtacggggacctgcggggaaagcccttcgccatcgaagccgagaacagcatcctggacatcagcggcttcagcaagcagtacaactgtgccttcatctggcagaaggacggcgtgaagaagctgaacctgtacctgatcatcaactacttcaagggcggcaagctgcggttcaagaagatcaaacctgaagccttcgaagccaacagattctacaccgtgatcaacaaaaagagcggcgagatcgtgcccatggaggtgaacttcaacttcgacgaccccaacctgatcatcctgcctctggcctttggcaagagacagggcagagaattcatctggaacgacctgctgtccctggaaaccggcagcctgaagctggccaacggaagagtgatcgagaagacactgtacaacagaagaacccggcaggatgagcctgccctgttcgtggccctgaccttcgagcggcgggaggtcctggactcctccaatatcaaaccaatgaacctgatcggcgtggcaagaggcgaaaacatccccgccgtgatcgccctgaccgaccccgagggctgcccactgagccggtttaaggatagcctgggaaacccaacccacatcctgagaatcggcgagagctataaggagaagcagcggaccatccaggccaagaaggaggtggagcagcggagagccggcggctacagccggaagtacgccagcaaagccaagaatctggcagacgatatggtgagaaacaccgctagagatctgctgtactacgccgtgacccaggatgccatgctgatcttcgccaacctgagccggggcttcggccggcagggcaagcggaccttcatggccgagagacagtacacacggatggaggactggctgaccgccaagctggcctacgagggcctgagcaagacctacctgtccaagacactggcccagtacacctccaagacatgcagcaactgtgggtttaccatcaccagcgccgactacgacagggtgctggagaagctgaagaagacagcaacaggctggatgaccacaattaacggcaaggagctgaaggtggagggccagattacctactacaacagatacaagagacagaacgtagtcaaggacctgtccgtcgagctggatagactgagcgaagaatctgtgaacaacgacatctcctcctggacaaagggcagaagcggagaagctctgagcctcctgaagaaaagattctcccatagacccgtgcaggagaagttcgtgtgcctgaactgcggcttcgagacacacgcagccgagcaagccgccctgaacatcgccagatcctggctgttcctgcggagccaggagtacaagaaataccagacaaacaagacaaccggcaacaccgataagagagccttcgtcgagacctggcagtccttttaccggaagaagcttaaggaggtgtggaaacctgccgtgcggtctggcggatctggcggaggctcctcagctgcaggagaccatgaccttcaaggacgtggaggtgaccttcagccaggacgagtggggcctgctggacagcgcccagaggaacctgtacagggacgtgatgctggagaactacaggaacatggccttcctggtgggccccttcaccaagcccgccctgatcagctggctggaggccagggagccctggggcctgaacgtgcaggtggcccagcccaagaggaaccccggcgccgcccccggatctggctccggcagcggccccaagaaaaagagaaaagtctaagctgccttctgcggggcttgccttctggccatgcccttcttctctcccttgcacctgtacctcttggtctttgaataaagcctgagtaggaaggctagcaaaaaaaaaaaaaaaaaaaaaaaaaaaaaaaaaaaaaaaaaaaaaaaaaaaaaaaaaaaaaaaaaaaaaaaaaaaaaaaa

SEQ ID NO: 16687 - RNA, 9485 nt, synthetic construct
  source 1..9485: mol_type = other RNA
aggaaataagagagaaaagaagagtaagaagaaatataagagccaccatggcccctaagaagaagcgtaaagtgagccggatggaacgcctcgtctacgaggtgcggcagaagtgcagaaacatcgaggacatctgcatctcctgcggatctctgaacgtgaccctggagcacccactgttcatcggcggcatgtgccagaactgtaaaaactgttttctggagtgtgcctatcaatacgacgatgacggctaccagagctactgcaccatctgttgcggcggaagagaggtgctgatgtgtggaaataacaactgctgccggtgcttctgcgtggaatgcgtggacctgctggtgggccccggcgccgcccaggccgctattaaggaagatccttggaactgctacatgtgcggccacaagggcacatacggcctgctgagacggagagaggactggcctagcagactgcagatgttcttcgccaataaccacgaccaggagttcgacccccctaaggtgtaccctcccgtccccgccgagaagagaaagcccatccgggtcctgagcctgttcgatggcatcgccaccggtctgctggtgctgaaggacctgggcatccaggtggataggtacattgcctccgaggtgtgcgaggactccatcaccgtgggaatggtgcgtcatcagggcaagatcatgtacgtgggcgacgtgcggagcgtgacacagaagcatatccaggagtggggccctttcgacctggtgatcggcggcagcccttgcaatgacctgagcatcgtgaacccagcccggaagggcctgtacgagggaaccggcagactgttcttcgagttttacagactgctgcacgacgcccggcctaaggaaggcgacgaccggcccttcttttggctgttcgagaatgtggtggccatgggagtcagcgacaagcgggatattagccggttcctggagagcaaccccgtgatgatcgatgccaaggaagtgagcgccgcccaccgggccagatacttctggggcaatctgcctggcatgaacagacccctggccagcaccgtgaacgacaagctggagctgcaggagtgcctggagcacggccggatcgccaagttcagcaaggtgagaaccatcaccacccgaagcaacagcatcaaacaaggcaaggaccagcactttcctgtgttcatgaacgagaaggaggacatcctgtggtgtaccgagatggagagagtgttcgggttcccagtccactacacagatgtcagcaacatgtctagactggccagacagagactgctgggaagaagctggtccgtccctgtgatcagacacctgttcgcccctctgaaggagtacttcgcctgcgtgagcagcggcaacagcaacgccaacagccggggccccagcttctctagcggcctggtgccactgtccctgagagggagccacatgggccccatggagatctacaaaaccgtgagcgcctggaagcggcagcctgtgcgcgtgctgagcctgtttcggaatatcgataaagtcctgaaaagcctgggattcctggagagcggctctggctccggcggtggcaccctgaagtacgtggaggatgtgacaaacgtggtcagacgggatgtggagaagtggggccccttcgatctggtgtacggcagcacccaacccctgggcagctcttgtgaccggtgccctggctggtacatgtttcagttccaccggatcctgcagtacgccctgccgagacaggagtcccagcggccattcttttggattttcatggacaacttgctgctgaccgaggatgaccaggaaactaccactcggttcctgcagaccgaagccgtgaccctgcaggacgtgagaggccgggactaccagaacgccatgcgggtgtggtccaacatccctggactgaaaagcaagcacgcacctctgacccctaaagaagaggagtacctgcaggcccaggtgcggagcagaagcaagctggacgcccctaaggtggatctgctggtgaagaattgcctcctgcccctgagagagtacttcaagtatttcagccagaatagtctgcccctgggaggcagcggcggcggcgccctggtgacatttgaggacgtcgccgtgcggttcacccaggaggaatgggctctgctggatccttctcagaaaatcctgtaccgggacgtgatgagagagacataccggaatctgacctccgtgggcatcaactgggaatgttgggaccttgaagcctgcttcagaagcctgggaagaaacctgagagtgcaggtggtgaagagaaagtgcgagctgaccaacagcggcccctgcgccgagggcggcccaagcagcggcgcccctcctcccagcggcggcagcccagccggctccccaacctctaccgaggagggcacctctgagtccgccacccccgagagcggccctggcacctccaccgagcccagcgagggcagcgcacccggcagccctgccggcagccccacctccacagaggagggaaccagcaccgagcccagcgaaggcagcgccccaggcaccagcaccgagcctagtgagcaggagattaaacggatcaacaagatcagaagaagacttgtgaaagacagcaacaccaagaaggccggcaagacaggccccatgaaaaccctgctggttagagtgatgacacccgatctgagagagcggctggaaaacctgagaaagaagcctgaaaatatcccccagcccatcagcaatacatctagagccaacctgaataagctgctgaccgattacaccgaaatgaagaaggcgatcctgcatgtgtactgggaagagttccagaaggaccctgtgggcctgatgagccgggtggcccagcctgccagcaagaagatcgatcagaacaagctgaaacctgagatggacgagaagggcaacctgaccaccgccggctttgcctgctctcagtgtggccagcccctgttcgtgtacaagctggagcaggtgtctgagaagggcaaggcttacaccaactacttcggacggtgcaatgtggccgagcacgaaaagctgatcctgctggcccagctgaagcccgagaaggatagcgacgaagccgtgacatatagcctgggaaagtttgggcagagggccctggatttctacagcattcatgtgaccaaggagtccacccaccccgtgaagcccctggcccagatcgccggaaacagatacgcctccggacctgtgggaaaggccctgagcgacgcatgtatgggcacaatcgcctccttcctgtctaagtaccaggacatcatcatcgaacaccagaaggtggtgaagggcaaccagaagagactggagagcctgcgggagctggccggcaaggaaaacctggaataccctagcgtgaccctgccacctcagcctcacaccaaggagggcgttgatgcctacaacgaagtgatcgcccgggtgcgaatgtgggtgaacctgaacctgtggcagaagctgaagctaagcagagatgatgccaagcctctgctgagactgaagggattcccttcctttcctctggtcgagagacaggccaacgaagtggactggtgggacatggtgtgtaacgtgaagaagctgatcaacgagaaaaaggaggatggcaaggtgttttggcagaatctggctggctacaagagacaggaagccctgagaccatacctgagcagcgaggaagatcggaagaagggaaagaaattcgctcggtaccagctgggcgacctgctgctgcacctggaaaagaagcacggcgaggactggggaaaggtgtacgacgaggcctgggagcggattgacaagaaagtggaaggcctgagcaagcacatcaagctggaagaggaacggagaagcgaggacgcccagagcaaggccgccctgaccgactggctgcgggctaaggccagcttcgtgatcgagggcctgaaggaggccgacaaggacgagttctgcagatgcgagctgaagctgcagaagtggtacggggacctgcggggaaagcccttcgccatcgaagccgagaacagcatcctggacatcagcggcttcagcaagcagtacaactgtgccttcatctggcagaaggacggcgtgaagaagctgaacctgtacctgatcatcaactacttcaagggcggcaagctgcggttcaagaagatcaaacctgaagccttcgaagccaacagattctacaccgtgatcaacaaaaagagcggcgagatcgtgcccatggaggtgaacttcaacttcgacgaccccaacctgatcatcctgcctctggcctttggcaagagacagggcagagaattcatctggaacgacctgctgtccctggaaaccggcagcctgaagctggccaacggaagagtgatcgagaagacactgtacaacagaagaacccggcaggatgagcctgccctgttcgtggccctgaccttcgagcggcgggaggtcctggactcctccaatatcaaaccaatgaacctgatcggcgtggcaagaggcgaaaacatccccgccgtgatcgccctgaccgaccccgagggctgcccactgagccggtttaaggatagcctgggaaacccaacccacatcctgagaatcggcgagagctataaggagaagcagcggaccatccaggccaagaaggaggtggagcagcggagagccggcggctacagccggaagtacgccagcaaagccaagaatctggcagacgatatggtgagaaacaccgctagagatctgctgtactacgccgtgacccaggatgccatgctgatcttcgccaacctgagccggggcttcggccggcagggcaagcggaccttcatggccgagagacagtacacacggatggaggactggctgaccgccaagctggcctacgagggcctgagcaagacctacctgtccaagacactggcccagtacacctccaagacatgcagcaactgtgggtttaccatcaccagcgccgactacgacagggtgctggagaagctgaagaagacagcaacaggctggatgaccacaattaacggcaaggagctgaaggtggagggccagattacctactacaacagatacaagagacagaacgtagtcaaggacctgtccgtcgagctggatagactgagcgaagaatctgtgaacaacgacatctcctcctggacaaagggcagaagcggagaagctctgagcctcctgaagaaaagattctcccatagacccgtgcaggagaagttcgtgtgcctgaactgcggcttcgagacacacgcagccgagcaagccgccctgaacatcgccagatcctggctgttcctgcggagccaggagtacaagaaataccagacaaacaagacaaccggcaacaccgataagagagccttcgtcgagacctggcagtccttttaccggaagaagcttaaggaggtgtggaaacctgccgtgcggtctggcggatctggcggaggctcccagatcctggagagcctgaccttccaggacgtggccgtggacttcaccagggaggagtgggaccagctgtaccccgcccagaagaacctgtacagggacgtgatgctggagaactacaggaacctggtggccctgggccaccagctgtacaagcccgaggtgatcacccagctggagcaggaggagaggtggatgatgggcagggtgagcccccccgacacccaccccgacggcgagaacaggggcggcccaagcagcggcgcccctcctcccagcggcggcagcccagccggctccccaacctctaccgaggagggcacctctgagtccgccacccccgagagcggccctggcacctccaccgagcccagcgagggcagcgcacccggcagccctgccggcagccccacctccacagaggagggaaccagcaccgagcccagcgaaggcagcgccccaggcaccagcaccgagcctagtgagcaggagattaaacggatcaacaagatcagaagaagacttgtgaaagacagcaacaccaagaaggccggcaagacaggccccatgaaaaccctgctggttagagtgatgacacccgatctgagagagcggctggaaaacctgagaaagaagcctgaaaatatcccccagcccatcagcaatacatctagagccaacctgaataagctgctgaccgattacaccgaaatgaagaaggcgatcctgcatgtgtactgggaagagttccagaaggaccctgtgggcctgatgagccgggtggcccagcctgccagcaagaagatcgatcagaacaagctgaaacctgagatggacgagaagggcaacctgaccaccgccggctttgcctgctctcagtgtggccagcccctgttcgtgtacaagctggagcaggtgtctgagaagggcaaggcttacaccaactacttcggacggtgcaatgtggccgagcacgaaaagctgatcctgctggcccagctgaagcccgagaaggatagcgacgaagccgtgacatatagcctgggaaagtttgggcagagggccctggatttctacagcattcatgtgaccaaggagtccacccaccccgtgaagcccctggcccagatcgccggaaacagatacgcctccggacctgtgggaaaggccctgagcgacgcatgtatgggcacaatcgcctccttcctgtctaagtaccaggacatcatcatcgaacaccagaaggtggtgaagggcaaccagaagagactggagagcctgcgggagctggccggcaaggaaaacctggaataccctagcgtgaccctgccacctcagcctcacaccaaggagggcgttgatgcctacaacgaagtgatcgcccgggtgcgaatgtgggtgaacctgaacctgtggcagaagctgaagctaagcagagatgatgccaagcctctgctgagactgaagggattcccttcctttcctctggtcgagagacaggccaacgaagtggactggtgggacatggtgtgtaacgtgaagaagctgatcaacgagaaaaaggaggatggcaaggtgttttggcagaatctggctggctacaagagacaggaagccctgagaccatacctgagcagcgaggaagatcggaagaagggaaagaaattcgctcggtaccagctgggcgacctgctgctgcacctggaaaagaagcacggcgaggactggggaaaggtgtacgacgaggcctgggagcggattgacaagaaagtggaaggcctgagcaagcacatcaagctggaagaggaacggagaagcgaggacgcccagagcaaggccgccctgaccgactggctgcgggctaaggccagcttcgtgatcgagggcctgaaggaggccgacaaggacgagttctgcagatgcgagctgaagctgcagaagtggtacggggacctgcggggaaagcccttcgccatcgaagccgagaacagcatcctggacatcagcggcttcagcaagcagtacaactgtgccttcatctggcagaaggacggcgtgaagaagctgaacctgtacctgatcatcaactacttcaagggcggcaagctgcggttcaagaagatcaaacctgaagccttcgaagccaacagattctacaccgtgatcaacaaaaagagcggcgagatcgtgcccatggaggtgaacttcaacttcgacgaccccaacctgatcatcctgcctctggcctttggcaagagacagggcagagaattcatctggaacgacctgctgtccctggaaaccggcagcctgaagctggccaacggaagagtgatcgagaagacactgtacaacagaagaacccggcaggatgagcctgccctgttcgtggccctgaccttcgagcggcgggaggtcctggactcctccaatatcaaaccaatgaacctgatcggcgtggcaagaggcgaaaacatccccgccgtgatcgccctgaccgaccccgagggctgcccactgagccggtttaaggatagcctgggaaacccaacccacatcctgagaatcggcgagagctataaggagaagcagcggaccatccaggccaagaaggaggtggagcagcggagagccggcggctacagccggaagtacgccagcaaagccaagaatctggcagacgatatggtgagaaacaccgctagagatctgctgtactacgccgtgacccaggatgccatgctgatcttcgccaacctgagccggggcttcggccggcagggcaagcggaccttcatggccgagagacagtacacacggatggaggactggctgaccgccaagctggcctacgagggcctgagcaagacctacctgtccaagacactggcccagtacacctccaagacatgcagcaactgtgggtttaccatcaccagcgccgactacgacagggtgctggagaagctgaagaagacagcaacaggctggatgaccacaattaacggcaaggagctgaaggtggagggccagattacctactacaacagatacaagagacagaacgtagtcaaggacctgtccgtcgagctggatagactgagcgaagaatctgtgaacaacgacatctcctcctggacaaagggcagaagcggagaagctctgagcctcctgaagaaaagattctcccatagacccgtgcaggagaagttcgtgtgcctgaactgcggcttcgagacacacgcagccgagcaagccgccctgaacatcgccagatcctggctgttcctgcggagccaggagtacaagaaataccagacaaacaagacaaccggcaacaccgataagagagccttcgtcgagacctggcagtccttttaccggaagaagcttaaggaggtgtggaaacctgccgtgcggtctggcggatctggcggaggctcctcagatcctggagagcctgaccttccaggacgtggccgtggacttcaccagggaggagtgggaccagctgtaccccgcccagaagaacctgtacagggacgtgatgctggagaactacaggaacctggtggccctgggccaccagctgtacaagcccgaggtgatcacccagctggagcaggaggagaggtggatgatgggcagggtgagcccccccgacacccaccccgacggcgagaacaggggatctggctccggcagcggccccaagaaaaagagaaaagtctaagctgccttctgcggggcttgccttctggccatgcccttcttctctcccttgcacctgtacctcttggtctttgaataaagcctgagtaggaaggctagcaaaaaaaaaaaaaaaaaaaaaaaaaaaaaaaaaaaaaaaaaaaaaaaaaaaaaaaaaaaaaaaaaaaaaaaaaaaaaaaa

SEQ ID NO: 16688 - RNA, 9485 nt, synthetic construct
  source 1..9485: mol_type = other RNA
aggaaataagagagaaaagaagagtaagaagaaatataagagccaccatggcccctaagaagaagcgtaaagtgagccggatggaacgcctcgtctacgaggtgcggcagaagtgcagaaacatcgaggacatctgcatctcctgcggatctctgaacgtgaccctggagcacccactgttcatcggcggcatgtgccagaactgtaaaaactgttttctggagtgtgcctatcaatacgacgatgacggctaccagagctactgcaccatctgttgcggcggaagagaggtgctgatgtgtggaaataacaactgctgccggtgcttctgcgtggaatgcgtggacctgctggtgggccccggcgccgcccaggccgctattaaggaagatccttggaactgctacatgtgcggccacaagggcacatacggcctgctgagacggagagaggactggcctagcagactgcagatgttcttcgccaataaccacgaccaggagttcgacccccctaaggtgtaccctcccgtccccgccgagaagagaaagcccatccgggtcctgagcctgttcgatggcatcgccaccggtctgctggtgctgaaggacctgggcatccaggtggataggtacattgcctccgaggtgtgcgaggactccatcaccgtgggaatggtgcgtcatcagggcaagatcatgtacgtgggcgacgtgcggagcgtgacacagaagcatatccaggagtggggccctttcgacctggtgatcggcggcagcccttgcaatgacctgagcatcgtgaacccagcccggaagggcctgtacgagggaaccggcagactgttcttcgagttttacagactgctgcacgacgcccggcctaaggaaggcgacgaccggcccttcttttggctgttcgagaatgtggtggccatgggagtcagcgacaagcgggatattagccggttcctggagagcaaccccgtgatgatcgatgccaaggaagtgagcgccgcccaccgggccagatacttctggggcaatctgcctggcatgaacagacccctggccagcaccgtgaacgacaagctggagctgcaggagtgcctggagcacggccggatcgccaagttcagcaaggtgagaaccatcaccacccgaagcaacagcatcaaacaaggcaaggaccagcactttcctgtgttcatgaacgagaaggaggacatcctgtggtgtaccgagatggagagagtgttcgggttcccagtccactacacagatgtcagcaacatgtctagactggccagacagagactgctgggaagaagctggtccgtccctgtgatcagacacctgttcgcccctctgaaggagtacttcgcctgcgtgagcagcggcaacagcaacgccaacagccggggccccagcttctctagcggcctggtgccactgtccctgagagggagccacatgggccccatggagatctacaaaaccgtgagcgcctggaagcggcagcctgtgcgcgtgctgagcctgtttcggaatatcgataaagtcctgaaaagcctgggattcctggagagcggctctggctccggcggtggcaccctgaagtacgtggaggatgtgacaaacgtggtcagacgggatgtggagaagtggggccccttcgatctggtgtacggcagcacccaacccctgggcagctcttgtgaccggtgccctggctggtacatgtttcagttccaccggatcctgcagtacgccctgccgagacaggagtcccagcggccattcttttggattttcatggacaacttgctgctgaccgaggatgaccaggaaactaccactcggttcctgcagaccgaagccgtgaccctgcaggacgtgagaggccgggactaccagaacgccatgcgggtgtggtccaacatccctggactgaaaagcaagcacgcacctctgacccctaaagaagaggagtacctgcaggcccaggtgcggagcagaagcaagctggacgcccctaaggtggatctgctggtgaagaattgcctcctgcccctgagagagtacttcaagtatttcagccagaatagtctgcccctgggaggcagcggcggcggcgccctggtgacatttgaggacgtcgccgtgcggttcacccaggaggaatgggctctgctggatccttctcagaaaatcctgtaccgggacgtgatgagagagacataccggaatctgacctccgtgggcatcaactgggaatgttgggaccttgaagcctgcttcagaagcctgggaagaaacctgagagtgcaggtggtgaagagaaagtgcgagctgaccaacagcggcccctgcgccgagggcggcccaagcagcggcgcccctcctcccagcggcggcagcccagccggctccccaacctctaccgaggagggcacctctgagtccgccacccccgagagcggccctggcacctccaccgagcccagcgagggcagcgcacccggcagccctgccggcagccccacctccacagaggagggaaccagcaccgagcccagcgaaggcagcgccccaggcaccagcaccgagcctagtgagcaggagattaaacggatcaacaagatcagaagaagacttgtgaaagacagcaacaccaagaaggccggcaagacaggccccatgaaaaccctgctggttagagtgatgacacccgatctgagagagcggctggaaaacctgagaaagaagcctgaaaatatcccccagcccatcagcaatacatctagagccaacctgaataagctgctgaccgattacaccgaaatgaagaaggcgatcctgcatgtgtactgggaagagttccagaaggaccctgtgggcctgatgagccgggtggcccagcctgccagcaagaagatcgatcagaacaagctgaaacctgagatggacgagaagggcaacctgaccaccgccggctttgcctgctctcagtgtggccagcccctgttcgtgtacaagctggagcaggtgtctgagaagggcaaggcttacaccaactacttcggacggtgcaatgtggccgagcacgaaaagctgatcctgctggcccagctgaagcccgagaaggatagcgacgaagccgtgacatatagcctgggaaagtttgggcagagggccctggatttctacagcattcatgtgaccaaggagtccacccaccccgtgaagcccctggcccagatcgccggaaacagatacgcctccggacctgtgggaaaggccctgagcgacgcatgtatgggcacaatcgcctccttcctgtctaagtaccaggacatcatcatcgaacaccagaaggtggtgaagggcaaccagaagagactggagagcctgcgggagctggccggcaaggaaaacctggaataccctagcgtgaccctgccacctcagcctcacaccaaggagggcgttgatgcctacaacgaagtgatcgcccgggtgcgaatgtgggtgaacctgaacctgtggcagaagctgaagctaagcagagatgatgccaagcctctgctgagactgaagggattcccttcctttcctctggtcgagagacaggccaacgaagtggactggtgggacatggtgtgtaacgtgaagaagctgatcaacgagaaaaaggaggatggcaaggtgttttggcagaatctggctggctacaagagacaggaagccctgagaccatacctgagcagcgaggaagatcggaagaagggaaagaaattcgctcggtaccagctgggcgacctgctgctgcacctggaaaagaagcacggcgaggactggggaaaggtgtacgacgaggcctgggagcggattgacaagaaagtggaaggcctgagcaagcacatcaagctggaagaggaacggagaagcgaggacgcccagagcaaggccgccctgaccgactggctgcgggctaaggccagcttcgtgatcgagggcctgaaggaggccgacaaggacgagttctgcagatgcgagctgaagctgcagaagtggtacggggacctgcggggaaagcccttcgccatcgaagccgagaacagcatcctggacatcagcggcttcagcaagcagtacaactgtgccttcatctggcagaaggacggcgtgaagaagctgaacctgtacctgatcatcaactacttcaagggcggcaagctgcggttcaagaagatcaaacctgaagccttcgaagccaacagattctacaccgtgatcaacaaaaagagcggcgagatcgtgcccatggaggtgaacttcaacttcgacgaccccaacctgatcatcctgcctctggcctttggcaagagacagggcagagaattcatctggaacgacctgctgtccctggaaaccggcagcctgaagctggccaacggaagagtgatcgagaagacactgtacaacagaagaacccggcaggatgagcctgccctgttcgtggccctgaccttcgagcggcgggaggtcctggactcctccaatatcaaaccaatgaacctgatcggcgtggcaagaggcgaaaacatccccgccgtgatcgccctgaccgaccccgagggctgcccactgagccggtttaaggatagcctgggaaacccaacccacatcctgagaatcggcgagagctataaggagaagcagcggaccatccaggccaagaaggaggtggagcagcggagagccggcggctacagccggaagtacgccagcaaagccaagaatctggcagacgatatggtgagaaacaccgctagagatctgctgtactacgccgtgacccaggatgccatgctgatcttcgccaacctgagccggggcttcggccggcagggcaagcggaccttcatggccgagagacagtacacacggatggaggactggctgaccgccaagctggcctacgagggcctgagcaagacctacctgtccaagacactggcccagtacacctccaagacatgcagcaactgtgggtttaccatcaccagcgccgactacgacagggtgctggagaagctgaagaagacagcaacaggctggatgaccacaattaacggcaaggagctgaaggtggagggccagattacctactacaacagatacaagagacagaacgtagtcaaggacctgtccgtcgagctggatagactgagcgaagaatctgtgaacaacgacatctcctcctggacaaagggcagaagcggagaagctctgagcctcctgaagaaaagattctcccatagacccgtgcaggagaagttcgtgtgcctgaactgcggcttcgagacacacgcagccgagcaagccgccctgaacatcgccagatcctggctgttcctgcggagccaggagtacaagaaataccagacaaacaagacaaccggcaacaccgataagagagccttcgtcgagacctggcagtccttttaccggaagaagcttaaggaggtgtggaaacctgccgtgcggtctggcggatctggcggaggctccatggccttcatggacgtggccgtggacttcacccaggaggagtggaggctgctgagccccgcccagaggaccctgtacagggaggtgatgctggagaactacagcaacctggtgagcctgggcatccccttcagcaagcccaagctgatcaccctgctggagcaggagaaggtgacctggagggagaagaggaagtgccccctggccacctgccccgccgagcccgagcccgagcccgagctgggcggcccaagcagcggcgcccctcctcccagcggcggcagcccagccggctccccaacctctaccgaggagggcacctctgagtccgccacccccgagagcggccctggcacctccaccgagcccagcgagggcagcgcacccggcagccctgccggcagccccacctccacagaggagggaaccagcaccgagcccagcgaaggcagcgccccaggcaccagcaccgagcctagtgagcaggagattaaacggatcaacaagatcagaagaagacttgtgaaagacagcaacaccaagaaggccggcaagacaggccccatgaaaaccctgctggttagagtgatgacacccgatctgagagagcggctggaaaacctgagaaagaagcctgaaaatatcccccagcccatcagcaatacatctagagccaacctgaataagctgctgaccgattacaccgaaatgaagaaggcgatcctgcatgtgtactgggaagagttccagaaggaccctgtgggcctgatgagccgggtggcccagcctgccagcaagaagatcgatcagaacaagctgaaacctgagatggacgagaagggcaacctgaccaccgccggctttgcctgctctcagtgtggccagcccctgttcgtgtacaagctggagcaggtgtctgagaagggcaaggcttacaccaactacttcggacggtgcaatgtggccgagcacgaaaagctgatcctgctggcccagctgaagcccgagaaggatagcgacgaagccgtgacatatagcctgggaaagtttgggcagagggccctggatttctacagcattcatgtgaccaaggagtccacccaccccgtgaagcccctggcccagatcgccggaaacagatacgcctccggacctgtgggaaaggccctgagcgacgcatgtatgggcacaatcgcctccttcctgtctaagtaccaggacatcatcatcgaacaccagaaggtggtgaagggcaaccagaagagactggagagcctgcgggagctggccggcaaggaaaacctggaataccctagcgtgaccctgccacctcagcctcacaccaaggagggcgttgatgcctacaacgaagtgatcgcccgggtgcgaatgtgggtgaacctgaacctgtggcagaagctgaagctaagcagagatgatgccaagcctctgctgagactgaagggattcccttcctttcctctggtcgagagacaggccaacgaagtggactggtgggacatggtgtgtaacgtgaagaagctgatcaacgagaaaaaggaggatggcaaggtgttttggcagaatctggctggctacaagagacaggaagccctgagaccatacctgagcagcgaggaagatcggaagaagggaaagaaattcgctcggtaccagctgggcgacctgctgctgcacctggaaaagaagcacggcgaggactggggaaaggtgtacgacgaggcctgggagcggattgacaagaaagtggaaggcctgagcaagcacatcaagctggaagaggaacggagaagcgaggacgcccagagcaaggccgccctgaccgactggctgcgggctaaggccagcttcgtgatcgagggcctgaaggaggccgacaaggacgagttctgcagatgcgagctgaagctgcagaagtggtacggggacctgcggggaaagcccttcgccatcgaagccgagaacagcatcctggacatcagcggcttcagcaagcagtacaactgtgccttcatctggcagaaggacggcgtgaagaagctgaacctgtacctgatcatcaactacttcaagggcggcaagctgcggttcaagaagatcaaacctgaagccttcgaagccaacagattctacaccgtgatcaacaaaaagagcggcgagatcgtgcccatggaggtgaacttcaacttcgacgaccccaacctgatcatcctgcctctggcctttggcaagagacagggcagagaattcatctggaacgacctgctgtccctggaaaccggcagcctgaagctggccaacggaagagtgatcgagaagacactgtacaacagaagaacccggcaggatgagcctgccctgttcgtggccctgaccttcgagcggcgggaggtcctggactcctccaatatcaaaccaatgaacctgatcggcgtggcaagaggcgaaaacatccccgccgtgatcgccctgaccgaccccgagggctgcccactgagccggtttaaggatagcctgggaaacccaacccacatcctgagaatcggcgagagctataaggagaagcagcggaccatccaggccaagaaggaggtggagcagcggagagccggcggctacagccggaagtacgccagcaaagccaagaatctggcagacgatatggtgagaaacaccgctagagatctgctgtactacgccgtgacccaggatgccatgctgatcttcgccaacctgagccggggcttcggccggcagggcaagcggaccttcatggccgagagacagtacacacggatggaggactggctgaccgccaagctggcctacgagggcctgagcaagacctacctgtccaagacactggcccagtacacctccaagacatgcagcaactgtgggtttaccatcaccagcgccgactacgacagggtgctggagaagctgaagaagacagcaacaggctggatgaccacaattaacggcaaggagctgaaggtggagggccagattacctactacaacagatacaagagacagaacgtagtcaaggacctgtccgtcgagctggatagactgagcgaagaatctgtgaacaacgacatctcctcctggacaaagggcagaagcggagaagctctgagcctcctgaagaaaagattctcccatagacccgtgcaggagaagttcgtgtgcctgaactgcggcttcgagacacacgcagccgagcaagccgccctgaacatcgccagatcctggctgttcctgcggagccaggagtacaagaaataccagacaaacaagacaaccggcaacaccgataagagagccttcgtcgagacctggcagtccttttaccggaagaagcttaaggaggtgtggaaacctgccgtgcggtctggcggatctggcggaggctcctatggccttcatggacgtggccgtggacttcacccaggaggagtggaggctgctgagccccgcccagaggaccctgtacagggaggtgatgctggagaactacagcaacctggtgagcctgggcatccccttcagcaagcccaagctgatcaccctgctggagcaggagaaggtgacctggagggagaagaggaagtgccccctggccacctgccccgccgagcccgagcccgagcccgagctgggatctggctccggcagcggccccaagaaaaagagaaaagtctaagctgccttctgcggggcttgccttctggccatgcccttcttctctcccttgcacctgtacctcttggtctttgaataaagcctgagtaggaaggctagcaaaaaaaaaaaaaaaaaaaaaaaaaaaaaaaaaaaaaaaaaaaaaaaaaaaaaaaaaaaaaaaaaaaaaaaaaaaaaaaa

SEQ ID NO: 16689 - RNA, 9485 nt, synthetic construct
  source 1..9485: mol_type = other RNA
aggaaataagagagaaaagaagagtaagaagaaatataagagccaccatggcccctaagaagaagcgtaaagtgagccggatggaacgcctcgtctacgaggtgcggcagaagtgcagaaacatcgaggacatctgcatctcctgcggatctctgaacgtgaccctggagcacccactgttcatcggcggcatgtgccagaactgtaaaaactgttttctggagtgtgcctatcaatacgacgatgacggctaccagagctactgcaccatctgttgcggcggaagagaggtgctgatgtgtggaaataacaactgctgccggtgcttctgcgtggaatgcgtggacctgctggtgggccccggcgccgcccaggccgctattaaggaagatccttggaactgctacatgtgcggccacaagggcacatacggcctgctgagacggagagaggactggcctagcagactgcagatgttcttcgccaataaccacgaccaggagttcgacccccctaaggtgtaccctcccgtccccgccgagaagagaaagcccatccgggtcctgagcctgttcgatggcatcgccaccggtctgctggtgctgaaggacctgggcatccaggtggataggtacattgcctccgaggtgtgcgaggactccatcaccgtgggaatggtgcgtcatcagggcaagatcatgtacgtgggcgacgtgcggagcgtgacacagaagcatatccaggagtggggccctttcgacctggtgatcggcggcagcccttgcaatgacctgagcatcgtgaacccagcccggaagggcctgtacgagggaaccggcagactgttcttcgagttttacagactgctgcacgacgcccggcctaaggaaggcgacgaccggcccttcttttggctgttcgagaatgtggtggccatgggagtcagcgacaagcgggatattagccggttcctggagagcaaccccgtgatgatcgatgccaaggaagtgagcgccgcccaccgggccagatacttctggggcaatctgcctggcatgaacagacccctggccagcaccgtgaacgacaagctggagctgcaggagtgcctggagcacggccggatcgccaagttcagcaaggtgagaaccatcaccacccgaagcaacagcatcaaacaaggcaaggaccagcactttcctgtgttcatgaacgagaaggaggacatcctgtggtgtaccgagatggagagagtgttcgggttcccagtccactacacagatgtcagcaacatgtctagactggccagacagagactgctgggaagaagctggtccgtccctgtgatcagacacctgttcgcccctctgaaggagtacttcgcctgcgtgagcagcggcaacagcaacgccaacagccggggccccagcttctctagcggcctggtgccactgtccctgagagggagccacatgggccccatggagatctacaaaaccgtgagcgcctggaagcggcagcctgtgcgcgtgctgagcctgtttcggaatatcgataaagtcctgaaaagcctgggattcctggagagcggctctggctccggcggtggcaccctgaagtacgtggaggatgtgacaaacgtggtcagacgggatgtggagaagtggggccccttcgatctggtgtacggcagcacccaacccctgggcagctcttgtgaccggtgccctggctggtacatgtttcagttccaccggatcctgcagtacgccctgccgagacaggagtcccagcggccattcttttggattttcatggacaacttgctgctgaccgaggatgaccaggaaactaccactcggttcctgcagaccgaagccgtgaccctgcaggacgtgagaggccgggactaccagaacgccatgcgggtgtggtccaacatccctggactgaaaagcaagcacgcacctctgacccctaaagaagaggagtacctgcaggcccaggtgcggagcagaagcaagctggacgcccctaaggtggatctgctggtgaagaattgcctcctgcccctgagagagtacttcaagtatttcagccagaatagtctgcccctgggaggcagcggcggcggcgccctggtgacatttgaggacgtcgccgtgcggttcacccaggaggaatgggctctgctggatccttctcagaaaatcctgtaccgggacgtgatgagagagacataccggaatctgacctccgtgggcatcaactgggaatgttgggaccttgaagcctgcttcagaagcctgggaagaaacctgagagtgcaggtggtgaagagaaagtgcgagctgaccaacagcggcccctgcgccgagggcggcccaagcagcggcgcccctcctcccagcggcggcagcccagccggctccccaacctctaccgaggagggcacctctgagtccgccacccccgagagcggccctggcacctccaccgagcccagcgagggcagcgcacccggcagccctgccggcagccccacctccacagaggagggaaccagcaccgagcccagcgaaggcagcgccccaggcaccagcaccgagcctagtgagcaggagattaaacggatcaacaagatcagaagaagacttgtgaaagacagcaacaccaagaaggccggcaagacaggccccatgaaaaccctgctggttagagtgatgacacccgatctgagagagcggctggaaaacctgagaaagaagcctgaaaatatcccccagcccatcagcaatacatctagagccaacctgaataagctgctgaccgattacaccgaaatgaagaaggcgatcctgcatgtgtactgggaagagttccagaaggaccctgtgggcctgatgagccgggtggcccagcctgccagcaagaagatcgatcagaacaagctgaaacctgagatggacgagaagggcaacctgaccaccgccggctttgcctgctctcagtgtggccagcccctgttcgtgtacaagctggagcaggtgtctgagaagggcaaggcttacaccaactacttcggacggtgcaatgtggccgagcacgaaaagctgatcctgctggcccagctgaagcccgagaaggatagcgacgaagccgtgacatatagcctgggaaagtttgggcagagggccctggatttctacagcattcatgtgaccaaggagtccacccaccccgtgaagcccctggcccagatcgccggaaacagatacgcctccggacctgtgggaaaggccctgagcgacgcatgtatgggcacaatcgcctccttcctgtctaagtaccaggacatcatcatcgaacaccagaaggtggtgaagggcaaccagaagagactggagagcctgcgggagctggccggcaaggaaaacctggaataccctagcgtgaccctgccacctcagcctcacaccaaggagggcgttgatgcctacaacgaagtgatcgcccgggtgcgaatgtgggtgaacctgaacctgtggcagaagctgaagctaagcagagatgatgccaagcctctgctgagactgaagggattcccttcctttcctctggtcgagagacaggccaacgaagtggactggtgggacatggtgtgtaacgtgaagaagctgatcaacgagaaaaaggaggatggcaaggtgttttggcagaatctggctggctacaagagacaggaagccctgagaccatacctgagcagcgaggaagatcggaagaagggaaagaaattcgctcggtaccagctgggcgacctgctgctgcacctggaaaagaagcacggcgaggactggggaaaggtgtacgacgaggcctgggagcggattgacaagaaagtggaaggcctgagcaagcacatcaagctggaagaggaacggagaagcgaggacgcccagagcaaggccgccctgaccgactggctgcgggctaaggccagcttcgtgatcgagggcctgaaggaggccgacaaggacgagttctgcagatgcgagctgaagctgcagaagtggtacggggacctgcggggaaagcccttcgccatcgaagccgagaacagcatcctggacatcagcggcttcagcaagcagtacaactgtgccttcatctggcagaaggacggcgtgaagaagctgaacctgtacctgatcatcaactacttcaagggcggcaagctgcggttcaagaagatcaaacctgaagccttcgaagccaacagattctacaccgtgatcaacaaaaagagcggcgagatcgtgcccatggaggtgaacttcaacttcgacgaccccaacctgatcatcctgcctctggcctttggcaagagacagggcagagaattcatctggaacgacctgctgtccctggaaaccggcagcctgaagctggccaacggaagagtgatcgagaagacactgtacaacagaagaacccggcaggatgagcctgccctgttcgtggccctgaccttcgagcggcgggaggtcctggactcctccaatatcaaaccaatgaacctgatcggcgtggcaagaggcgaaaacatccccgccgtgatcgccctgaccgaccccgagggctgcccactgagccggtttaaggatagcctgggaaacccaacccacatcctgagaatcggcgagagctataaggagaagcagcggaccatccaggccaagaaggaggtggagcagcggagagccggcggctacagccggaagtacgccagcaaagccaagaatctggcagacgatatggtgagaaacaccgctagagatctgctgtactacgccgtgacccaggatgccatgctgatcttcgccaacctgagccggggcttcggccggcagggcaagcggaccttcatggccgagagacagtacacacggatggaggactggctgaccgccaagctggcctacgagggcctgagcaagacctacctgtccaagacactggcccagtacacctccaagacatgcagcaactgtgggtttaccatcaccagcgccgactacgacagggtgctggagaagctgaagaagacagcaacaggctggatgaccacaattaacggcaaggagctgaaggtggagggccagattacctactacaacagatacaagagacagaacgtagtcaaggacctgtccgtcgagctggatagactgagcgaagaatctgtgaacaacgacatctcctcctggacaaagggcagaagcggagaagctctgagcctcctgaagaaaagattctcccatagacccgtgcaggagaagttcgtgtgcctgaactgcggcttcgagacacacgcagccgagcaagccgccctgaacatcgccagatcctggctgttcctgcggagccaggagtacaagaaataccagacaaacaagacaaccggcaacaccgataagagagccttcgtcgagacctggcagtccttttaccggaagaagcttaaggaggtgtggaaacctgccgtgcggtctggcggatctggcggaggctccaggcccggcgccgtgagcttcgccgacgtggccgtgtacttcagccccgaggagtgggagtgcctgaggcccgcccagagggccctgtacagggacgtgatgagggagaccttcggccacctgggcgccctgggcttcagcggccccaagcccgccttcatcagctgggtggagggcgaggtggaggcctggagccccgagagccaggaccccgacggcgagagcagcgccgccttcagcaggggcggcccaagcagcggcgcccctcctcccagcggcggcagcccagccggctccccaacctctaccgaggagggcacctctgagtccgccacccccgagagcggccctggcacctccaccgagcccagcgagggcagcgcacccggcagccctgccggcagccccacctccacagaggagggaaccagcaccgagcccagcgaaggcagcgccccaggcaccagcaccgagcctagtgagcaggagattaaacggatcaacaagatcagaagaagacttgtgaaagacagcaacaccaagaaggccggcaagacaggccccatgaaaaccctgctggttagagtgatgacacccgatctgagagagcggctggaaaacctgagaaagaagcctgaaaatatcccccagcccatcagcaatacatctagagccaacctgaataagctgctgaccgattacaccgaaatgaagaaggcgatcctgcatgtgtactgggaagagttccagaaggaccctgtgggcctgatgagccgggtggcccagcctgccagcaagaagatcgatcagaacaagctgaaacctgagatggacgagaagggcaacctgaccaccgccggctttgcctgctctcagtgtggccagcccctgttcgtgtacaagctggagcaggtgtctgagaagggcaaggcttacaccaactacttcggacggtgcaatgtggccgagcacgaaaagctgatcctgctggcccagctgaagcccgagaaggatagcgacgaagccgtgacatatagcctgggaaagtttgggcagagggccctggatttctacagcattcatgtgaccaaggagtccacccaccccgtgaagcccctggcccagatcgccggaaacagatacgcctccggacctgtgggaaaggccctgagcgacgcatgtatgggcacaatcgcctccttcctgtctaagtaccaggacatcatcatcgaacaccagaaggtggtgaagggcaaccagaagagactggagagcctgcgggagctggccggcaaggaaaacctggaataccctagcgtgaccctgccacctcagcctcacaccaaggagggcgttgatgcctacaacgaagtgatcgcccgggtgcgaatgtgggtgaacctgaacctgtggcagaagctgaagctaagcagagatgatgccaagcctctgctgagactgaagggattcccttcctttcctctggtcgagagacaggccaacgaagtggactggtgggacatggtgtgtaacgtgaagaagctgatcaacgagaaaaaggaggatggcaaggtgttttggcagaatctggctggctacaagagacaggaagccctgagaccatacctgagcagcgaggaagatcggaagaagggaaagaaattcgctcggtaccagctgggcgacctgctgctgcacctggaaaagaagcacggcgaggactggggaaaggtgtacgacgaggcctgggagcggattgacaagaaagtggaaggcctgagcaagcacatcaagctggaagaggaacggagaagcgaggacgcccagagcaaggccgccctgaccgactggctgcgggctaaggccagcttcgtgatcgagggcctgaaggaggccgacaaggacgagttctgcagatgcgagctgaagctgcagaagtggtacggggacctgcggggaaagcccttcgccatcgaagccgagaacagcatcctggacatcagcggcttcagcaagcagtacaactgtgccttcatctggcagaaggacggcgtgaagaagctgaacctgtacctgatcatcaactacttcaagggcggcaagctgcggttcaagaagatcaaacctgaagccttcgaagccaacagattctacaccgtgatcaacaaaaagagcggcgagatcgtgcccatggaggtgaacttcaacttcgacgaccccaacctgatcatcctgcctctggcctttggcaagagacagggcagagaattcatctggaacgacctgctgtccctggaaaccggcagcctgaagctggccaacggaagagtgatcgagaagacactgtacaacagaagaacccggcaggatgagcctgccctgttcgtggccctgaccttcgagcggcgggaggtcctggactcctccaatatcaaaccaatgaacctgatcggcgtggcaagaggcgaaaacatccccgccgtgatcgccctgaccgaccccgagggctgcccactgagccggtttaaggatagcctgggaaacccaacccacatcctgagaatcggcgagagctataaggagaagcagcggaccatccaggccaagaaggaggtggagcagcggagagccggcggctacagccggaagtacgccagcaaagccaagaatctggcagacgatatggtgagaaacaccgctagagatctgctgtactacgccgtgacccaggatgccatgctgatcttcgccaacctgagccggggcttcggccggcagggcaagcggaccttcatggccgagagacagtacacacggatggaggactggctgaccgccaagctggcctacgagggcctgagcaagacctacctgtccaagacactggcccagtacacctccaagacatgcagcaactgtgggtttaccatcaccagcgccgactacgacagggtgctggagaagctgaagaagacagcaacaggctggatgaccacaattaacggcaaggagctgaaggtggagggccagattacctactacaacagatacaagagacagaacgtagtcaaggacctgtccgtcgagctggatagactgagcgaagaatctgtgaacaacgacatctcctcctggacaaagggcagaagcggagaagctctgagcctcctgaagaaaagattctcccatagacccgtgcaggagaagttcgtgtgcctgaactgcggcttcgagacacacgcagccgagcaagccgccctgaacatcgccagatcctggctgttcctgcggagccaggagtacaagaaataccagacaaacaagacaaccggcaacaccgataagagagccttcgtcgagacctggcagtccttttaccggaagaagcttaaggaggtgtggaaacctgccgtgcggtctggcggatctggcggaggctcctaggcccggcgccgtgagcttcgccgacgtggccgtgtacttcagccccgaggagtgggagtgcctgaggcccgcccagagggccctgtacagggacgtgatgagggagaccttcggccacctgggcgccctgggcttcagcggccccaagcccgccttcatcagctgggtggagggcgaggtggaggcctggagccccgagagccaggaccccgacggcgagagcagcgccgccttcagcaggggatctggctccggcagcggccccaagaaaaagagaaaagtctaagctgccttctgcggggcttgccttctggccatgcccttcttctctcccttgcacctgtacctcttggtctttgaataaagcctgagtaggaaggctagcaaaaaaaaaaaaaaaaaaaaaaaaaaaaaaaaaaaaaaaaaaaaaaaaaaaaaaaaaaaaaaaaaaaaaaaaaaaaaaaa

SEQ ID NO: 16690 - RNA, 9485 nt, synthetic construct
  source 1..9485: mol_type = other RNA
aggaaataagagagaaaagaagagtaagaagaaatataagagccaccatggcccctaagaagaagcgtaaagtgagccggatggaacgcctcgtctacgaggtgcggcagaagtgcagaaacatcgaggacatctgcatctcctgcggatctctgaacgtgaccctggagcacccactgttcatcggcggcatgtgccagaactgtaaaaactgttttctggagtgtgcctatcaatacgacgatgacggctaccagagctactgcaccatctgttgcggcggaagagaggtgctgatgtgtggaaataacaactgctgccggtgcttctgcgtggaatgcgtggacctgctggtgggccccggcgccgcccaggccgctattaaggaagatccttggaactgctacatgtgcggccacaagggcacatacggcctgctgagacggagagaggactggcctagcagactgcagatgttcttcgccaataaccacgaccaggagttcgacccccctaaggtgtaccctcccgtccccgccgagaagagaaagcccatccgggtcctgagcctgttcgatggcatcgccaccggtctgctggtgctgaaggacctgggcatccaggtggataggtacattgcctccgaggtgtgcgaggactccatcaccgtgggaatggtgcgtcatcagggcaagatcatgtacgtgggcgacgtgcggagcgtgacacagaagcatatccaggagtggggccctttcgacctggtgatcggcggcagcccttgcaatgacctgagcatcgtgaacccagcccggaagggcctgtacgagggaaccggcagactgttcttcgagttttacagactgctgcacgacgcccggcctaaggaaggcgacgaccggcccttcttttggctgttcgagaatgtggtggccatgggagtcagcgacaagcgggatattagccggttcctggagagcaaccccgtgatgatcgatgccaaggaagtgagcgccgcccaccgggccagatacttctggggcaatctgcctggcatgaacagacccctggccagcaccgtgaacgacaagctggagctgcaggagtgcctggagcacggccggatcgccaagttcagcaaggtgagaaccatcaccacccgaagcaacagcatcaaacaaggcaaggaccagcactttcctgtgttcatgaacgagaaggaggacatcctgtggtgtaccgagatggagagagtgttcgggttcccagtccactacacagatgtcagcaacatgtctagactggccagacagagactgctgggaagaagctggtccgtccctgtgatcagacacctgttcgcccctctgaaggagtacttcgcctgcgtgagcagcggcaacagcaacgccaacagccggggccccagcttctctagcggcctggtgccactgtccctgagagggagccacatgggccccatggagatctacaaaaccgtgagcgcctggaagcggcagcctgtgcgcgtgctgagcctgtttcggaatatcgataaagtcctgaaaagcctgggattcctggagagcggctctggctccggcggtggcaccctgaagtacgtggaggatgtgacaaacgtggtcagacgggatgtggagaagtggggccccttcgatctggtgtacggcagcacccaacccctgggcagctcttgtgaccggtgccctggctggtacatgtttcagttccaccggatcctgcagtacgccctgccgagacaggagtcccagcggccattcttttggattttcatggacaacttgctgctgaccgaggatgaccaggaaactaccactcggttcctgcagaccgaagccgtgaccctgcaggacgtgagaggccgggactaccagaacgccatgcgggtgtggtccaacatccctggactgaaaagcaagcacgcacctctgacccctaaagaagaggagtacctgcaggcccaggtgcggagcagaagcaagctggacgcccctaaggtggatctgctggtgaagaattgcctcctgcccctgagagagtacttcaagtatttcagccagaatagtctgcccctgggaggcagcggcggcggcgccctggtgacatttgaggacgtcgccgtgcggttcacccaggaggaatgggctctgctggatccttctcagaaaatcctgtaccgggacgtgatgagagagacataccggaatctgacctccgtgggcatcaactgggaatgttgggaccttgaagcctgcttcagaagcctgggaagaaacctgagagtgcaggtggtgaagagaaagtgcgagctgaccaacagcggcccctgcgccgagggcggcccaagcagcggcgcccctcctcccagcggcggcagcccagccggctccccaacctctaccgaggagggcacctctgagtccgccacccccgagagcggccctggcacctccaccgagcccagcgagggcagcgcacccggcagccctgccggcagccccacctccacagaggagggaaccagcaccgagcccagcgaaggcagcgccccaggcaccagcaccgagcctagtgagcaggagattaaacggatcaacaagatcagaagaagacttgtgaaagacagcaacaccaagaaggccggcaagacaggccccatgaaaaccctgctggttagagtgatgacacccgatctgagagagcggctggaaaacctgagaaagaagcctgaaaatatcccccagcccatcagcaatacatctagagccaacctgaataagctgctgaccgattacaccgaaatgaagaaggcgatcctgcatgtgtactgggaagagttccagaaggaccctgtgggcctgatgagccgggtggcccagcctgccagcaagaagatcgatcagaacaagctgaaacctgagatggacgagaagggcaacctgaccaccgccggctttgcctgctctcagtgtggccagcccctgttcgtgtacaagctggagcaggtgtctgagaagggcaaggcttacaccaactacttcggacggtgcaatgtggccgagcacgaaaagctgatcctgctggcccagctgaagcccgagaaggatagcgacgaagccgtgacatatagcctgggaaagtttgggcagagggccctggatttctacagcattcatgtgaccaaggagtccacccaccccgtgaagcccctggcccagatcgccggaaacagatacgcctccggacctgtgggaaaggccctgagcgacgcatgtatgggcacaatcgcctccttcctgtctaagtaccaggacatcatcatcgaacaccagaaggtggtgaagggcaaccagaagagactggagagcctgcgggagctggccggcaaggaaaacctggaataccctagcgtgaccctgccacctcagcctcacaccaaggagggcgttgatgcctacaacgaagtgatcgcccgggtgcgaatgtgggtgaacctgaacctgtggcagaagctgaagctaagcagagatgatgccaagcctctgctgagactgaagggattcccttcctttcctctggtcgagagacaggccaacgaagtggactggtgggacatggtgtgtaacgtgaagaagctgatcaacgagaaaaaggaggatggcaaggtgttttggcagaatctggctggctacaagagacaggaagccctgagaccatacctgagcagcgaggaagatcggaagaagggaaagaaattcgctcggtaccagctgggcgacctgctgctgcacctggaaaagaagcacggcgaggactggggaaaggtgtacgacgaggcctgggagcggattgacaagaaagtggaaggcctgagcaagcacatcaagctggaagaggaacggagaagcgaggacgcccagagcaaggccgccctgaccgactggctgcgggctaaggccagcttcgtgatcgagggcctgaaggaggccgacaaggacgagttctgcagatgcgagctgaagctgcagaagtggtacggggacctgcggggaaagcccttcgccatcgaagccgagaacagcatcctggacatcagcggcttcagcaagcagtacaactgtgccttcatctggcagaaggacggcgtgaagaagctgaacctgtacctgatcatcaactacttcaagggcggcaagctgcggttcaagaagatcaaacctgaagccttcgaagccaacagattctacaccgtgatcaacaaaaagagcggcgagatcgtgcccatggaggtgaacttcaacttcgacgaccccaacctgatcatcctgcctctggcctttggcaagagacagggcagagaattcatctggaacgacctgctgtccctggaaaccggcagcctgaagctggccaacggaagagtgatcgagaagacactgtacaacagaagaacccggcaggatgagcctgccctgttcgtggccctgaccttcgagcggcgggaggtcctggactcctccaatatcaaaccaatgaacctgatcggcgtggcaagaggcgaaaacatccccgccgtgatcgccctgaccgaccccgagggctgcccactgagccggtttaaggatagcctgggaaacccaacccacatcctgagaatcggcgagagctataaggagaagcagcggaccatccaggccaagaaggaggtggagcagcggagagccggcggctacagccggaagtacgccagcaaagccaagaatctggcagacgatatggtgagaaacaccgctagagatctgctgtactacgccgtgacccaggatgccatgctgatcttcgccaacctgagccggggcttcggccggcagggcaagcggaccttcatggccgagagacagtacacacggatggaggactggctgaccgccaagctggcctacgagggcctgagcaagacctacctgtccaagacactggcccagtacacctccaagacatgcagcaactgtgggtttaccatcaccagcgccgactacgacagggtgctggagaagctgaagaagacagcaacaggctggatgaccacaattaacggcaaggagctgaaggtggagggccagattacctactacaacagatacaagagacagaacgtagtcaaggacctgtccgtcgagctggatagactgagcgaagaatctgtgaacaacgacatctcctcctggacaaagggcagaagcggagaagctctgagcctcctgaagaaaagattctcccatagacccgtgcaggagaagttcgtgtgcctgaactgcggcttcgagacacacgcagccgagcaagccgccctgaacatcgccagatcctggctgttcctgcggagccaggagtacaagaaataccagacaaacaagacaaccggcaacaccgataagagagccttcgtcgagacctggcagtccttttaccggaagaagcttaaggaggtgtggaaacctgccgtgcggtctggcggatctggcggaggctccgcccacgccctggtgaccttcagggacgtggccatcgacttcagccagaaggagtgggagtgcctggacaccacccagaggaagctgtacagggacgtgatgctggagaactacagcaacctggtgagcctgggctacagcggcagcaagcccgacgtgatcaccctgctggagcagggcaaggagccctgcgtggccgtgagggacgtgaccggcacccagtaccccggcctgctgagcaggggcggcccaagcagcggcgcccctcctcccagcggcggcagcccagccggctccccaacctctaccgaggagggcacctctgagtccgccacccccgagagcggccctggcacctccaccgagcccagcgagggcagcgcacccggcagccctgccggcagccccacctccacagaggagggaaccagcaccgagcccagcgaaggcagcgccccaggcaccagcaccgagcctagtgagcaggagattaaacggatcaacaagatcagaagaagacttgtgaaagacagcaacaccaagaaggccggcaagacaggccccatgaaaaccctgctggttagagtgatgacacccgatctgagagagcggctggaaaacctgagaaagaagcctgaaaatatcccccagcccatcagcaatacatctagagccaacctgaataagctgctgaccgattacaccgaaatgaagaaggcgatcctgcatgtgtactgggaagagttccagaaggaccctgtgggcctgatgagccgggtggcccagcctgccagcaagaagatcgatcagaacaagctgaaacctgagatggacgagaagggcaacctgaccaccgccggctttgcctgctctcagtgtggccagcccctgttcgtgtacaagctggagcaggtgtctgagaagggcaaggcttacaccaactacttcggacggtgcaatgtggccgagcacgaaaagctgatcctgctggcccagctgaagcccgagaaggatagcgacgaagccgtgacatatagcctgggaaagtttgggcagagggccctggatttctacagcattcatgtgaccaaggagtccacccaccccgtgaagcccctggcccagatcgccggaaacagatacgcctccggacctgtgggaaaggccctgagcgacgcatgtatgggcacaatcgcctccttcctgtctaagtaccaggacatcatcatcgaacaccagaaggtggtgaagggcaaccagaagagactggagagcctgcgggagctggccggcaaggaaaacctggaataccctagcgtgaccctgccacctcagcctcacaccaaggagggcgttgatgcctacaacgaagtgatcgcccgggtgcgaatgtgggtgaacctgaacctgtggcagaagctgaagctaagcagagatgatgccaagcctctgctgagactgaagggattcccttcctttcctctggtcgagagacaggccaacgaagtggactggtgggacatggtgtgtaacgtgaagaagctgatcaacgagaaaaaggaggatggcaaggtgttttggcagaatctggctggctacaagagacaggaagccctgagaccatacctgagcagcgaggaagatcggaagaagggaaagaaattcgctcggtaccagctgggcgacctgctgctgcacctggaaaagaagcacggcgaggactggggaaaggtgtacgacgaggcctgggagcggattgacaagaaagtggaaggcctgagcaagcacatcaagctggaagaggaacggagaagcgaggacgcccagagcaaggccgccctgaccgactggctgcgggctaaggccagcttcgtgatcgagggcctgaaggaggccgacaaggacgagttctgcagatgcgagctgaagctgcagaagtggtacggggacctgcggggaaagcccttcgccatcgaagccgagaacagcatcctggacatcagcggcttcagcaagcagtacaactgtgccttcatctggcagaaggacggcgtgaagaagctgaacctgtacctgatcatcaactacttcaagggcggcaagctgcggttcaagaagatcaaacctgaagccttcgaagccaacagattctacaccgtgatcaacaaaaagagcggcgagatcgtgcccatggaggtgaacttcaacttcgacgaccccaacctgatcatcctgcctctggcctttggcaagagacagggcagagaattcatctggaacgacctgctgtccctggaaaccggcagcctgaagctggccaacggaagagtgatcgagaagacactgtacaacagaagaacccggcaggatgagcctgccctgttcgtggccctgaccttcgagcggcgggaggtcctggactcctccaatatcaaaccaatgaacctgatcggcgtggcaagaggcgaaaacatccccgccgtgatcgccctgaccgaccccgagggctgcccactgagccggtttaaggatagcctgggaaacccaacccacatcctgagaatcggcgagagctataaggagaagcagcggaccatccaggccaagaaggaggtggagcagcggagagccggcggctacagccggaagtacgccagcaaagccaagaatctggcagacgatatggtgagaaacaccgctagagatctgctgtactacgccgtgacccaggatgccatgctgatcttcgccaacctgagccggggcttcggccggcagggcaagcggaccttcatggccgagagacagtacacacggatggaggactggctgaccgccaagctggcctacgagggcctgagcaagacctacctgtccaagacactggcccagtacacctccaagacatgcagcaactgtgggtttaccatcaccagcgccgactacgacagggtgctggagaagctgaagaagacagcaacaggctggatgaccacaattaacggcaaggagctgaaggtggagggccagattacctactacaacagatacaagagacagaacgtagtcaaggacctgtccgtcgagctggatagactgagcgaagaatctgtgaacaacgacatctcctcctggacaaagggcagaagcggagaagctctgagcctcctgaagaaaagattctcccatagacccgtgcaggagaagttcgtgtgcctgaactgcggcttcgagacacacgcagccgagcaagccgccctgaacatcgccagatcctggctgttcctgcggagccaggagtacaagaaataccagacaaacaagacaaccggcaacaccgataagagagccttcgtcgagacctggcagtccttttaccggaagaagcttaaggaggtgtggaaacctgccgtgcggtctggcggatctggcggaggctcctgcccacgccctggtgaccttcagggacgtggccatcgacttcagccagaaggagtgggagtgcctggacaccacccagaggaagctgtacagggacgtgatgctggagaactacagcaacctggtgagcctgggctacagcggcagcaagcccgacgtgatcaccctgctggagcagggcaaggagccctgcgtggccgtgagggacgtgaccggcacccagtaccccggcctgctgagcaggggatctggctccggcagcggccccaagaaaaagagaaaagtctaagctgccttctgcggggcttgccttctggccatgcccttcttctctcccttgcacctgtacctcttggtctttgaataaagcctgagtaggaaggctagcaaaaaaaaaaaaaaaaaaaaaaaaaaaaaaaaaaaaaaaaaaaaaaaaaaaaaaaaaaaaaaaaaaaaaaaaaaaaaaaa

SEQ ID NO: 16691 - RNA, 9485 nt, synthetic construct
  source 1..9485: mol_type = other RNA
aggaaataagagagaaaagaagagtaagaagaaatataagagccaccatggcccctaagaagaagcgtaaagtgagccggatggaacgcctcgtctacgaggtgcggcagaagtgcagaaacatcgaggacatctgcatctcctgcggatctctgaacgtgaccctggagcacccactgttcatcggcggcatgtgccagaactgtaaaaactgttttctggagtgtgcctatcaatacgacgatgacggctaccagagctactgcaccatctgttgcggcggaagagaggtgctgatgtgtggaaataacaactgctgccggtgcttctgcgtggaatgcgtggacctgctggtgggccccggcgccgcccaggccgctattaaggaagatccttggaactgctacatgtgcggccacaagggcacatacggcctgctgagacggagagaggactggcctagcagactgcagatgttcttcgccaataaccacgaccaggagttcgacccccctaaggtgtaccctcccgtccccgccgagaagagaaagcccatccgggtcctgagcctgttcgatggcatcgccaccggtctgctggtgctgaaggacctgggcatccaggtggataggtacattgcctccgaggtgtgcgaggactccatcaccgtgggaatggtgcgtcatcagggcaagatcatgtacgtgggcgacgtgcggagcgtgacacagaagcatatccaggagtggggccctttcgacctggtgatcggcggcagcccttgcaatgacctgagcatcgtgaacccagcccggaagggcctgtacgagggaaccggcagactgttcttcgagttttacagactgctgcacgacgcccggcctaaggaaggcgacgaccggcccttcttttggctgttcgagaatgtggtggccatgggagtcagcgacaagcgggatattagccggttcctggagagcaaccccgtgatgatcgatgccaaggaagtgagcgccgcccaccgggccagatacttctggggcaatctgcctggcatgaacagacccctggccagcaccgtgaacgacaagctggagctgcaggagtgcctggagcacggccggatcgccaagttcagcaaggtgagaaccatcaccacccgaagcaacagcatcaaacaaggcaaggaccagcactttcctgtgttcatgaacgagaaggaggacatcctgtggtgtaccgagatggagagagtgttcgggttcccagtccactacacagatgtcagcaacatgtctagactggccagacagagactgctgggaagaagctggtccgtccctgtgatcagacacctgttcgcccctctgaaggagtacttcgcctgcgtgagcagcggcaacagcaacgccaacagccggggccccagcttctctagcggcctggtgccactgtccctgagagggagccacatgggccccatggagatctacaaaaccgtgagcgcctggaagcggcagcctgtgcgcgtgctgagcctgtttcggaatatcgataaagtcctgaaaagcctgggattcctggagagcggctctggctccggcggtggcaccctgaagtacgtggaggatgtgacaaacgtggtcagacgggatgtggagaagtggggccccttcgatctggtgtacggcagcacccaacccctgggcagctcttgtgaccggtgccctggctggtacatgtttcagttccaccggatcctgcagtacgccctgccgagacaggagtcccagcggccattcttttggattttcatggacaacttgctgctgaccgaggatgaccaggaaactaccactcggttcctgcagaccgaagccgtgaccctgcaggacgtgagaggccgggactaccagaacgccatgcgggtgtggtccaacatccctggactgaaaagcaagcacgcacctctgacccctaaagaagaggagtacctgcaggcccaggtgcggagcagaagcaagctggacgcccctaaggtggatctgctggtgaagaattgcctcctgcccctgagagagtacttcaagtatttcagccagaatagtctgcccctgggaggcagcggcggcggcgccctggtgacatttgaggacgtcgccgtgcggttcacccaggaggaatgggctctgctggatccttctcagaaaatcctgtaccgggacgtgatgagagagacataccggaatctgacctccgtgggcatcaactgggaatgttgggaccttgaagcctgcttcagaagcctgggaagaaacctgagagtgcaggtggtgaagagaaagtgcgagctgaccaacagcggcccctgcgccgagggcggcccaagcagcggcgcccctcctcccagcggcggcagcccagccggctccccaacctctaccgaggagggcacctctgagtccgccacccccgagagcggccctggcacctccaccgagcccagcgagggcagcgcacccggcagccctgccggcagccccacctccacagaggagggaaccagcaccgagcccagcgaaggcagcgccccaggcaccagcaccgagcctagtgagcaggagattaaacggatcaacaagatcagaagaagacttgtgaaagacagcaacaccaagaaggccggcaagacaggccccatgaaaaccctgctggttagagtgatgacacccgatctgagagagcggctggaaaacctgagaaagaagcctgaaaatatcccccagcccatcagcaatacatctagagccaacctgaataagctgctgaccgattacaccgaaatgaagaaggcgatcctgcatgtgtactgggaagagttccagaaggaccctgtgggcctgatgagccgggtggcccagcctgccagcaagaagatcgatcagaacaagctgaaacctgagatggacgagaagggcaacctgaccaccgccggctttgcctgctctcagtgtggccagcccctgttcgtgtacaagctggagcaggtgtctgagaagggcaaggcttacaccaactacttcggacggtgcaatgtggccgagcacgaaaagctgatcctgctggcccagctgaagcccgagaaggatagcgacgaagccgtgacatatagcctgggaaagtttgggcagagggccctggatttctacagcattcatgtgaccaaggagtccacccaccccgtgaagcccctggcccagatcgccggaaacagatacgcctccggacctgtgggaaaggccctgagcgacgcatgtatgggcacaatcgcctccttcctgtctaagtaccaggacatcatcatcgaacaccagaaggtggtgaagggcaaccagaagagactggagagcctgcgggagctggccggcaaggaaaacctggaataccctagcgtgaccctgccacctcagcctcacaccaaggagggcgttgatgcctacaacgaagtgatcgcccgggtgcgaatgtgggtgaacctgaacctgtggcagaagctgaagctaagcagagatgatgccaagcctctgctgagactgaagggattcccttcctttcctctggtcgagagacaggccaacgaagtggactggtgggacatggtgtgtaacgtgaagaagctgatcaacgagaaaaaggaggatggcaaggtgttttggcagaatctggctggctacaagagacaggaagccctgagaccatacctgagcagcgaggaagatcggaagaagggaaagaaattcgctcggtaccagctgggcgacctgctgctgcacctggaaaagaagcacggcgaggactggggaaaggtgtacgacgaggcctgggagcggattgacaagaaagtggaaggcctgagcaagcacatcaagctggaagaggaacggagaagcgaggacgcccagagcaaggccgccctgaccgactggctgcgggctaaggccagcttcgtgatcgagggcctgaaggaggccgacaaggacgagttctgcagatgcgagctgaagctgcagaagtggtacggggacctgcggggaaagcccttcgccatcgaagccgagaacagcatcctggacatcagcggcttcagcaagcagtacaactgtgccttcatctggcagaaggacggcgtgaagaagctgaacctgtacctgatcatcaactacttcaagggcggcaagctgcggttcaagaagatcaaacctgaagccttcgaagccaacagattctacaccgtgatcaacaaaaagagcggcgagatcgtgcccatggaggtgaacttcaacttcgacgaccccaacctgatcatcctgcctctggcctttggcaagagacagggcagagaattcatctggaacgacctgctgtccctggaaaccggcagcctgaagctggccaacggaagagtgatcgagaagacactgtacaacagaagaacccggcaggatgagcctgccctgttcgtggccctgaccttcgagcggcgggaggtcctggactcctccaatatcaaaccaatgaacctgatcggcgtggcaagaggcgaaaacatccccgccgtgatcgccctgaccgaccccgagggctgcccactgagccggtttaaggatagcctgggaaacccaacccacatcctgagaatcggcgagagctataaggagaagcagcggaccatccaggccaagaaggaggtggagcagcggagagccggcggctacagccggaagtacgccagcaaagccaagaatctggcagacgatatggtgagaaacaccgctagagatctgctgtactacgccgtgacccaggatgccatgctgatcttcgccaacctgagccggggcttcggccggcagggcaagcggaccttcatggccgagagacagtacacacggatggaggactggctgaccgccaagctggcctacgagggcctgagcaagacctacctgtccaagacactggcccagtacacctccaagacatgcagcaactgtgggtttaccatcaccagcgccgactacgacagggtgctggagaagctgaagaagacagcaacaggctggatgaccacaattaacggcaaggagctgaaggtggagggccagattacctactacaacagatacaagagacagaacgtagtcaaggacctgtccgtcgagctggatagactgagcgaagaatctgtgaacaacgacatctcctcctggacaaagggcagaagcggagaagctctgagcctcctgaagaaaagattctcccatagacccgtgcaggagaagttcgtgtgcctgaactgcggcttcgagacacacgcagccgagcaagccgccctgaacatcgccagatcctggctgttcctgcggagccaggagtacaagaaataccagacaaacaagacaaccggcaacaccgataagagagccttcgtcgagacctggcagtccttttaccggaagaagcttaaggaggtgtggaaacctgccgtgcggtctggcggatctggcggaggctccttccagggcagcgtgaccttcagggacgtggccatcgacttcagccaggaggagtgggagtggctgcagcccgcccagagggacctgtacaggcacgtgatgctggagaactacggccacctggtgagcctggccggcttcaacatcagcaagccctacgtggtgagcctgctggagcagggcagggagccctggctggtgaagggcgacgtgaggagggaccccttcagcgagagcaacggcggcggcccaagcagcggcgcccctcctcccagcggcggcagcccagccggctccccaacctctaccgaggagggcacctctgagtccgccacccccgagagcggccctggcacctccaccgagcccagcgagggcagcgcacccggcagccctgccggcagccccacctccacagaggagggaaccagcaccgagcccagcgaaggcagcgccccaggcaccagcaccgagcctagtgagcaggagattaaacggatcaacaagatcagaagaagacttgtgaaagacagcaacaccaagaaggccggcaagacaggccccatgaaaaccctgctggttagagtgatgacacccgatctgagagagcggctggaaaacctgagaaagaagcctgaaaatatcccccagcccatcagcaatacatctagagccaacctgaataagctgctgaccgattacaccgaaatgaagaaggcgatcctgcatgtgtactgggaagagttccagaaggaccctgtgggcctgatgagccgggtggcccagcctgccagcaagaagatcgatcagaacaagctgaaacctgagatggacgagaagggcaacctgaccaccgccggctttgcctgctctcagtgtggccagcccctgttcgtgtacaagctggagcaggtgtctgagaagggcaaggcttacaccaactacttcggacggtgcaatgtggccgagcacgaaaagctgatcctgctggcccagctgaagcccgagaaggatagcgacgaagccgtgacatatagcctgggaaagtttgggcagagggccctggatttctacagcattcatgtgaccaaggagtccacccaccccgtgaagcccctggcccagatcgccggaaacagatacgcctccggacctgtgggaaaggccctgagcgacgcatgtatgggcacaatcgcctccttcctgtctaagtaccaggacatcatcatcgaacaccagaaggtggtgaagggcaaccagaagagactggagagcctgcgggagctggccggcaaggaaaacctggaataccctagcgtgaccctgccacctcagcctcacaccaaggagggcgttgatgcctacaacgaagtgatcgcccgggtgcgaatgtgggtgaacctgaacctgtggcagaagctgaagctaagcagagatgatgccaagcctctgctgagactgaagggattcccttcctttcctctggtcgagagacaggccaacgaagtggactggtgggacatggtgtgtaacgtgaagaagctgatcaacgagaaaaaggaggatggcaaggtgttttggcagaatctggctggctacaagagacaggaagccctgagaccatacctgagcagcgaggaagatcggaagaagggaaagaaattcgctcggtaccagctgggcgacctgctgctgcacctggaaaagaagcacggcgaggactggggaaaggtgtacgacgaggcctgggagcggattgacaagaaagtggaaggcctgagcaagcacatcaagctggaagaggaacggagaagcgaggacgcccagagcaaggccgccctgaccgactggctgcgggctaaggccagcttcgtgatcgagggcctgaaggaggccgacaaggacgagttctgcagatgcgagctgaagctgcagaagtggtacggggacctgcggggaaagcccttcgccatcgaagccgagaacagcatcctggacatcagcggcttcagcaagcagtacaactgtgccttcatctggcagaaggacggcgtgaagaagctgaacctgtacctgatcatcaactacttcaagggcggcaagctgcggttcaagaagatcaaacctgaagccttcgaagccaacagattctacaccgtgatcaacaaaaagagcggcgagatcgtgcccatggaggtgaacttcaacttcgacgaccccaacctgatcatcctgcctctggcctttggcaagagacagggcagagaattcatctggaacgacctgctgtccctggaaaccggcagcctgaagctggccaacggaagagtgatcgagaagacactgtacaacagaagaacccggcaggatgagcctgccctgttcgtggccctgaccttcgagcggcgggaggtcctggactcctccaatatcaaaccaatgaacctgatcggcgtggcaagaggcgaaaacatccccgccgtgatcgccctgaccgaccccgagggctgcccactgagccggtttaaggatagcctgggaaacccaacccacatcctgagaatcggcgagagctataaggagaagcagcggaccatccaggccaagaaggaggtggagcagcggagagccggcggctacagccggaagtacgccagcaaagccaagaatctggcagacgatatggtgagaaacaccgctagagatctgctgtactacgccgtgacccaggatgccatgctgatcttcgccaacctgagccggggcttcggccggcagggcaagcggaccttcatggccgagagacagtacacacggatggaggactggctgaccgccaagctggcctacgagggcctgagcaagacctacctgtccaagacactggcccagtacacctccaagacatgcagcaactgtgggtttaccatcaccagcgccgactacgacagggtgctggagaagctgaagaagacagcaacaggctggatgaccacaattaacggcaaggagctgaaggtggagggccagattacctactacaacagatacaagagacagaacgtagtcaaggacctgtccgtcgagctggatagactgagcgaagaatctgtgaacaacgacatctcctcctggacaaagggcagaagcggagaagctctgagcctcctgaagaaaagattctcccatagacccgtgcaggagaagttcgtgtgcctgaactgcggcttcgagacacacgcagccgagcaagccgccctgaacatcgccagatcctggctgttcctgcggagccaggagtacaagaaataccagacaaacaagacaaccggcaacaccgataagagagccttcgtcgagacctggcagtccttttaccggaagaagcttaaggaggtgtggaaacctgccgtgcggtctggcggatctggcggaggctcctttccagggcagcgtgaccttcagggacgtggccatcgacttcagccaggaggagtgggagtggctgcagcccgcccagagggacctgtacaggcacgtgatgctggagaactacggccacctggtgagcctggccggcttcaacatcagcaagccctacgtggtgagcctgctggagcagggcagggagccctggctggtgaagggcgacgtgaggagggaccccttcagcgagagcaacggcggatctggctccggcagcggccccaagaaaaagagaaaagtctaagctgccttctgcggggcttgccttctggccatgcccttcttctctcccttgcacctgtacctcttggtctttgaataaagcctgagtaggaaggctagcaaaaaaaaaaaaaaaaaaaaaaaaaaaaaaaaaaaaaaaaaaaaaaaaaaaaaaaaaaaaaaaaaaaaaaaaaaaaaaaa

SEQ ID NO: 16692 - RNA, 9485 nt, synthetic construct
  source 1..9485: mol_type = other RNA
aggaaataagagagaaaagaagagtaagaagaaatataagagccaccatggcccctaagaagaagcgtaaagtgagccggatggaacgcctcgtctacgaggtgcggcagaagtgcagaaacatcgaggacatctgcatctcctgcggatctctgaacgtgaccctggagcacccactgttcatcggcggcatgtgccagaactgtaaaaactgttttctggagtgtgcctatcaatacgacgatgacggctaccagagctactgcaccatctgttgcggcggaagagaggtgctgatgtgtggaaataacaactgctgccggtgcttctgcgtggaatgcgtggacctgctggtgggccccggcgccgcccaggccgctattaaggaagatccttggaactgctacatgtgcggccacaagggcacatacggcctgctgagacggagagaggactggcctagcagactgcagatgttcttcgccaataaccacgaccaggagttcgacccccctaaggtgtaccctcccgtccccgccgagaagagaaagcccatccgggtcctgagcctgttcgatggcatcgccaccggtctgctggtgctgaaggacctgggcatccaggtggataggtacattgcctccgaggtgtgcgaggactccatcaccgtgggaatggtgcgtcatcagggcaagatcatgtacgtgggcgacgtgcggagcgtgacacagaagcatatccaggagtggggccctttcgacctggtgatcggcggcagcccttgcaatgacctgagcatcgtgaacccagcccggaagggcctgtacgagggaaccggcagactgttcttcgagttttacagactgctgcacgacgcccggcctaaggaaggcgacgaccggcccttcttttggctgttcgagaatgtggtggccatgggagtcagcgacaagcgggatattagccggttcctggagagcaaccccgtgatgatcgatgccaaggaagtgagcgccgcccaccgggccagatacttctggggcaatctgcctggcatgaacagacccctggccagcaccgtgaacgacaagctggagctgcaggagtgcctggagcacggccggatcgccaagttcagcaaggtgagaaccatcaccacccgaagcaacagcatcaaacaaggcaaggaccagcactttcctgtgttcatgaacgagaaggaggacatcctgtggtgtaccgagatggagagagtgttcgggttcccagtccactacacagatgtcagcaacatgtctagactggccagacagagactgctgggaagaagctggtccgtccctgtgatcagacacctgttcgcccctctgaaggagtacttcgcctgcgtgagcagcggcaacagcaacgccaacagccggggccccagcttctctagcggcctggtgccactgtccctgagagggagccacatgggccccatggagatctacaaaaccgtgagcgcctggaagcggcagcctgtgcgcgtgctgagcctgtttcggaatatcgataaagtcctgaaaagcctgggattcctggagagcggctctggctccggcggtggcaccctgaagtacgtggaggatgtgacaaacgtggtcagacgggatgtggagaagtggggccccttcgatctggtgtacggcagcacccaacccctgggcagctcttgtgaccggtgccctggctggtacatgtttcagttccaccggatcctgcagtacgccctgccgagacaggagtcccagcggccattcttttggattttcatggacaacttgctgctgaccgaggatgaccaggaaactaccactcggttcctgcagaccgaagccgtgaccctgcaggacgtgagaggccgggactaccagaacgccatgcgggtgtggtccaacatccctggactgaaaagcaagcacgcacctctgacccctaaagaagaggagtacctgcaggcccaggtgcggagcagaagcaagctggacgcccctaaggtggatctgctggtgaagaattgcctcctgcccctgagagagtacttcaagtatttcagccagaatagtctgcccctgggaggcagcggcggcggcgccctggtgacatttgaggacgtcgccgtgcggttcacccaggaggaatgggctctgctggatccttctcagaaaatcctgtaccgggacgtgatgagagagacataccggaatctgacctccgtgggcatcaactgggaatgttgggaccttgaagcctgcttcagaagcctgggaagaaacctgagagtgcaggtggtgaagagaaagtgcgagctgaccaacagcggcccctgcgccgagggcggcccaagcagcggcgcccctcctcccagcggcggcagcccagccggctccccaacctctaccgaggagggcacctctgagtccgccacccccgagagcggccctggcacctccaccgagcccagcgagggcagcgcacccggcagccctgccggcagccccacctccacagaggagggaaccagcaccgagcccagcgaaggcagcgccccaggcaccagcaccgagcctagtgagcaggagattaaacggatcaacaagatcagaagaagacttgtgaaagacagcaacaccaagaaggccggcaagacaggccccatgaaaaccctgctggttagagtgatgacacccgatctgagagagcggctggaaaacctgagaaagaagcctgaaaatatcccccagcccatcagcaatacatctagagccaacctgaataagctgctgaccgattacaccgaaatgaagaaggcgatcctgcatgtgtactgggaagagttccagaaggaccctgtgggcctgatgagccgggtggcccagcctgccagcaagaagatcgatcagaacaagctgaaacctgagatggacgagaagggcaacctgaccaccgccggctttgcctgctctcagtgtggccagcccctgttcgtgtacaagctggagcaggtgtctgagaagggcaaggcttacaccaactacttcggacggtgcaatgtggccgagcacgaaaagctgatcctgctggcccagctgaagcccgagaaggatagcgacgaagccgtgacatatagcctgggaaagtttgggcagagggccctggatttctacagcattcatgtgaccaaggagtccacccaccccgtgaagcccctggcccagatcgccggaaacagatacgcctccggacctgtgggaaaggccctgagcgacgcatgtatgggcacaatcgcctccttcctgtctaagtaccaggacatcatcatcgaacaccagaaggtggtgaagggcaaccagaagagactggagagcctgcgggagctggccggcaaggaaaacctggaataccctagcgtgaccctgccacctcagcctcacaccaaggagggcgttgatgcctacaacgaagtgatcgcccgggtgcgaatgtgggtgaacctgaacctgtggcagaagctgaagctaagcagagatgatgccaagcctctgctgagactgaagggattcccttcctttcctctggtcgagagacaggccaacgaagtggactggtgggacatggtgtgtaacgtgaagaagctgatcaacgagaaaaaggaggatggcaaggtgttttggcagaatctggctggctacaagagacaggaagccctgagaccatacctgagcagcgaggaagatcggaagaagggaaagaaattcgctcggtaccagctgggcgacctgctgctgcacctggaaaagaagcacggcgaggactggggaaaggtgtacgacgaggcctgggagcggattgacaagaaagtggaaggcctgagcaagcacatcaagctggaagaggaacggagaagcgaggacgcccagagcaaggccgccctgaccgactggctgcgggctaaggccagcttcgtgatcgagggcctgaaggaggccgacaaggacgagttctgcagatgcgagctgaagctgcagaagtggtacggggacctgcggggaaagcccttcgccatcgaagccgagaacagcatcctggacatcagcggcttcagcaagcagtacaactgtgccttcatctggcagaaggacggcgtgaagaagctgaacctgtacctgatcatcaactacttcaagggcggcaagctgcggttcaagaagatcaaacctgaagccttcgaagccaacagattctacaccgtgatcaacaaaaagagcggcgagatcgtgcccatggaggtgaacttcaacttcgacgaccccaacctgatcatcctgcctctggcctttggcaagagacagggcagagaattcatctggaacgacctgctgtccctggaaaccggcagcctgaagctggccaacggaagagtgatcgagaagacactgtacaacagaagaacccggcaggatgagcctgccctgttcgtggccctgaccttcgagcggcgggaggtcctggactcctccaatatcaaaccaatgaacctgatcggcgtggcaagaggcgaaaacatccccgccgtgatcgccctgaccgaccccgagggctgcccactgagccggtttaaggatagcctgggaaacccaacccacatcctgagaatcggcgagagctataaggagaagcagcggaccatccaggccaagaaggaggtggagcagcggagagccggcggctacagccggaagtacgccagcaaagccaagaatctggcagacgatatggtgagaaacaccgctagagatctgctgtactacgccgtgacccaggatgccatgctgatcttcgccaacctgagccggggcttcggccggcagggcaagcggaccttcatggccgagagacagtacacacggatggaggactggctgaccgccaagctggcctacgagggcctgagcaagacctacctgtccaagacactggcccagtacacctccaagacatgcagcaactgtgggtttaccatcaccagcgccgactacgacagggtgctggagaagctgaagaagacagcaacaggctggatgaccacaattaacggcaaggagctgaaggtggagggccagattacctactacaacagatacaagagacagaacgtagtcaaggacctgtccgtcgagctggatagactgagcgaagaatctgtgaacaacgacatctcctcctggacaaagggcagaagcggagaagctctgagcctcctgaagaaaagattctcccatagacccgtgcaggagaagttcgtgtgcctgaactgcggcttcgagacacacgcagccgagcaagccgccctgaacatcgccagatcctggctgttcctgcggagccaggagtacaagaaataccagacaaacaagacaaccggcaacaccgataagagagccttcgtcgagacctggcagtccttttaccggaagaagcttaaggaggtgtggaaacctgccgtgcggtctggcggatctggcggaggctccgtggtggagctgctgaccttcgaggaggtggccgtgtacttcagcaaggaggagtgggccctgctggaccccggccagagggccctgtacagggacgtgatgcaggagaactacgaggccgtgagctggctgggcttccccgtgagcaagaccgacgtgatcagctgggtggagagggaggaggagttctgggtgcccgaccccaggagctgcgaggagggcgtgatcatcagcaacacccacggcggcccaagcagcggcgcccctcctcccagcggcggcagcccagccggctccccaacctctaccgaggagggcacctctgagtccgccacccccgagagcggccctggcacctccaccgagcccagcgagggcagcgcacccggcagccctgccggcagccccacctccacagaggagggaaccagcaccgagcccagcgaaggcagcgccccaggcaccagcaccgagcctagtgagcaggagattaaacggatcaacaagatcagaagaagacttgtgaaagacagcaacaccaagaaggccggcaagacaggccccatgaaaaccctgctggttagagtgatgacacccgatctgagagagcggctggaaaacctgagaaagaagcctgaaaatatcccccagcccatcagcaatacatctagagccaacctgaataagctgctgaccgattacaccgaaatgaagaaggcgatcctgcatgtgtactgggaagagttccagaaggaccctgtgggcctgatgagccgggtggcccagcctgccagcaagaagatcgatcagaacaagctgaaacctgagatggacgagaagggcaacctgaccaccgccggctttgcctgctctcagtgtggccagcccctgttcgtgtacaagctggagcaggtgtctgagaagggcaaggcttacaccaactacttcggacggtgcaatgtggccgagcacgaaaagctgatcctgctggcccagctgaagcccgagaaggatagcgacgaagccgtgacatatagcctgggaaagtttgggcagagggccctggatttctacagcattcatgtgaccaaggagtccacccaccccgtgaagcccctggcccagatcgccggaaacagatacgcctccggacctgtgggaaaggccctgagcgacgcatgtatgggcacaatcgcctccttcctgtctaagtaccaggacatcatcatcgaacaccagaaggtggtgaagggcaaccagaagagactggagagcctgcgggagctggccggcaaggaaaacctggaataccctagcgtgaccctgccacctcagcctcacaccaaggagggcgttgatgcctacaacgaagtgatcgcccgggtgcgaatgtgggtgaacctgaacctgtggcagaagctgaagctaagcagagatgatgccaagcctctgctgagactgaagggattcccttcctttcctctggtcgagagacaggccaacgaagtggactggtgggacatggtgtgtaacgtgaagaagctgatcaacgagaaaaaggaggatggcaaggtgttttggcagaatctggctggctacaagagacaggaagccctgagaccatacctgagcagcgaggaagatcggaagaagggaaagaaattcgctcggtaccagctgggcgacctgctgctgcacctggaaaagaagcacggcgaggactggggaaaggtgtacgacgaggcctgggagcggattgacaagaaagtggaaggcctgagcaagcacatcaagctggaagaggaacggagaagcgaggacgcccagagcaaggccgccctgaccgactggctgcgggctaaggccagcttcgtgatcgagggcctgaaggaggccgacaaggacgagttctgcagatgcgagctgaagctgcagaagtggtacggggacctgcggggaaagcccttcgccatcgaagccgagaacagcatcctggacatcagcggcttcagcaagcagtacaactgtgccttcatctggcagaaggacggcgtgaagaagctgaacctgtacctgatcatcaactacttcaagggcggcaagctgcggttcaagaagatcaaacctgaagccttcgaagccaacagattctacaccgtgatcaacaaaaagagcggcgagatcgtgcccatggaggtgaacttcaacttcgacgaccccaacctgatcatcctgcctctggcctttggcaagagacagggcagagaattcatctggaacgacctgctgtccctggaaaccggcagcctgaagctggccaacggaagagtgatcgagaagacactgtacaacagaagaacccggcaggatgagcctgccctgttcgtggccctgaccttcgagcggcgggaggtcctggactcctccaatatcaaaccaatgaacctgatcggcgtggcaagaggcgaaaacatccccgccgtgatcgccctgaccgaccccgagggctgcccactgagccggtttaaggatagcctgggaaacccaacccacatcctgagaatcggcgagagctataaggagaagcagcggaccatccaggccaagaaggaggtggagcagcggagagccggcggctacagccggaagtacgccagcaaagccaagaatctggcagacgatatggtgagaaacaccgctagagatctgctgtactacgccgtgacccaggatgccatgctgatcttcgccaacctgagccggggcttcggccggcagggcaagcggaccttcatggccgagagacagtacacacggatggaggactggctgaccgccaagctggcctacgagggcctgagcaagacctacctgtccaagacactggcccagtacacctccaagacatgcagcaactgtgggtttaccatcaccagcgccgactacgacagggtgctggagaagctgaagaagacagcaacaggctggatgaccacaattaacggcaaggagctgaaggtggagggccagattacctactacaacagatacaagagacagaacgtagtcaaggacctgtccgtcgagctggatagactgagcgaagaatctgtgaacaacgacatctcctcctggacaaagggcagaagcggagaagctctgagcctcctgaagaaaagattctcccatagacccgtgcaggagaagttcgtgtgcctgaactgcggcttcgagacacacgcagccgagcaagccgccctgaacatcgccagatcctggctgttcctgcggagccaggagtacaagaaataccagacaaacaagacaaccggcaacaccgataagagagccttcgtcgagacctggcagtccttttaccggaagaagcttaaggaggtgtggaaacctgccgtgcggtctggcggatctggcggaggctcctgtggtggagctgctgaccttcgaggaggtggccgtgtacttcagcaaggaggagtgggccctgctggaccccggccagagggccctgtacagggacgtgatgcaggagaactacgaggccgtgagctggctgggcttccccgtgagcaagaccgacgtgatcagctgggtggagagggaggaggagttctgggtgcccgaccccaggagctgcgaggagggcgtgatcatcagcaacacccacggatctggctccggcagcggccccaagaaaaagagaaaagtctaagctgccttctgcggggcttgccttctggccatgcccttcttctctcccttgcacctgtacctcttggtctttgaataaagcctgagtaggaaggctagcaaaaaaaaaaaaaaaaaaaaaaaaaaaaaaaaaaaaaaaaaaaaaaaaaaaaaaaaaaaaaaaaaaaaaaaaaaaaaaaa

SEQ ID NO: 16693 - RNA, 9485 nt, synthetic construct
  source 1..9485: mol_type = other RNA
aggaaataagagagaaaagaagagtaagaagaaatataagagccaccatggcccctaagaagaagcgtaaagtgagccggatggaacgcctcgtctacgaggtgcggcagaagtgcagaaacatcgaggacatctgcatctcctgcggatctctgaacgtgaccctggagcacccactgttcatcggcggcatgtgccagaactgtaaaaactgttttctggagtgtgcctatcaatacgacgatgacggctaccagagctactgcaccatctgttgcggcggaagagaggtgctgatgtgtggaaataacaactgctgccggtgcttctgcgtggaatgcgtggacctgctggtgggccccggcgccgcccaggccgctattaaggaagatccttggaactgctacatgtgcggccacaagggcacatacggcctgctgagacggagagaggactggcctagcagactgcagatgttcttcgccaataaccacgaccaggagttcgacccccctaaggtgtaccctcccgtccccgccgagaagagaaagcccatccgggtcctgagcctgttcgatggcatcgccaccggtctgctggtgctgaaggacctgggcatccaggtggataggtacattgcctccgaggtgtgcgaggactccatcaccgtgggaatggtgcgtcatcagggcaagatcatgtacgtgggcgacgtgcggagcgtgacacagaagcatatccaggagtggggccctttcgacctggtgatcggcggcagcccttgcaatgacctgagcatcgtgaacccagcccggaagggcctgtacgagggaaccggcagactgttcttcgagttttacagactgctgcacgacgcccggcctaaggaaggcgacgaccggcccttcttttggctgttcgagaatgtggtggccatgggagtcagcgacaagcgggatattagccggttcctggagagcaaccccgtgatgatcgatgccaaggaagtgagcgccgcccaccgggccagatacttctggggcaatctgcctggcatgaacagacccctggccagcaccgtgaacgacaagctggagctgcaggagtgcctggagcacggccggatcgccaagttcagcaaggtgagaaccatcaccacccgaagcaacagcatcaaacaaggcaaggaccagcactttcctgtgttcatgaacgagaaggaggacatcctgtggtgtaccgagatggagagagtgttcgggttcccagtccactacacagatgtcagcaacatgtctagactggccagacagagactgctgggaagaagctggtccgtccctgtgatcagacacctgttcgcccctctgaaggagtacttcgcctgcgtgagcagcggcaacagcaacgccaacagccggggccccagcttctctagcggcctggtgccactgtccctgagagggagccacatgggccccatggagatctacaaaaccgtgagcgcctggaagcggcagcctgtgcgcgtgctgagcctgtttcggaatatcgataaagtcctgaaaagcctgggattcctggagagcggctctggctccggcggtggcaccctgaagtacgtggaggatgtgacaaacgtggtcagacgggatgtggagaagtggggccccttcgatctggtgtacggcagcacccaacccctgggcagctcttgtgaccggtgccctggctggtacatgtttcagttccaccggatcctgcagtacgccctgccgagacaggagtcccagcggccattcttttggattttcatggacaacttgctgctgaccgaggatgaccaggaaactaccactcggttcctgcagaccgaagccgtgaccctgcaggacgtgagaggccgggactaccagaacgccatgcgggtgtggtccaacatccctggactgaaaagcaagcacgcacctctgacccctaaagaagaggagtacctgcaggcccaggtgcggagcagaagcaagctggacgcccctaaggtggatctgctggtgaagaattgcctcctgcccctgagagagtacttcaagtatttcagccagaatagtctgcccctgggaggcagcggcggcggcgccctggtgacatttgaggacgtcgccgtgcggttcacccaggaggaatgggctctgctggatccttctcagaaaatcctgtaccgggacgtgatgagagagacataccggaatctgacctccgtgggcatcaactgggaatgttgggaccttgaagcctgcttcagaagcctgggaagaaacctgagagtgcaggtggtgaagagaaagtgcgagctgaccaacagcggcccctgcgccgagggcggcccaagcagcggcgcccctcctcccagcggcggcagcccagccggctccccaacctctaccgaggagggcacctctgagtccgccacccccgagagcggccctggcacctccaccgagcccagcgagggcagcgcacccggcagccctgccggcagccccacctccacagaggagggaaccagcaccgagcccagcgaaggcagcgccccaggcaccagcaccgagcctagtgagcaggagattaaacggatcaacaagatcagaagaagacttgtgaaagacagcaacaccaagaaggccggcaagacaggccccatgaaaaccctgctggttagagtgatgacacccgatctgagagagcggctggaaaacctgagaaagaagcctgaaaatatcccccagcccatcagcaatacatctagagccaacctgaataagctgctgaccgattacaccgaaatgaagaaggcgatcctgcatgtgtactgggaagagttccagaaggaccctgtgggcctgatgagccgggtggcccagcctgccagcaagaagatcgatcagaacaagctgaaacctgagatggacgagaagggcaacctgaccaccgccggctttgcctgctctcagtgtggccagcccctgttcgtgtacaagctggagcaggtgtctgagaagggcaaggcttacaccaactacttcggacggtgcaatgtggccgagcacgaaaagctgatcctgctggcccagctgaagcccgagaaggatagcgacgaagccgtgacatatagcctgggaaagtttgggcagagggccctggatttctacagcattcatgtgaccaaggagtccacccaccccgtgaagcccctggcccagatcgccggaaacagatacgcctccggacctgtgggaaaggccctgagcgacgcatgtatgggcacaatcgcctccttcctgtctaagtaccaggacatcatcatcgaacaccagaaggtggtgaagggcaaccagaagagactggagagcctgcgggagctggccggcaaggaaaacctggaataccctagcgtgaccctgccacctcagcctcacaccaaggagggcgttgatgcctacaacgaagtgatcgcccgggtgcgaatgtgggtgaacctgaacctgtggcagaagctgaagctaagcagagatgatgccaagcctctgctgagactgaagggattcccttcctttcctctggtcgagagacaggccaacgaagtggactggtgggacatggtgtgtaacgtgaagaagctgatcaacgagaaaaaggaggatggcaaggtgttttggcagaatctggctggctacaagagacaggaagccctgagaccatacctgagcagcgaggaagatcggaagaagggaaagaaattcgctcggtaccagctgggcgacctgctgctgcacctggaaaagaagcacggcgaggactggggaaaggtgtacgacgaggcctgggagcggattgacaagaaagtggaaggcctgagcaagcacatcaagctggaagaggaacggagaagcgaggacgcccagagcaaggccgccctgaccgactggctgcgggctaaggccagcttcgtgatcgagggcctgaaggaggccgacaaggacgagttctgcagatgcgagctgaagctgcagaagtggtacggggacctgcggggaaagcccttcgccatcgaagccgagaacagcatcctggacatcagcggcttcagcaagcagtacaactgtgccttcatctggcagaaggacggcgtgaagaagctgaacctgtacctgatcatcaactacttcaagggcggcaagctgcggttcaagaagatcaaacctgaagccttcgaagccaacagattctacaccgtgatcaacaaaaagagcggcgagatcgtgcccatggaggtgaacttcaacttcgacgaccccaacctgatcatcctgcctctggcctttggcaagagacagggcagagaattcatctggaacgacctgctgtccctggaaaccggcagcctgaagctggccaacggaagagtgatcgagaagacactgtacaacagaagaacccggcaggatgagcctgccctgttcgtggccctgaccttcgagcggcgggaggtcctggactcctccaatatcaaaccaatgaacctgatcggcgtggcaagaggcgaaaacatccccgccgtgatcgccctgaccgaccccgagggctgcccactgagccggtttaaggatagcctgggaaacccaacccacatcctgagaatcggcgagagctataaggagaagcagcggaccatccaggccaagaaggaggtggagcagcggagagccggcggctacagccggaagtacgccagcaaagccaagaatctggcagacgatatggtgagaaacaccgctagagatctgctgtactacgccgtgacccaggatgccatgctgatcttcgccaacctgagccggggcttcggccggcagggcaagcggaccttcatggccgagagacagtacacacggatggaggactggctgaccgccaagctggcctacgagggcctgagcaagacctacctgtccaagacactggcccagtacacctccaagacatgcagcaactgtgggtttaccatcaccagcgccgactacgacagggtgctggagaagctgaagaagacagcaacaggctggatgaccacaattaacggcaaggagctgaaggtggagggccagattacctactacaacagatacaagagacagaacgtagtcaaggacctgtccgtcgagctggatagactgagcgaagaatctgtgaacaacgacatctcctcctggacaaagggcagaagcggagaagctctgagcctcctgaagaaaagattctcccatagacccgtgcaggagaagttcgtgtgcctgaactgcggcttcgagacacacgcagccgagcaagccgccctgaacatcgccagatcctggctgttcctgcggagccaggagtacaagaaataccagacaaacaagacaaccggcaacaccgataagagagccttcgtcgagacctggcagtccttttaccggaagaagcttaaggaggtgtggaaacctgccgtgcggtctggcggatctggcggaggctccagcaaggtgcccgtgaccttcggcgacctggccatctacttcagccaggaggagtgggagtggctgcaccccgcccagagggacctgtacaggcacgtgatgctggagaactacggccacctggtgagcctgggcctgaacatcagcaagccctacgtggtgagcctgctggagcagggcagggacccctggctggacaacagggacgtgaggagggacctgttcagcgagagcaagggcgagggcggcccaagcagcggcgcccctcctcccagcggcggcagcccagccggctccccaacctctaccgaggagggcacctctgagtccgccacccccgagagcggccctggcacctccaccgagcccagcgagggcagcgcacccggcagccctgccggcagccccacctccacagaggagggaaccagcaccgagcccagcgaaggcagcgccccaggcaccagcaccgagcctagtgagcaggagattaaacggatcaacaagatcagaagaagacttgtgaaagacagcaacaccaagaaggccggcaagacaggccccatgaaaaccctgctggttagagtgatgacacccgatctgagagagcggctggaaaacctgagaaagaagcctgaaaatatcccccagcccatcagcaatacatctagagccaacctgaataagctgctgaccgattacaccgaaatgaagaaggcgatcctgcatgtgtactgggaagagttccagaaggaccctgtgggcctgatgagccgggtggcccagcctgccagcaagaagatcgatcagaacaagctgaaacctgagatggacgagaagggcaacctgaccaccgccggctttgcctgctctcagtgtggccagcccctgttcgtgtacaagctggagcaggtgtctgagaagggcaaggcttacaccaactacttcggacggtgcaatgtggccgagcacgaaaagctgatcctgctggcccagctgaagcccgagaaggatagcgacgaagccgtgacatatagcctgggaaagtttgggcagagggccctggatttctacagcattcatgtgaccaaggagtccacccaccccgtgaagcccctggcccagatcgccggaaacagatacgcctccggacctgtgggaaaggccctgagcgacgcatgtatgggcacaatcgcctccttcctgtctaagtaccaggacatcatcatcgaacaccagaaggtggtgaagggcaaccagaagagactggagagcctgcgggagctggccggcaaggaaaacctggaataccctagcgtgaccctgccacctcagcctcacaccaaggagggcgttgatgcctacaacgaagtgatcgcccgggtgcgaatgtgggtgaacctgaacctgtggcagaagctgaagctaagcagagatgatgccaagcctctgctgagactgaagggattcccttcctttcctctggtcgagagacaggccaacgaagtggactggtgggacatggtgtgtaacgtgaagaagctgatcaacgagaaaaaggaggatggcaaggtgttttggcagaatctggctggctacaagagacaggaagccctgagaccatacctgagcagcgaggaagatcggaagaagggaaagaaattcgctcggtaccagctgggcgacctgctgctgcacctggaaaagaagcacggcgaggactggggaaaggtgtacgacgaggcctgggagcggattgacaagaaagtggaaggcctgagcaagcacatcaagctggaagaggaacggagaagcgaggacgcccagagcaaggccgccctgaccgactggctgcgggctaaggccagcttcgtgatcgagggcctgaaggaggccgacaaggacgagttctgcagatgcgagctgaagctgcagaagtggtacggggacctgcggggaaagcccttcgccatcgaagccgagaacagcatcctggacatcagcggcttcagcaagcagtacaactgtgccttcatctggcagaaggacggcgtgaagaagctgaacctgtacctgatcatcaactacttcaagggcggcaagctgcggttcaagaagatcaaacctgaagccttcgaagccaacagattctacaccgtgatcaacaaaaagagcggcgagatcgtgcccatggaggtgaacttcaacttcgacgaccccaacctgatcatcctgcctctggcctttggcaagagacagggcagagaattcatctggaacgacctgctgtccctggaaaccggcagcctgaagctggccaacggaagagtgatcgagaagacactgtacaacagaagaacccggcaggatgagcctgccctgttcgtggccctgaccttcgagcggcgggaggtcctggactcctccaatatcaaaccaatgaacctgatcggcgtggcaagaggcgaaaacatccccgccgtgatcgccctgaccgaccccgagggctgcccactgagccggtttaaggatagcctgggaaacccaacccacatcctgagaatcggcgagagctataaggagaagcagcggaccatccaggccaagaaggaggtggagcagcggagagccggcggctacagccggaagtacgccagcaaagccaagaatctggcagacgatatggtgagaaacaccgctagagatctgctgtactacgccgtgacccaggatgccatgctgatcttcgccaacctgagccggggcttcggccggcagggcaagcggaccttcatggccgagagacagtacacacggatggaggactggctgaccgccaagctggcctacgagggcctgagcaagacctacctgtccaagacactggcccagtacacctccaagacatgcagcaactgtgggtttaccatcaccagcgccgactacgacagggtgctggagaagctgaagaagacagcaacaggctggatgaccacaattaacggcaaggagctgaaggtggagggccagattacctactacaacagatacaagagacagaacgtagtcaaggacctgtccgtcgagctggatagactgagcgaagaatctgtgaacaacgacatctcctcctggacaaagggcagaagcggagaagctctgagcctcctgaagaaaagattctcccatagacccgtgcaggagaagttcgtgtgcctgaactgcggcttcgagacacacgcagccgagcaagccgccctgaacatcgccagatcctggctgttcctgcggagccaggagtacaagaaataccagacaaacaagacaaccggcaacaccgataagagagccttcgtcgagacctggcagtccttttaccggaagaagcttaaggaggtgtggaaacctgccgtgcggtctggcggatctggcggaggctcctagcaaggtgcccgtgaccttcggcgacctggccatctacttcagccaggaggagtgggagtggctgcaccccgcccagagggacctgtacaggcacgtgatgctggagaactacggccacctggtgagcctgggcctgaacatcagcaagccctacgtggtgagcctgctggagcagggcagggacccctggctggacaacagggacgtgaggagggacctgttcagcgagagcaagggcgagggatctggctccggcagcggccccaagaaaaagagaaaagtctaagctgccttctgcggggcttgccttctggccatgcccttcttctctcccttgcacctgtacctcttggtctttgaataaagcctgagtaggaaggctagcaaaaaaaaaaaaaaaaaaaaaaaaaaaaaaaaaaaaaaaaaaaaaaaaaaaaaaaaaaaaaaaaaaaaaaaaaaaaaaaa

SEQ ID NO: 16694 - RNA, 9485 nt, synthetic construct
  source 1..9485: mol_type = other RNA
aggaaataagagagaaaagaagagtaagaagaaatataagagccaccatggcccctaagaagaagcgtaaagtgagccggatggaacgcctcgtctacgaggtgcggcagaagtgcagaaacatcgaggacatctgcatctcctgcggatctctgaacgtgaccctggagcacccactgttcatcggcggcatgtgccagaactgtaaaaactgttttctggagtgtgcctatcaatacgacgatgacggctaccagagctactgcaccatctgttgcggcggaagagaggtgctgatgtgtggaaataacaactgctgccggtgcttctgcgtggaatgcgtggacctgctggtgggccccggcgccgcccaggccgctattaaggaagatccttggaactgctacatgtgcggccacaagggcacatacggcctgctgagacggagagaggactggcctagcagactgcagatgttcttcgccaataaccacgaccaggagttcgacccccctaaggtgtaccctcccgtccccgccgagaagagaaagcccatccgggtcctgagcctgttcgatggcatcgccaccggtctgctggtgctgaaggacctgggcatccaggtggataggtacattgcctccgaggtgtgcgaggactccatcaccgtgggaatggtgcgtcatcagggcaagatcatgtacgtgggcgacgtgcggagcgtgacacagaagcatatccaggagtggggccctttcgacctggtgatcggcggcagcccttgcaatgacctgagcatcgtgaacccagcccggaagggcctgtacgagggaaccggcagactgttcttcgagttttacagactgctgcacgacgcccggcctaaggaaggcgacgaccggcccttcttttggctgttcgagaatgtggtggccatgggagtcagcgacaagcgggatattagccggttcctggagagcaaccccgtgatgatcgatgccaaggaagtgagcgccgcccaccgggccagatacttctggggcaatctgcctggcatgaacagacccctggccagcaccgtgaacgacaagctggagctgcaggagtgcctggagcacggccggatcgccaagttcagcaaggtgagaaccatcaccacccgaagcaacagcatcaaacaaggcaaggaccagcactttcctgtgttcatgaacgagaaggaggacatcctgtggtgtaccgagatggagagagtgttcgggttcccagtccactacacagatgtcagcaacatgtctagactggccagacagagactgctgggaagaagctggtccgtccctgtgatcagacacctgttcgcccctctgaaggagtacttcgcctgcgtgagcagcggcaacagcaacgccaacagccggggccccagcttctctagcggcctggtgccactgtccctgagagggagccacatgggccccatggagatctacaaaaccgtgagcgcctggaagcggcagcctgtgcgcgtgctgagcctgtttcggaatatcgataaagtcctgaaaagcctgggattcctggagagcggctctggctccggcggtggcaccctgaagtacgtggaggatgtgacaaacgtggtcagacgggatgtggagaagtggggccccttcgatctggtgtacggcagcacccaacccctgggcagctcttgtgaccggtgccctggctggtacatgtttcagttccaccggatcctgcagtacgccctgccgagacaggagtcccagcggccattcttttggattttcatggacaacttgctgctgaccgaggatgaccaggaaactaccactcggttcctgcagaccgaagccgtgaccctgcaggacgtgagaggccgggactaccagaacgccatgcgggtgtggtccaacatccctggactgaaaagcaagcacgcacctctgacccctaaagaagaggagtacctgcaggcccaggtgcggagcagaagcaagctggacgcccctaaggtggatctgctggtgaagaattgcctcctgcccctgagagagtacttcaagtatttcagccagaatagtctgcccctgggaggcagcggcggcggcgccctggtgacatttgaggacgtcgccgtgcggttcacccaggaggaatgggctctgctggatccttctcagaaaatcctgtaccgggacgtgatgagagagacataccggaatctgacctccgtgggcatcaactgggaatgttgggaccttgaagcctgcttcagaagcctgggaagaaacctgagagtgcaggtggtgaagagaaagtgcgagctgaccaacagcggcccctgcgccgagggcggcccaagcagcggcgcccctcctcccagcggcggcagcccagccggctccccaacctctaccgaggagggcacctctgagtccgccacccccgagagcggccctggcacctccaccgagcccagcgagggcagcgcacccggcagccctgccggcagccccacctccacagaggagggaaccagcaccgagcccagcgaaggcagcgccccaggcaccagcaccgagcctagtgagcaggagattaaacggatcaacaagatcagaagaagacttgtgaaagacagcaacaccaagaaggccggcaagacaggccccatgaaaaccctgctggttagagtgatgacacccgatctgagagagcggctggaaaacctgagaaagaagcctgaaaatatcccccagcccatcagcaatacatctagagccaacctgaataagctgctgaccgattacaccgaaatgaagaaggcgatcctgcatgtgtactgggaagagttccagaaggaccctgtgggcctgatgagccgggtggcccagcctgccagcaagaagatcgatcagaacaagctgaaacctgagatggacgagaagggcaacctgaccaccgccggctttgcctgctctcagtgtggccagcccctgttcgtgtacaagctggagcaggtgtctgagaagggcaaggcttacaccaactacttcggacggtgcaatgtggccgagcacgaaaagctgatcctgctggcccagctgaagcccgagaaggatagcgacgaagccgtgacatatagcctgggaaagtttgggcagagggccctggatttctacagcattcatgtgaccaaggagtccacccaccccgtgaagcccctggcccagatcgccggaaacagatacgcctccggacctgtgggaaaggccctgagcgacgcatgtatgggcacaatcgcctccttcctgtctaagtaccaggacatcatcatcgaacaccagaaggtggtgaagggcaaccagaagagactggagagcctgcgggagctggccggcaaggaaaacctggaataccctagcgtgaccctgccacctcagcctcacaccaaggagggcgttgatgcctacaacgaagtgatcgcccgggtgcgaatgtgggtgaacctgaacctgtggcagaagctgaagctaagcagagatgatgccaagcctctgctgagactgaagggattcccttcctttcctctggtcgagagacaggccaacgaagtggactggtgggacatggtgtgtaacgtgaagaagctgatcaacgagaaaaaggaggatggcaaggtgttttggcagaatctggctggctacaagagacaggaagccctgagaccatacctgagcagcgaggaagatcggaagaagggaaagaaattcgctcggtaccagctgggcgacctgctgctgcacctggaaaagaagcacggcgaggactggggaaaggtgtacgacgaggcctgggagcggattgacaagaaagtggaaggcctgagcaagcacatcaagctggaagaggaacggagaagcgaggacgcccagagcaaggccgccctgaccgactggctgcgggctaaggccagcttcgtgatcgagggcctgaaggaggccgacaaggacgagttctgcagatgcgagctgaagctgcagaagtggtacggggacctgcggggaaagcccttcgccatcgaagccgagaacagcatcctggacatcagcggcttcagcaagcagtacaactgtgccttcatctggcagaaggacggcgtgaagaagctgaacctgtacctgatcatcaactacttcaagggcggcaagctgcggttcaagaagatcaaacctgaagccttcgaagccaacagattctacaccgtgatcaacaaaaagagcggcgagatcgtgcccatggaggtgaacttcaacttcgacgaccccaacctgatcatcctgcctctggcctttggcaagagacagggcagagaattcatctggaacgacctgctgtccctggaaaccggcagcctgaagctggccaacggaagagtgatcgagaagacactgtacaacagaagaacccggcaggatgagcctgccctgttcgtggccctgaccttcgagcggcgggaggtcctggactcctccaatatcaaaccaatgaacctgatcggcgtggcaagaggcgaaaacatccccgccgtgatcgccctgaccgaccccgagggctgcccactgagccggtttaaggatagcctgggaaacccaacccacatcctgagaatcggcgagagctataaggagaagcagcggaccatccaggccaagaaggaggtggagcagcggagagccggcggctacagccggaagtacgccagcaaagccaagaatctggcagacgatatggtgagaaacaccgctagagatctgctgtactacgccgtgacccaggatgccatgctgatcttcgccaacctgagccggggcttcggccggcagggcaagcggaccttcatggccgagagacagtacacacggatggaggactggctgaccgccaagctggcctacgagggcctgagcaagacctacctgtccaagacactggcccagtacacctccaagacatgcagcaactgtgggtttaccatcaccagcgccgactacgacagggtgctggagaagctgaagaagacagcaacaggctggatgaccacaattaacggcaaggagctgaaggtggagggccagattacctactacaacagatacaagagacagaacgtagtcaaggacctgtccgtcgagctggatagactgagcgaagaatctgtgaacaacgacatctcctcctggacaaagggcagaagcggagaagctctgagcctcctgaagaaaagattctcccatagacccgtgcaggagaagttcgtgtgcctgaactgcggcttcgagacacacgcagccgagcaagccgccctgaacatcgccagatcctggctgttcctgcggagccaggagtacaagaaataccagacaaacaagacaaccggcaacaccgataagagagccttcgtcgagacctggcagtccttttaccggaagaagcttaaggaggtgtggaaacctgccgtgcggtctggcggatctggcggaggctccttccaggagctggtgaccttcagggacgtggccatcgacttcagcaggcaggagtgggagtacctggaccccaaccagagggacctgtacagggacgtgatgctggagaactacagcaacctggtgagcctgggccacagcatcagcaagcccgacgtggtggacctgctggagcagggcaaggagccctggatgctgctgggcgaggagacccagtacagcggcagcaaccccgagcccgtgggcggcccaagcagcggcgcccctcctcccagcggcggcagcccagccggctccccaacctctaccgaggagggcacctctgagtccgccacccccgagagcggccctggcacctccaccgagcccagcgagggcagcgcacccggcagccctgccggcagccccacctccacagaggagggaaccagcaccgagcccagcgaaggcagcgccccaggcaccagcaccgagcctagtgagcaggagattaaacggatcaacaagatcagaagaagacttgtgaaagacagcaacaccaagaaggccggcaagacaggccccatgaaaaccctgctggttagagtgatgacacccgatctgagagagcggctggaaaacctgagaaagaagcctgaaaatatcccccagcccatcagcaatacatctagagccaacctgaataagctgctgaccgattacaccgaaatgaagaaggcgatcctgcatgtgtactgggaagagttccagaaggaccctgtgggcctgatgagccgggtggcccagcctgccagcaagaagatcgatcagaacaagctgaaacctgagatggacgagaagggcaacctgaccaccgccggctttgcctgctctcagtgtggccagcccctgttcgtgtacaagctggagcaggtgtctgagaagggcaaggcttacaccaactacttcggacggtgcaatgtggccgagcacgaaaagctgatcctgctggcccagctgaagcccgagaaggatagcgacgaagccgtgacatatagcctgggaaagtttgggcagagggccctggatttctacagcattcatgtgaccaaggagtccacccaccccgtgaagcccctggcccagatcgccggaaacagatacgcctccggacctgtgggaaaggccctgagcgacgcatgtatgggcacaatcgcctccttcctgtctaagtaccaggacatcatcatcgaacaccagaaggtggtgaagggcaaccagaagagactggagagcctgcgggagctggccggcaaggaaaacctggaataccctagcgtgaccctgccacctcagcctcacaccaaggagggcgttgatgcctacaacgaagtgatcgcccgggtgcgaatgtgggtgaacctgaacctgtggcagaagctgaagctaagcagagatgatgccaagcctctgctgagactgaagggattcccttcctttcctctggtcgagagacaggccaacgaagtggactggtgggacatggtgtgtaacgtgaagaagctgatcaacgagaaaaaggaggatggcaaggtgttttggcagaatctggctggctacaagagacaggaagccctgagaccatacctgagcagcgaggaagatcggaagaagggaaagaaattcgctcggtaccagctgggcgacctgctgctgcacctggaaaagaagcacggcgaggactggggaaaggtgtacgacgaggcctgggagcggattgacaagaaagtggaaggcctgagcaagcacatcaagctggaagaggaacggagaagcgaggacgcccagagcaaggccgccctgaccgactggctgcgggctaaggccagcttcgtgatcgagggcctgaaggaggccgacaaggacgagttctgcagatgcgagctgaagctgcagaagtggtacggggacctgcggggaaagcccttcgccatcgaagccgagaacagcatcctggacatcagcggcttcagcaagcagtacaactgtgccttcatctggcagaaggacggcgtgaagaagctgaacctgtacctgatcatcaactacttcaagggcggcaagctgcggttcaagaagatcaaacctgaagccttcgaagccaacagattctacaccgtgatcaacaaaaagagcggcgagatcgtgcccatggaggtgaacttcaacttcgacgaccccaacctgatcatcctgcctctggcctttggcaagagacagggcagagaattcatctggaacgacctgctgtccctggaaaccggcagcctgaagctggccaacggaagagtgatcgagaagacactgtacaacagaagaacccggcaggatgagcctgccctgttcgtggccctgaccttcgagcggcgggaggtcctggactcctccaatatcaaaccaatgaacctgatcggcgtggcaagaggcgaaaacatccccgccgtgatcgccctgaccgaccccgagggctgcccactgagccggtttaaggatagcctgggaaacccaacccacatcctgagaatcggcgagagctataaggagaagcagcggaccatccaggccaagaaggaggtggagcagcggagagccggcggctacagccggaagtacgccagcaaagccaagaatctggcagacgatatggtgagaaacaccgctagagatctgctgtactacgccgtgacccaggatgccatgctgatcttcgccaacctgagccggggcttcggccggcagggcaagcggaccttcatggccgagagacagtacacacggatggaggactggctgaccgccaagctggcctacgagggcctgagcaagacctacctgtccaagacactggcccagtacacctccaagacatgcagcaactgtgggtttaccatcaccagcgccgactacgacagggtgctggagaagctgaagaagacagcaacaggctggatgaccacaattaacggcaaggagctgaaggtggagggccagattacctactacaacagatacaagagacagaacgtagtcaaggacctgtccgtcgagctggatagactgagcgaagaatctgtgaacaacgacatctcctcctggacaaagggcagaagcggagaagctctgagcctcctgaagaaaagattctcccatagacccgtgcaggagaagttcgtgtgcctgaactgcggcttcgagacacacgcagccgagcaagccgccctgaacatcgccagatcctggctgttcctgcggagccaggagtacaagaaataccagacaaacaagacaaccggcaacaccgataagagagccttcgtcgagacctggcagtccttttaccggaagaagcttaaggaggtgtggaaacctgccgtgcggtctggcggatctggcggaggctcctttccaggagctggtgaccttcagggacgtggccatcgacttcagcaggcaggagtgggagtacctggaccccaaccagagggacctgtacagggacgtgatgctggagaactacagcaacctggtgagcctgggccacagcatcagcaagcccgacgtggtggacctgctggagcagggcaaggagccctggatgctgctgggcgaggagacccagtacagcggcagcaaccccgagcccgtgggatctggctccggcagcggccccaagaaaaagagaaaagtctaagctgccttctgcggggcttgccttctggccatgcccttcttctctcccttgcacctgtacctcttggtctttgaataaagcctgagtaggaaggctagcaaaaaaaaaaaaaaaaaaaaaaaaaaaaaaaaaaaaaaaaaaaaaaaaaaaaaaaaaaaaaaaaaaaaaaaaaaaaaaaa

SEQ ID NO: 16695 - RNA, 9485 nt, synthetic construct
  source 1..9485: mol_type = other RNA
aggaaataagagagaaaagaagagtaagaagaaatataagagccaccatggcccctaagaagaagcgtaaagtgagccggatggaacgcctcgtctacgaggtgcggcagaagtgcagaaacatcgaggacatctgcatctcctgcggatctctgaacgtgaccctggagcacccactgttcatcggcggcatgtgccagaactgtaaaaactgttttctggagtgtgcctatcaatacgacgatgacggctaccagagctactgcaccatctgttgcggcggaagagaggtgctgatgtgtggaaataacaactgctgccggtgcttctgcgtggaatgcgtggacctgctggtgggccccggcgccgcccaggccgctattaaggaagatccttggaactgctacatgtgcggccacaagggcacatacggcctgctgagacggagagaggactggcctagcagactgcagatgttcttcgccaataaccacgaccaggagttcgacccccctaaggtgtaccctcccgtccccgccgagaagagaaagcccatccgggtcctgagcctgttcgatggcatcgccaccggtctgctggtgctgaaggacctgggcatccaggtggataggtacattgcctccgaggtgtgcgaggactccatcaccgtgggaatggtgcgtcatcagggcaagatcatgtacgtgggcgacgtgcggagcgtgacacagaagcatatccaggagtggggccctttcgacctggtgatcggcggcagcccttgcaatgacctgagcatcgtgaacccagcccggaagggcctgtacgagggaaccggcagactgttcttcgagttttacagactgctgcacgacgcccggcctaaggaaggcgacgaccggcccttcttttggctgttcgagaatgtggtggccatgggagtcagcgacaagcgggatattagccggttcctggagagcaaccccgtgatgatcgatgccaaggaagtgagcgccgcccaccgggccagatacttctggggcaatctgcctggcatgaacagacccctggccagcaccgtgaacgacaagctggagctgcaggagtgcctggagcacggccggatcgccaagttcagcaaggtgagaaccatcaccacccgaagcaacagcatcaaacaaggcaaggaccagcactttcctgtgttcatgaacgagaaggaggacatcctgtggtgtaccgagatggagagagtgttcgggttcccagtccactacacagatgtcagcaacatgtctagactggccagacagagactgctgggaagaagctggtccgtccctgtgatcagacacctgttcgcccctctgaaggagtacttcgcctgcgtgagcagcggcaacagcaacgccaacagccggggccccagcttctctagcggcctggtgccactgtccctgagagggagccacatgggccccatggagatctacaaaaccgtgagcgcctggaagcggcagcctgtgcgcgtgctgagcctgtttcggaatatcgataaagtcctgaaaagcctgggattcctggagagcggctctggctccggcggtggcaccctgaagtacgtggaggatgtgacaaacgtggtcagacgggatgtggagaagtggggccccttcgatctggtgtacggcagcacccaacccctgggcagctcttgtgaccggtgccctggctggtacatgtttcagttccaccggatcctgcagtacgccctgccgagacaggagtcccagcggccattcttttggattttcatggacaacttgctgctgaccgaggatgaccaggaaactaccactcggttcctgcagaccgaagccgtgaccctgcaggacgtgagaggccgggactaccagaacgccatgcgggtgtggtccaacatccctggactgaaaagcaagcacgcacctctgacccctaaagaagaggagtacctgcaggcccaggtgcggagcagaagcaagctggacgcccctaaggtggatctgctggtgaagaattgcctcctgcccctgagagagtacttcaagtatttcagccagaatagtctgcccctgggaggcagcggcggcggcgccctggtgacatttgaggacgtcgccgtgcggttcacccaggaggaatgggctctgctggatccttctcagaaaatcctgtaccgggacgtgatgagagagacataccggaatctgacctccgtgggcatcaactgggaatgttgggaccttgaagcctgcttcagaagcctgggaagaaacctgagagtgcaggtggtgaagagaaagtgcgagctgaccaacagcggcccctgcgccgagggcggcccaagcagcggcgcccctcctcccagcggcggcagcccagccggctccccaacctctaccgaggagggcacctctgagtccgccacccccgagagcggccctggcacctccaccgagcccagcgagggcagcgcacccggcagccctgccggcagccccacctccacagaggagggaaccagcaccgagcccagcgaaggcagcgccccaggcaccagcaccgagcctagtgagcaggagattaaacggatcaacaagatcagaagaagacttgtgaaagacagcaacaccaagaaggccggcaagacaggccccatgaaaaccctgctggttagagtgatgacacccgatctgagagagcggctggaaaacctgagaaagaagcctgaaaatatcccccagcccatcagcaatacatctagagccaacctgaataagctgctgaccgattacaccgaaatgaagaaggcgatcctgcatgtgtactgggaagagttccagaaggaccctgtgggcctgatgagccgggtggcccagcctgccagcaagaagatcgatcagaacaagctgaaacctgagatggacgagaagggcaacctgaccaccgccggctttgcctgctctcagtgtggccagcccctgttcgtgtacaagctggagcaggtgtctgagaagggcaaggcttacaccaactacttcggacggtgcaatgtggccgagcacgaaaagctgatcctgctggcccagctgaagcccgagaaggatagcgacgaagccgtgacatatagcctgggaaagtttgggcagagggccctggatttctacagcattcatgtgaccaaggagtccacccaccccgtgaagcccctggcccagatcgccggaaacagatacgcctccggacctgtgggaaaggccctgagcgacgcatgtatgggcacaatcgcctccttcctgtctaagtaccaggacatcatcatcgaacaccagaaggtggtgaagggcaaccagaagagactggagagcctgcgggagctggccggcaaggaaaacctggaataccctagcgtgaccctgccacctcagcctcacaccaaggagggcgttgatgcctacaacgaagtgatcgcccgggtgcgaatgtgggtgaacctgaacctgtggcagaagctgaagctaagcagagatgatgccaagcctctgctgagactgaagggattcccttcctttcctctggtcgagagacaggccaacgaagtggactggtgggacatggtgtgtaacgtgaagaagctgatcaacgagaaaaaggaggatggcaaggtgttttggcagaatctggctggctacaagagacaggaagccctgagaccatacctgagcagcgaggaagatcggaagaagggaaagaaattcgctcggtaccagctgggcgacctgctgctgcacctggaaaagaagcacggcgaggactggggaaaggtgtacgacgaggcctgggagcggattgacaagaaagtggaaggcctgagcaagcacatcaagctggaagaggaacggagaagcgaggacgcccagagcaaggccgccctgaccgactggctgcgggctaaggccagcttcgtgatcgagggcctgaaggaggccgacaaggacgagttctgcagatgcgagctgaagctgcagaagtggtacggggacctgcggggaaagcccttcgccatcgaagccgagaacagcatcctggacatcagcggcttcagcaagcagtacaactgtgccttcatctggcagaaggacggcgtgaagaagctgaacctgtacctgatcatcaactacttcaagggcggcaagctgcggttcaagaagatcaaacctgaagccttcgaagccaacagattctacaccgtgatcaacaaaaagagcggcgagatcgtgcccatggaggtgaacttcaacttcgacgaccccaacctgatcatcctgcctctggcctttggcaagagacagggcagagaattcatctggaacgacctgctgtccctggaaaccggcagcctgaagctggccaacggaagagtgatcgagaagacactgtacaacagaagaacccggcaggatgagcctgccctgttcgtggccctgaccttcgagcggcgggaggtcctggactcctccaatatcaaaccaatgaacctgatcggcgtggcaagaggcgaaaacatccccgccgtgatcgccctgaccgaccccgagggctgcccactgagccggtttaaggatagcctgggaaacccaacccacatcctgagaatcggcgagagctataaggagaagcagcggaccatccaggccaagaaggaggtggagcagcggagagccggcggctacagccggaagtacgccagcaaagccaagaatctggcagacgatatggtgagaaacaccgctagagatctgctgtactacgccgtgacccaggatgccatgctgatcttcgccaacctgagccggggcttcggccggcagggcaagcggaccttcatggccgagagacagtacacacggatggaggactggctgaccgccaagctggcctacgagggcctgagcaagacctacctgtccaagacactggcccagtacacctccaagacatgcagcaactgtgggtttaccatcaccagcgccgactacgacagggtgctggagaagctgaagaagacagcaacaggctggatgaccacaattaacggcaaggagctgaaggtggagggccagattacctactacaacagatacaagagacagaacgtagtcaaggacctgtccgtcgagctggatagactgagcgaagaatctgtgaacaacgacatctcctcctggacaaagggcagaagcggagaagctctgagcctcctgaagaaaagattctcccatagacccgtgcaggagaagttcgtgtgcctgaactgcggcttcgagacacacgcagccgagcaagccgccctgaacatcgccagatcctggctgttcctgcggagccaggagtacaagaaataccagacaaacaagacaaccggcaacaccgataagagagccttcgtcgagacctggcagtccttttaccggaagaagcttaaggaggtgtggaaacctgccgtgcggtctggcggatctggcggaggctccgccaggggccccgtgagcttcgccgacgtggccgtgtacttcagccccgaggagtggggcaggctgaggcccgcccagagggccctgtacagggacgtgatgagggagacctacggccacctgggcgccctgggcttccccggccccaagcccgccctgatgtgctggatggacgaggagaccgaggtgtggggccccgacgccagggaccccgaggaggccggcgagaagggcaccgagaacggcggcccaagcagcggcgcccctcctcccagcggcggcagcccagccggctccccaacctctaccgaggagggcacctctgagtccgccacccccgagagcggccctggcacctccaccgagcccagcgagggcagcgcacccggcagccctgccggcagccccacctccacagaggagggaaccagcaccgagcccagcgaaggcagcgccccaggcaccagcaccgagcctagtgagcaggagattaaacggatcaacaagatcagaagaagacttgtgaaagacagcaacaccaagaaggccggcaagacaggccccatgaaaaccctgctggttagagtgatgacacccgatctgagagagcggctggaaaacctgagaaagaagcctgaaaatatcccccagcccatcagcaatacatctagagccaacctgaataagctgctgaccgattacaccgaaatgaagaaggcgatcctgcatgtgtactgggaagagttccagaaggaccctgtgggcctgatgagccgggtggcccagcctgccagcaagaagatcgatcagaacaagctgaaacctgagatggacgagaagggcaacctgaccaccgccggctttgcctgctctcagtgtggccagcccctgttcgtgtacaagctggagcaggtgtctgagaagggcaaggcttacaccaactacttcggacggtgcaatgtggccgagcacgaaaagctgatcctgctggcccagctgaagcccgagaaggatagcgacgaagccgtgacatatagcctgggaaagtttgggcagagggccctggatttctacagcattcatgtgaccaaggagtccacccaccccgtgaagcccctggcccagatcgccggaaacagatacgcctccggacctgtgggaaaggccctgagcgacgcatgtatgggcacaatcgcctccttcctgtctaagtaccaggacatcatcatcgaacaccagaaggtggtgaagggcaaccagaagagactggagagcctgcgggagctggccggcaaggaaaacctggaataccctagcgtgaccctgccacctcagcctcacaccaaggagggcgttgatgcctacaacgaagtgatcgcccgggtgcgaatgtgggtgaacctgaacctgtggcagaagctgaagctaagcagagatgatgccaagcctctgctgagactgaagggattcccttcctttcctctggtcgagagacaggccaacgaagtggactggtgggacatggtgtgtaacgtgaagaagctgatcaacgagaaaaaggaggatggcaaggtgttttggcagaatctggctggctacaagagacaggaagccctgagaccatacctgagcagcgaggaagatcggaagaagggaaagaaattcgctcggtaccagctgggcgacctgctgctgcacctggaaaagaagcacggcgaggactggggaaaggtgtacgacgaggcctgggagcggattgacaagaaagtggaaggcctgagcaagcacatcaagctggaagaggaacggagaagcgaggacgcccagagcaaggccgccctgaccgactggctgcgggctaaggccagcttcgtgatcgagggcctgaaggaggccgacaaggacgagttctgcagatgcgagctgaagctgcagaagtggtacggggacctgcggggaaagcccttcgccatcgaagccgagaacagcatcctggacatcagcggcttcagcaagcagtacaactgtgccttcatctggcagaaggacggcgtgaagaagctgaacctgtacctgatcatcaactacttcaagggcggcaagctgcggttcaagaagatcaaacctgaagccttcgaagccaacagattctacaccgtgatcaacaaaaagagcggcgagatcgtgcccatggaggtgaacttcaacttcgacgaccccaacctgatcatcctgcctctggcctttggcaagagacagggcagagaattcatctggaacgacctgctgtccctggaaaccggcagcctgaagctggccaacggaagagtgatcgagaagacactgtacaacagaagaacccggcaggatgagcctgccctgttcgtggccctgaccttcgagcggcgggaggtcctggactcctccaatatcaaaccaatgaacctgatcggcgtggcaagaggcgaaaacatccccgccgtgatcgccctgaccgaccccgagggctgcccactgagccggtttaaggatagcctgggaaacccaacccacatcctgagaatcggcgagagctataaggagaagcagcggaccatccaggccaagaaggaggtggagcagcggagagccggcggctacagccggaagtacgccagcaaagccaagaatctggcagacgatatggtgagaaacaccgctagagatctgctgtactacgccgtgacccaggatgccatgctgatcttcgccaacctgagccggggcttcggccggcagggcaagcggaccttcatggccgagagacagtacacacggatggaggactggctgaccgccaagctggcctacgagggcctgagcaagacctacctgtccaagacactggcccagtacacctccaagacatgcagcaactgtgggtttaccatcaccagcgccgactacgacagggtgctggagaagctgaagaagacagcaacaggctggatgaccacaattaacggcaaggagctgaaggtggagggccagattacctactacaacagatacaagagacagaacgtagtcaaggacctgtccgtcgagctggatagactgagcgaagaatctgtgaacaacgacatctcctcctggacaaagggcagaagcggagaagctctgagcctcctgaagaaaagattctcccatagacccgtgcaggagaagttcgtgtgcctgaactgcggcttcgagacacacgcagccgagcaagccgccctgaacatcgccagatcctggctgttcctgcggagccaggagtacaagaaataccagacaaacaagacaaccggcaacaccgataagagagccttcgtcgagacctggcagtccttttaccggaagaagcttaaggaggtgtggaaacctgccgtgcggtctggcggatctggcggaggctcctgccaggggccccgtgagcttcgccgacgtggccgtgtacttcagccccgaggagtggggcaggctgaggcccgcccagagggccctgtacagggacgtgatgagggagacctacggccacctgggcgccctgggcttccccggccccaagcccgccctgatgtgctggatggacgaggagaccgaggtgtggggccccgacgccagggaccccgaggaggccggcgagaagggcaccgagaacggatctggctccggcagcggccccaagaaaaagagaaaagtctaagctgccttctgcggggcttgccttctggccatgcccttcttctctcccttgcacctgtacctcttggtctttgaataaagcctgagtaggaaggctagcaaaaaaaaaaaaaaaaaaaaaaaaaaaaaaaaaaaaaaaaaaaaaaaaaaaaaaaaaaaaaaaaaaaaaaaaaaaaaaaa

SEQ ID NO: 16696 - RNA, 9485 nt, synthetic construct
  source 1..9485: mol_type = other RNA
aggaaataagagagaaaagaagagtaagaagaaatataagagccaccatggcccctaagaagaagcgtaaagtgagccggatggaacgcctcgtctacgaggtgcggcagaagtgcagaaacatcgaggacatctgcatctcctgcggatctctgaacgtgaccctggagcacccactgttcatcggcggcatgtgccagaactgtaaaaactgttttctggagtgtgcctatcaatacgacgatgacggctaccagagctactgcaccatctgttgcggcggaagagaggtgctgatgtgtggaaataacaactgctgccggtgcttctgcgtggaatgcgtggacctgctggtgggccccggcgccgcccaggccgctattaaggaagatccttggaactgctacatgtgcggccacaagggcacatacggcctgctgagacggagagaggactggcctagcagactgcagatgttcttcgccaataaccacgaccaggagttcgacccccctaaggtgtaccctcccgtccccgccgagaagagaaagcccatccgggtcctgagcctgttcgatggcatcgccaccggtctgctggtgctgaaggacctgggcatccaggtggataggtacattgcctccgaggtgtgcgaggactccatcaccgtgggaatggtgcgtcatcagggcaagatcatgtacgtgggcgacgtgcggagcgtgacacagaagcatatccaggagtggggccctttcgacctggtgatcggcggcagcccttgcaatgacctgagcatcgtgaacccagcccggaagggcctgtacgagggaaccggcagactgttcttcgagttttacagactgctgcacgacgcccggcctaaggaaggcgacgaccggcccttcttttggctgttcgagaatgtggtggccatgggagtcagcgacaagcgggatattagccggttcctggagagcaaccccgtgatgatcgatgccaaggaagtgagcgccgcccaccgggccagatacttctggggcaatctgcctggcatgaacagacccctggccagcaccgtgaacgacaagctggagctgcaggagtgcctggagcacggccggatcgccaagttcagcaaggtgagaaccatcaccacccgaagcaacagcatcaaacaaggcaaggaccagcactttcctgtgttcatgaacgagaaggaggacatcctgtggtgtaccgagatggagagagtgttcgggttcccagtccactacacagatgtcagcaacatgtctagactggccagacagagactgctgggaagaagctggtccgtccctgtgatcagacacctgttcgcccctctgaaggagtacttcgcctgcgtgagcagcggcaacagcaacgccaacagccggggccccagcttctctagcggcctggtgccactgtccctgagagggagccacatgggccccatggagatctacaaaaccgtgagcgcctggaagcggcagcctgtgcgcgtgctgagcctgtttcggaatatcgataaagtcctgaaaagcctgggattcctggagagcggctctggctccggcggtggcaccctgaagtacgtggaggatgtgacaaacgtggtcagacgggatgtggagaagtggggccccttcgatctggtgtacggcagcacccaacccctgggcagctcttgtgaccggtgccctggctggtacatgtttcagttccaccggatcctgcagtacgccctgccgagacaggagtcccagcggccattcttttggattttcatggacaacttgctgctgaccgaggatgaccaggaaactaccactcggttcctgcagaccgaagccgtgaccctgcaggacgtgagaggccgggactaccagaacgccatgcgggtgtggtccaacatccctggactgaaaagcaagcacgcacctctgacccctaaagaagaggagtacctgcaggcccaggtgcggagcagaagcaagctggacgcccctaaggtggatctgctggtgaagaattgcctcctgcccctgagagagtacttcaagtatttcagccagaatagtctgcccctgggaggcagcggcggcggcgccctggtgacatttgaggacgtcgccgtgcggttcacccaggaggaatgggctctgctggatccttctcagaaaatcctgtaccgggacgtgatgagagagacataccggaatctgacctccgtgggcatcaactgggaatgttgggaccttgaagcctgcttcagaagcctgggaagaaacctgagagtgcaggtggtgaagagaaagtgcgagctgaccaacagcggcccctgcgccgagggcggcccaagcagcggcgcccctcctcccagcggcggcagcccagccggctccccaacctctaccgaggagggcacctctgagtccgccacccccgagagcggccctggcacctccaccgagcccagcgagggcagcgcacccggcagccctgccggcagccccacctccacagaggagggaaccagcaccgagcccagcgaaggcagcgccccaggcaccagcaccgagcctagtgagcaggagattaaacggatcaacaagatcagaagaagacttgtgaaagacagcaacaccaagaaggccggcaagacaggccccatgaaaaccctgctggttagagtgatgacacccgatctgagagagcggctggaaaacctgagaaagaagcctgaaaatatcccccagcccatcagcaatacatctagagccaacctgaataagctgctgaccgattacaccgaaatgaagaaggcgatcctgcatgtgtactgggaagagttccagaaggaccctgtgggcctgatgagccgggtggcccagcctgccagcaagaagatcgatcagaacaagctgaaacctgagatggacgagaagggcaacctgaccaccgccggctttgcctgctctcagtgtggccagcccctgttcgtgtacaagctggagcaggtgtctgagaagggcaaggcttacaccaactacttcggacggtgcaatgtggccgagcacgaaaagctgatcctgctggcccagctgaagcccgagaaggatagcgacgaagccgtgacatatagcctgggaaagtttgggcagagggccctggatttctacagcattcatgtgaccaaggagtccacccaccccgtgaagcccctggcccagatcgccggaaacagatacgcctccggacctgtgggaaaggccctgagcgacgcatgtatgggcacaatcgcctccttcctgtctaagtaccaggacatcatcatcgaacaccagaaggtggtgaagggcaaccagaagagactggagagcctgcgggagctggccggcaaggaaaacctggaataccctagcgtgaccctgccacctcagcctcacaccaaggagggcgttgatgcctacaacgaagtgatcgcccgggtgcgaatgtgggtgaacctgaacctgtggcagaagctgaagctaagcagagatgatgccaagcctctgctgagactgaagggattcccttcctttcctctggtcgagagacaggccaacgaagtggactggtgggacatggtgtgtaacgtgaagaagctgatcaacgagaaaaaggaggatggcaaggtgttttggcagaatctggctggctacaagagacaggaagccctgagaccatacctgagcagcgaggaagatcggaagaagggaaagaaattcgctcggtaccagctgggcgacctgctgctgcacctggaaaagaagcacggcgaggactggggaaaggtgtacgacgaggcctgggagcggattgacaagaaagtggaaggcctgagcaagcacatcaagctggaagaggaacggagaagcgaggacgcccagagcaaggccgccctgaccgactggctgcgggctaaggccagcttcgtgatcgagggcctgaaggaggccgacaaggacgagttctgcagatgcgagctgaagctgcagaagtggtacggggacctgcggggaaagcccttcgccatcgaagccgagaacagcatcctggacatcagcggcttcagcaagcagtacaactgtgccttcatctggcagaaggacggcgtgaagaagctgaacctgtacctgatcatcaactacttcaagggcggcaagctgcggttcaagaagatcaaacctgaagccttcgaagccaacagattctacaccgtgatcaacaaaaagagcggcgagatcgtgcccatggaggtgaacttcaacttcgacgaccccaacctgatcatcctgcctctggcctttggcaagagacagggcagagaattcatctggaacgacctgctgtccctggaaaccggcagcctgaagctggccaacggaagagtgatcgagaagacactgtacaacagaagaacccggcaggatgagcctgccctgttcgtggccctgaccttcgagcggcgggaggtcctggactcctccaatatcaaaccaatgaacctgatcggcgtggcaagaggcgaaaacatccccgccgtgatcgccctgaccgaccccgagggctgcccactgagccggtttaaggatagcctgggaaacccaacccacatcctgagaatcggcgagagctataaggagaagcagcggaccatccaggccaagaaggaggtggagcagcggagagccggcggctacagccggaagtacgccagcaaagccaagaatctggcagacgatatggtgagaaacaccgctagagatctgctgtactacgccgtgacccaggatgccatgctgatcttcgccaacctgagccggggcttcggccggcagggcaagcggaccttcatggccgagagacagtacacacggatggaggactggctgaccgccaagctggcctacgagggcctgagcaagacctacctgtccaagacactggcccagtacacctccaagacatgcagcaactgtgggtttaccatcaccagcgccgactacgacagggtgctggagaagctgaagaagacagcaacaggctggatgaccacaattaacggcaaggagctgaaggtggagggccagattacctactacaacagatacaagagacagaacgtagtcaaggacctgtccgtcgagctggatagactgagcgaagaatctgtgaacaacgacatctcctcctggacaaagggcagaagcggagaagctctgagcctcctgaagaaaagattctcccatagacccgtgcaggagaagttcgtgtgcctgaactgcggcttcgagacacacgcagccgagcaagccgccctgaacatcgccagatcctggctgttcctgcggagccaggagtacaagaaataccagacaaacaagacaaccggcaacaccgataagagagccttcgtcgagacctggcagtccttttaccggaagaagcttaaggaggtgtggaaacctgccgtgcggtctggcggatctggcggaggctcccagatgctggtgaccttcgaggacatcgccgtgagcttcagcaaggaggagtgggagtacctggacgagggccagaaggagctgtacagggaggtgatgaaggagaactaccagaccctgatcagcctgggcaccggcttccccaccgtgatccccgagatcatcagccacatcgagcagggcgacgagcccggcagcgaggagagggagaacggcaagagcagctgcagcggcgagagcggcggcggcccaagcagcggcgcccctcctcccagcggcggcagcccagccggctccccaacctctaccgaggagggcacctctgagtccgccacccccgagagcggccctggcacctccaccgagcccagcgagggcagcgcacccggcagccctgccggcagccccacctccacagaggagggaaccagcaccgagcccagcgaaggcagcgccccaggcaccagcaccgagcctagtgagcaggagattaaacggatcaacaagatcagaagaagacttgtgaaagacagcaacaccaagaaggccggcaagacaggccccatgaaaaccctgctggttagagtgatgacacccgatctgagagagcggctggaaaacctgagaaagaagcctgaaaatatcccccagcccatcagcaatacatctagagccaacctgaataagctgctgaccgattacaccgaaatgaagaaggcgatcctgcatgtgtactgggaagagttccagaaggaccctgtgggcctgatgagccgggtggcccagcctgccagcaagaagatcgatcagaacaagctgaaacctgagatggacgagaagggcaacctgaccaccgccggctttgcctgctctcagtgtggccagcccctgttcgtgtacaagctggagcaggtgtctgagaagggcaaggcttacaccaactacttcggacggtgcaatgtggccgagcacgaaaagctgatcctgctggcccagctgaagcccgagaaggatagcgacgaagccgtgacatatagcctgggaaagtttgggcagagggccctggatttctacagcattcatgtgaccaaggagtccacccaccccgtgaagcccctggcccagatcgccggaaacagatacgcctccggacctgtgggaaaggccctgagcgacgcatgtatgggcacaatcgcctccttcctgtctaagtaccaggacatcatcatcgaacaccagaaggtggtgaagggcaaccagaagagactggagagcctgcgggagctggccggcaaggaaaacctggaataccctagcgtgaccctgccacctcagcctcacaccaaggagggcgttgatgcctacaacgaagtgatcgcccgggtgcgaatgtgggtgaacctgaacctgtggcagaagctgaagctaagcagagatgatgccaagcctctgctgagactgaagggattcccttcctttcctctggtcgagagacaggccaacgaagtggactggtgggacatggtgtgtaacgtgaagaagctgatcaacgagaaaaaggaggatggcaaggtgttttggcagaatctggctggctacaagagacaggaagccctgagaccatacctgagcagcgaggaagatcggaagaagggaaagaaattcgctcggtaccagctgggcgacctgctgctgcacctggaaaagaagcacggcgaggactggggaaaggtgtacgacgaggcctgggagcggattgacaagaaagtggaaggcctgagcaagcacatcaagctggaagaggaacggagaagcgaggacgcccagagcaaggccgccctgaccgactggctgcgggctaaggccagcttcgtgatcgagggcctgaaggaggccgacaaggacgagttctgcagatgcgagctgaagctgcagaagtggtacggggacctgcggggaaagcccttcgccatcgaagccgagaacagcatcctggacatcagcggcttcagcaagcagtacaactgtgccttcatctggcagaaggacggcgtgaagaagctgaacctgtacctgatcatcaactacttcaagggcggcaagctgcggttcaagaagatcaaacctgaagccttcgaagccaacagattctacaccgtgatcaacaaaaagagcggcgagatcgtgcccatggaggtgaacttcaacttcgacgaccccaacctgatcatcctgcctctggcctttggcaagagacagggcagagaattcatctggaacgacctgctgtccctggaaaccggcagcctgaagctggccaacggaagagtgatcgagaagacactgtacaacagaagaacccggcaggatgagcctgccctgttcgtggccctgaccttcgagcggcgggaggtcctggactcctccaatatcaaaccaatgaacctgatcggcgtggcaagaggcgaaaacatccccgccgtgatcgccctgaccgaccccgagggctgcccactgagccggtttaaggatagcctgggaaacccaacccacatcctgagaatcggcgagagctataaggagaagcagcggaccatccaggccaagaaggaggtggagcagcggagagccggcggctacagccggaagtacgccagcaaagccaagaatctggcagacgatatggtgagaaacaccgctagagatctgctgtactacgccgtgacccaggatgccatgctgatcttcgccaacctgagccggggcttcggccggcagggcaagcggaccttcatggccgagagacagtacacacggatggaggactggctgaccgccaagctggcctacgagggcctgagcaagacctacctgtccaagacactggcccagtacacctccaagacatgcagcaactgtgggtttaccatcaccagcgccgactacgacagggtgctggagaagctgaagaagacagcaacaggctggatgaccacaattaacggcaaggagctgaaggtggagggccagattacctactacaacagatacaagagacagaacgtagtcaaggacctgtccgtcgagctggatagactgagcgaagaatctgtgaacaacgacatctcctcctggacaaagggcagaagcggagaagctctgagcctcctgaagaaaagattctcccatagacccgtgcaggagaagttcgtgtgcctgaactgcggcttcgagacacacgcagccgagcaagccgccctgaacatcgccagatcctggctgttcctgcggagccaggagtacaagaaataccagacaaacaagacaaccggcaacaccgataagagagccttcgtcgagacctggcagtccttttaccggaagaagcttaaggaggtgtggaaacctgccgtgcggtctggcggatctggcggaggctcctcagatgctggtgaccttcgaggacatcgccgtgagcttcagcaaggaggagtgggagtacctggacgagggccagaaggagctgtacagggaggtgatgaaggagaactaccagaccctgatcagcctgggcaccggcttccccaccgtgatccccgagatcatcagccacatcgagcagggcgacgagcccggcagcgaggagagggagaacggcaagagcagctgcagcggcgagagcggcggatctggctccggcagcggccccaagaaaaagagaaaagtctaagctgccttctgcggggcttgccttctggccatgcccttcttctctcccttgcacctgtacctcttggtctttgaataaagcctgagtaggaaggctagcaaaaaaaaaaaaaaaaaaaaaaaaaaaaaaaaaaaaaaaaaaaaaaaaaaaaaaaaaaaaaaaaaaaaaaaaaaaaaaaa

SEQ ID NO: 16697 - RNA, 9485 nt, synthetic construct
  source 1..9485: mol_type = other RNA
aggaaataagagagaaaagaagagtaagaagaaatataagagccaccatggcccctaagaagaagcgtaaagtgagccggatggaacgcctcgtctacgaggtgcggcagaagtgcagaaacatcgaggacatctgcatctcctgcggatctctgaacgtgaccctggagcacccactgttcatcggcggcatgtgccagaactgtaaaaactgttttctggagtgtgcctatcaatacgacgatgacggctaccagagctactgcaccatctgttgcggcggaagagaggtgctgatgtgtggaaataacaactgctgccggtgcttctgcgtggaatgcgtggacctgctggtgggccccggcgccgcccaggccgctattaaggaagatccttggaactgctacatgtgcggccacaagggcacatacggcctgctgagacggagagaggactggcctagcagactgcagatgttcttcgccaataaccacgaccaggagttcgacccccctaaggtgtaccctcccgtccccgccgagaagagaaagcccatccgggtcctgagcctgttcgatggcatcgccaccggtctgctggtgctgaaggacctgggcatccaggtggataggtacattgcctccgaggtgtgcgaggactccatcaccgtgggaatggtgcgtcatcagggcaagatcatgtacgtgggcgacgtgcggagcgtgacacagaagcatatccaggagtggggccctttcgacctggtgatcggcggcagcccttgcaatgacctgagcatcgtgaacccagcccggaagggcctgtacgagggaaccggcagactgttcttcgagttttacagactgctgcacgacgcccggcctaaggaaggcgacgaccggcccttcttttggctgttcgagaatgtggtggccatgggagtcagcgacaagcgggatattagccggttcctggagagcaaccccgtgatgatcgatgccaaggaagtgagcgccgcccaccgggccagatacttctggggcaatctgcctggcatgaacagacccctggccagcaccgtgaacgacaagctggagctgcaggagtgcctggagcacggccggatcgccaagttcagcaaggtgagaaccatcaccacccgaagcaacagcatcaaacaaggcaaggaccagcactttcctgtgttcatgaacgagaaggaggacatcctgtggtgtaccgagatggagagagtgttcgggttcccagtccactacacagatgtcagcaacatgtctagactggccagacagagactgctgggaagaagctggtccgtccctgtgatcagacacctgttcgcccctctgaaggagtacttcgcctgcgtgagcagcggcaacagcaacgccaacagccggggccccagcttctctagcggcctggtgccactgtccctgagagggagccacatgggccccatggagatctacaaaaccgtgagcgcctggaagcggcagcctgtgcgcgtgctgagcctgtttcggaatatcgataaagtcctgaaaagcctgggattcctggagagcggctctggctccggcggtggcaccctgaagtacgtggaggatgtgacaaacgtggtcagacgggatgtggagaagtggggccccttcgatctggtgtacggcagcacccaacccctgggcagctcttgtgaccggtgccctggctggtacatgtttcagttccaccggatcctgcagtacgccctgccgagacaggagtcccagcggccattcttttggattttcatggacaacttgctgctgaccgaggatgaccaggaaactaccactcggttcctgcagaccgaagccgtgaccctgcaggacgtgagaggccgggactaccagaacgccatgcgggtgtggtccaacatccctggactgaaaagcaagcacgcacctctgacccctaaagaagaggagtacctgcaggcccaggtgcggagcagaagcaagctggacgcccctaaggtggatctgctggtgaagaattgcctcctgcccctgagagagtacttcaagtatttcagccagaatagtctgcccctgggaggcagcggcggcggcgccctggtgacatttgaggacgtcgccgtgcggttcacccaggaggaatgggctctgctggatccttctcagaaaatcctgtaccgggacgtgatgagagagacataccggaatctgacctccgtgggcatcaactgggaatgttgggaccttgaagcctgcttcagaagcctgggaagaaacctgagagtgcaggtggtgaagagaaagtgcgagctgaccaacagcggcccctgcgccgagggcggcccaagcagcggcgcccctcctcccagcggcggcagcccagccggctccccaacctctaccgaggagggcacctctgagtccgccacccccgagagcggccctggcacctccaccgagcccagcgagggcagcgcacccggcagccctgccggcagccccacctccacagaggagggaaccagcaccgagcccagcgaaggcagcgccccaggcaccagcaccgagcctagtgagcaggagattaaacggatcaacaagatcagaagaagacttgtgaaagacagcaacaccaagaaggccggcaagacaggccccatgaaaaccctgctggttagagtgatgacacccgatctgagagagcggctggaaaacctgagaaagaagcctgaaaatatcccccagcccatcagcaatacatctagagccaacctgaataagctgctgaccgattacaccgaaatgaagaaggcgatcctgcatgtgtactgggaagagttccagaaggaccctgtgggcctgatgagccgggtggcccagcctgccagcaagaagatcgatcagaacaagctgaaacctgagatggacgagaagggcaacctgaccaccgccggctttgcctgctctcagtgtggccagcccctgttcgtgtacaagctggagcaggtgtctgagaagggcaaggcttacaccaactacttcggacggtgcaatgtggccgagcacgaaaagctgatcctgctggcccagctgaagcccgagaaggatagcgacgaagccgtgacatatagcctgggaaagtttgggcagagggccctggatttctacagcattcatgtgaccaaggagtccacccaccccgtgaagcccctggcccagatcgccggaaacagatacgcctccggacctgtgggaaaggccctgagcgacgcatgtatgggcacaatcgcctccttcctgtctaagtaccaggacatcatcatcgaacaccagaaggtggtgaagggcaaccagaagagactggagagcctgcgggagctggccggcaaggaaaacctggaataccctagcgtgaccctgccacctcagcctcacaccaaggagggcgttgatgcctacaacgaagtgatcgcccgggtgcgaatgtgggtgaacctgaacctgtggcagaagctgaagctaagcagagatgatgccaagcctctgctgagactgaagggattcccttcctttcctctggtcgagagacaggccaacgaagtggactggtgggacatggtgtgtaacgtgaagaagctgatcaacgagaaaaaggaggatggcaaggtgttttggcagaatctggctggctacaagagacaggaagccctgagaccatacctgagcagcgaggaagatcggaagaagggaaagaaattcgctcggtaccagctgggcgacctgctgctgcacctggaaaagaagcacggcgaggactggggaaaggtgtacgacgaggcctgggagcggattgacaagaaagtggaaggcctgagcaagcacatcaagctggaagaggaacggagaagcgaggacgcccagagcaaggccgccctgaccgactggctgcgggctaaggccagcttcgtgatcgagggcctgaaggaggccgacaaggacgagttctgcagatgcgagctgaagctgcagaagtggtacggggacctgcggggaaagcccttcgccatcgaagccgagaacagcatcctggacatcagcggcttcagcaagcagtacaactgtgccttcatctggcagaaggacggcgtgaagaagctgaacctgtacctgatcatcaactacttcaagggcggcaagctgcggttcaagaagatcaaacctgaagccttcgaagccaacagattctacaccgtgatcaacaaaaagagcggcgagatcgtgcccatggaggtgaacttcaacttcgacgaccccaacctgatcatcctgcctctggcctttggcaagagacagggcagagaattcatctggaacgacctgctgtccctggaaaccggcagcctgaagctggccaacggaagagtgatcgagaagacactgtacaacagaagaacccggcaggatgagcctgccctgttcgtggccctgaccttcgagcggcgggaggtcctggactcctccaatatcaaaccaatgaacctgatcggcgtggcaagaggcgaaaacatccccgccgtgatcgccctgaccgaccccgagggctgcccactgagccggtttaaggatagcctgggaaacccaacccacatcctgagaatcggcgagagctataaggagaagcagcggaccatccaggccaagaaggaggtggagcagcggagagccggcggctacagccggaagtacgccagcaaagccaagaatctggcagacgatatggtgagaaacaccgctagagatctgctgtactacgccgtgacccaggatgccatgctgatcttcgccaacctgagccggggcttcggccggcagggcaagcggaccttcatggccgagagacagtacacacggatggaggactggctgaccgccaagctggcctacgagggcctgagcaagacctacctgtccaagacactggcccagtacacctccaagacatgcagcaactgtgggtttaccatcaccagcgccgactacgacagggtgctggagaagctgaagaagacagcaacaggctggatgaccacaattaacggcaaggagctgaaggtggagggccagattacctactacaacagatacaagagacagaacgtagtcaaggacctgtccgtcgagctggatagactgagcgaagaatctgtgaacaacgacatctcctcctggacaaagggcagaagcggagaagctctgagcctcctgaagaaaagattctcccatagacccgtgcaggagaagttcgtgtgcctgaactgcggcttcgagacacacgcagccgagcaagccgccctgaacatcgccagatcctggctgttcctgcggagccaggagtacaagaaataccagacaaacaagacaaccggcaacaccgataagagagccttcgtcgagacctggcagtccttttaccggaagaagcttaaggaggtgtggaaacctgccgtgcggtctggcggatctggcggaggctccgagcccggcgccgtgagcttcgccgacgtggccgtgtacttcagcctggaggagtggggctgcctgaggcccagccagagggccctgtacagggacgtgatgagggagacctacctgcacctgagcgccctgggcggcggcggcaccaagcccgccctgatcagctgggtggaggaggaggccgagctgtggcaccccgacgcccaggaccccgaggtggccaagtgccccaccgaggccgacggcggcccaagcagcggcgcccctcctcccagcggcggcagcccagccggctccccaacctctaccgaggagggcacctctgagtccgccacccccgagagcggccctggcacctccaccgagcccagcgagggcagcgcacccggcagccctgccggcagccccacctccacagaggagggaaccagcaccgagcccagcgaaggcagcgccccaggcaccagcaccgagcctagtgagcaggagattaaacggatcaacaagatcagaagaagacttgtgaaagacagcaacaccaagaaggccggcaagacaggccccatgaaaaccctgctggttagagtgatgacacccgatctgagagagcggctggaaaacctgagaaagaagcctgaaaatatcccccagcccatcagcaatacatctagagccaacctgaataagctgctgaccgattacaccgaaatgaagaaggcgatcctgcatgtgtactgggaagagttccagaaggaccctgtgggcctgatgagccgggtggcccagcctgccagcaagaagatcgatcagaacaagctgaaacctgagatggacgagaagggcaacctgaccaccgccggctttgcctgctctcagtgtggccagcccctgttcgtgtacaagctggagcaggtgtctgagaagggcaaggcttacaccaactacttcggacggtgcaatgtggccgagcacgaaaagctgatcctgctggcccagctgaagcccgagaaggatagcgacgaagccgtgacatatagcctgggaaagtttgggcagagggccctggatttctacagcattcatgtgaccaaggagtccacccaccccgtgaagcccctggcccagatcgccggaaacagatacgcctccggacctgtgggaaaggccctgagcgacgcatgtatgggcacaatcgcctccttcctgtctaagtaccaggacatcatcatcgaacaccagaaggtggtgaagggcaaccagaagagactggagagcctgcgggagctggccggcaaggaaaacctggaataccctagcgtgaccctgccacctcagcctcacaccaaggagggcgttgatgcctacaacgaagtgatcgcccgggtgcgaatgtgggtgaacctgaacctgtggcagaagctgaagctaagcagagatgatgccaagcctctgctgagactgaagggattcccttcctttcctctggtcgagagacaggccaacgaagtggactggtgggacatggtgtgtaacgtgaagaagctgatcaacgagaaaaaggaggatggcaaggtgttttggcagaatctggctggctacaagagacaggaagccctgagaccatacctgagcagcgaggaagatcggaagaagggaaagaaattcgctcggtaccagctgggcgacctgctgctgcacctggaaaagaagcacggcgaggactggggaaaggtgtacgacgaggcctgggagcggattgacaagaaagtggaaggcctgagcaagcacatcaagctggaagaggaacggagaagcgaggacgcccagagcaaggccgccctgaccgactggctgcgggctaaggccagcttcgtgatcgagggcctgaaggaggccgacaaggacgagttctgcagatgcgagctgaagctgcagaagtggtacggggacctgcggggaaagcccttcgccatcgaagccgagaacagcatcctggacatcagcggcttcagcaagcagtacaactgtgccttcatctggcagaaggacggcgtgaagaagctgaacctgtacctgatcatcaactacttcaagggcggcaagctgcggttcaagaagatcaaacctgaagccttcgaagccaacagattctacaccgtgatcaacaaaaagagcggcgagatcgtgcccatggaggtgaacttcaacttcgacgaccccaacctgatcatcctgcctctggcctttggcaagagacagggcagagaattcatctggaacgacctgctgtccctggaaaccggcagcctgaagctggccaacggaagagtgatcgagaagacactgtacaacagaagaacccggcaggatgagcctgccctgttcgtggccctgaccttcgagcggcgggaggtcctggactcctccaatatcaaaccaatgaacctgatcggcgtggcaagaggcgaaaacatccccgccgtgatcgccctgaccgaccccgagggctgcccactgagccggtttaaggatagcctgggaaacccaacccacatcctgagaatcggcgagagctataaggagaagcagcggaccatccaggccaagaaggaggtggagcagcggagagccggcggctacagccggaagtacgccagcaaagccaagaatctggcagacgatatggtgagaaacaccgctagagatctgctgtactacgccgtgacccaggatgccatgctgatcttcgccaacctgagccggggcttcggccggcagggcaagcggaccttcatggccgagagacagtacacacggatggaggactggctgaccgccaagctggcctacgagggcctgagcaagacctacctgtccaagacactggcccagtacacctccaagacatgcagcaactgtgggtttaccatcaccagcgccgactacgacagggtgctggagaagctgaagaagacagcaacaggctggatgaccacaattaacggcaaggagctgaaggtggagggccagattacctactacaacagatacaagagacagaacgtagtcaaggacctgtccgtcgagctggatagactgagcgaagaatctgtgaacaacgacatctcctcctggacaaagggcagaagcggagaagctctgagcctcctgaagaaaagattctcccatagacccgtgcaggagaagttcgtgtgcctgaactgcggcttcgagacacacgcagccgagcaagccgccctgaacatcgccagatcctggctgttcctgcggagccaggagtacaagaaataccagacaaacaagacaaccggcaacaccgataagagagccttcgtcgagacctggcagtccttttaccggaagaagcttaaggaggtgtggaaacctgccgtgcggtctggcggatctggcggaggctcctgagcccggcgccgtgagcttcgccgacgtggccgtgtacttcagcctggaggagtggggctgcctgaggcccagccagagggccctgtacagggacgtgatgagggagacctacctgcacctgagcgccctgggcggcggcggcaccaagcccgccctgatcagctgggtggaggaggaggccgagctgtggcaccccgacgcccaggaccccgaggtggccaagtgccccaccgaggccgacggatctggctccggcagcggccccaagaaaaagagaaaagtctaagctgccttctgcggggcttgccttctggccatgcccttcttctctcccttgcacctgtacctcttggtctttgaataaagcctgagtaggaaggctagcaaaaaaaaaaaaaaaaaaaaaaaaaaaaaaaaaaaaaaaaaaaaaaaaaaaaaaaaaaaaaaaaaaaaaaaaaaaaaaaa

SEQ ID NO: 16698 - RNA, 9485 nt, synthetic construct
  source 1..9485: mol_type = other RNA
aggaaataagagagaaaagaagagtaagaagaaatataagagccaccatggcccctaagaagaagcgtaaagtgagccggatggaacgcctcgtctacgaggtgcggcagaagtgcagaaacatcgaggacatctgcatctcctgcggatctctgaacgtgaccctggagcacccactgttcatcggcggcatgtgccagaactgtaaaaactgttttctggagtgtgcctatcaatacgacgatgacggctaccagagctactgcaccatctgttgcggcggaagagaggtgctgatgtgtggaaataacaactgctgccggtgcttctgcgtggaatgcgtggacctgctggtgggccccggcgccgcccaggccgctattaaggaagatccttggaactgctacatgtgcggccacaagggcacatacggcctgctgagacggagagaggactggcctagcagactgcagatgttcttcgccaataaccacgaccaggagttcgacccccctaaggtgtaccctcccgtccccgccgagaagagaaagcccatccgggtcctgagcctgttcgatggcatcgccaccggtctgctggtgctgaaggacctgggcatccaggtggataggtacattgcctccgaggtgtgcgaggactccatcaccgtgggaatggtgcgtcatcagggcaagatcatgtacgtgggcgacgtgcggagcgtgacacagaagcatatccaggagtggggccctttcgacctggtgatcggcggcagcccttgcaatgacctgagcatcgtgaacccagcccggaagggcctgtacgagggaaccggcagactgttcttcgagttttacagactgctgcacgacgcccggcctaaggaaggcgacgaccggcccttcttttggctgttcgagaatgtggtggccatgggagtcagcgacaagcgggatattagccggttcctggagagcaaccccgtgatgatcgatgccaaggaagtgagcgccgcccaccgggccagatacttctggggcaatctgcctggcatgaacagacccctggccagcaccgtgaacgacaagctggagctgcaggagtgcctggagcacggccggatcgccaagttcagcaaggtgagaaccatcaccacccgaagcaacagcatcaaacaaggcaaggaccagcactttcctgtgttcatgaacgagaaggaggacatcctgtggtgtaccgagatggagagagtgttcgggttcccagtccactacacagatgtcagcaacatgtctagactggccagacagagactgctgggaagaagctggtccgtccctgtgatcagacacctgttcgcccctctgaaggagtacttcgcctgcgtgagcagcggcaacagcaacgccaacagccggggccccagcttctctagcggcctggtgccactgtccctgagagggagccacatgggccccatggagatctacaaaaccgtgagcgcctggaagcggcagcctgtgcgcgtgctgagcctgtttcggaatatcgataaagtcctgaaaagcctgggattcctggagagcggctctggctccggcggtggcaccctgaagtacgtggaggatgtgacaaacgtggtcagacgggatgtggagaagtggggccccttcgatctggtgtacggcagcacccaacccctgggcagctcttgtgaccggtgccctggctggtacatgtttcagttccaccggatcctgcagtacgccctgccgagacaggagtcccagcggccattcttttggattttcatggacaacttgctgctgaccgaggatgaccaggaaactaccactcggttcctgcagaccgaagccgtgaccctgcaggacgtgagaggccgggactaccagaacgccatgcgggtgtggtccaacatccctggactgaaaagcaagcacgcacctctgacccctaaagaagaggagtacctgcaggcccaggtgcggagcagaagcaagctggacgcccctaaggtggatctgctggtgaagaattgcctcctgcccctgagagagtacttcaagtatttcagccagaatagtctgcccctgggaggcagcggcggcggcgccctggtgacatttgaggacgtcgccgtgcggttcacccaggaggaatgggctctgctggatccttctcagaaaatcctgtaccgggacgtgatgagagagacataccggaatctgacctccgtgggcatcaactgggaatgttgggaccttgaagcctgcttcagaagcctgggaagaaacctgagagtgcaggtggtgaagagaaagtgcgagctgaccaacagcggcccctgcgccgagggcggcccaagcagcggcgcccctcctcccagcggcggcagcccagccggctccccaacctctaccgaggagggcacctctgagtccgccacccccgagagcggccctggcacctccaccgagcccagcgagggcagcgcacccggcagccctgccggcagccccacctccacagaggagggaaccagcaccgagcccagcgaaggcagcgccccaggcaccagcaccgagcctagtgagcaggagattaaacggatcaacaagatcagaagaagacttgtgaaagacagcaacaccaagaaggccggcaagacaggccccatgaaaaccctgctggttagagtgatgacacccgatctgagagagcggctggaaaacctgagaaagaagcctgaaaatatcccccagcccatcagcaatacatctagagccaacctgaataagctgctgaccgattacaccgaaatgaagaaggcgatcctgcatgtgtactgggaagagttccagaaggaccctgtgggcctgatgagccgggtggcccagcctgccagcaagaagatcgatcagaacaagctgaaacctgagatggacgagaagggcaacctgaccaccgccggctttgcctgctctcagtgtggccagcccctgttcgtgtacaagctggagcaggtgtctgagaagggcaaggcttacaccaactacttcggacggtgcaatgtggccgagcacgaaaagctgatcctgctggcccagctgaagcccgagaaggatagcgacgaagccgtgacatatagcctgggaaagtttgggcagagggccctggatttctacagcattcatgtgaccaaggagtccacccaccccgtgaagcccctggcccagatcgccggaaacagatacgcctccggacctgtgggaaaggccctgagcgacgcatgtatgggcacaatcgcctccttcctgtctaagtaccaggacatcatcatcgaacaccagaaggtggtgaagggcaaccagaagagactggagagcctgcgggagctggccggcaaggaaaacctggaataccctagcgtgaccctgccacctcagcctcacaccaaggagggcgttgatgcctacaacgaagtgatcgcccgggtgcgaatgtgggtgaacctgaacctgtggcagaagctgaagctaagcagagatgatgccaagcctctgctgagactgaagggattcccttcctttcctctggtcgagagacaggccaacgaagtggactggtgggacatggtgtgtaacgtgaagaagctgatcaacgagaaaaaggaggatggcaaggtgttttggcagaatctggctggctacaagagacaggaagccctgagaccatacctgagcagcgaggaagatcggaagaagggaaagaaattcgctcggtaccagctgggcgacctgctgctgcacctggaaaagaagcacggcgaggactggggaaaggtgtacgacgaggcctgggagcggattgacaagaaagtggaaggcctgagcaagcacatcaagctggaagaggaacggagaagcgaggacgcccagagcaaggccgccctgaccgactggctgcgggctaaggccagcttcgtgatcgagggcctgaaggaggccgacaaggacgagttctgcagatgcgagctgaagctgcagaagtggtacggggacctgcggggaaagcccttcgccatcgaagccgagaacagcatcctggacatcagcggcttcagcaagcagtacaactgtgccttcatctggcagaaggacggcgtgaagaagctgaacctgtacctgatcatcaactacttcaagggcggcaagctgcggttcaagaagatcaaacctgaagccttcgaagccaacagattctacaccgtgatcaacaaaaagagcggcgagatcgtgcccatggaggtgaacttcaacttcgacgaccccaacctgatcatcctgcctctggcctttggcaagagacagggcagagaattcatctggaacgacctgctgtccctggaaaccggcagcctgaagctggccaacggaagagtgatcgagaagacactgtacaacagaagaacccggcaggatgagcctgccctgttcgtggccctgaccttcgagcggcgggaggtcctggactcctccaatatcaaaccaatgaacctgatcggcgtggcaagaggcgaaaacatccccgccgtgatcgccctgaccgaccccgagggctgcccactgagccggtttaaggatagcctgggaaacccaacccacatcctgagaatcggcgagagctataaggagaagcagcggaccatccaggccaagaaggaggtggagcagcggagagccggcggctacagccggaagtacgccagcaaagccaagaatctggcagacgatatggtgagaaacaccgctagagatctgctgtactacgccgtgacccaggatgccatgctgatcttcgccaacctgagccggggcttcggccggcagggcaagcggaccttcatggccgagagacagtacacacggatggaggactggctgaccgccaagctggcctacgagggcctgagcaagacctacctgtccaagacactggcccagtacacctccaagacatgcagcaactgtgggtttaccatcaccagcgccgactacgacagggtgctggagaagctgaagaagacagcaacaggctggatgaccacaattaacggcaaggagctgaaggtggagggccagattacctactacaacagatacaagagacagaacgtagtcaaggacctgtccgtcgagctggatagactgagcgaagaatctgtgaacaacgacatctcctcctggacaaagggcagaagcggagaagctctgagcctcctgaagaaaagattctcccatagacccgtgcaggagaagttcgtgtgcctgaactgcggcttcgagacacacgcagccgagcaagccgccctgaacatcgccagatcctggctgttcctgcggagccaggagtacaagaaataccagacaaacaagacaaccggcaacaccgataagagagccttcgtcgagacctggcagtccttttaccggaagaagcttaaggaggtgtggaaacctgccgtgcggtctggcggatctggcggaggctccccccagaagctggtgaccttcgaggacgtggccgtgtacttcacccaggccgagtgggacggcctgagccccgcccagaggatcctgtacagggacgtgatgctggagaactacggcaacgtggccagcctgggcttccccctgctgaagcccgccgtgatcagccagctggagggcggcggcgagctgggcgcccccagccccctggccgccggcaccggcctgcacggcctgaggaccgtgggcggcccaagcagcggcgcccctcctcccagcggcggcagcccagccggctccccaacctctaccgaggagggcacctctgagtccgccacccccgagagcggccctggcacctccaccgagcccagcgagggcagcgcacccggcagccctgccggcagccccacctccacagaggagggaaccagcaccgagcccagcgaaggcagcgccccaggcaccagcaccgagcctagtgagcaggagattaaacggatcaacaagatcagaagaagacttgtgaaagacagcaacaccaagaaggccggcaagacaggccccatgaaaaccctgctggttagagtgatgacacccgatctgagagagcggctggaaaacctgagaaagaagcctgaaaatatcccccagcccatcagcaatacatctagagccaacctgaataagctgctgaccgattacaccgaaatgaagaaggcgatcctgcatgtgtactgggaagagttccagaaggaccctgtgggcctgatgagccgggtggcccagcctgccagcaagaagatcgatcagaacaagctgaaacctgagatggacgagaagggcaacctgaccaccgccggctttgcctgctctcagtgtggccagcccctgttcgtgtacaagctggagcaggtgtctgagaagggcaaggcttacaccaactacttcggacggtgcaatgtggccgagcacgaaaagctgatcctgctggcccagctgaagcccgagaaggatagcgacgaagccgtgacatatagcctgggaaagtttgggcagagggccctggatttctacagcattcatgtgaccaaggagtccacccaccccgtgaagcccctggcccagatcgccggaaacagatacgcctccggacctgtgggaaaggccctgagcgacgcatgtatgggcacaatcgcctccttcctgtctaagtaccaggacatcatcatcgaacaccagaaggtggtgaagggcaaccagaagagactggagagcctgcgggagctggccggcaaggaaaacctggaataccctagcgtgaccctgccacctcagcctcacaccaaggagggcgttgatgcctacaacgaagtgatcgcccgggtgcgaatgtgggtgaacctgaacctgtggcagaagctgaagctaagcagagatgatgccaagcctctgctgagactgaagggattcccttcctttcctctggtcgagagacaggccaacgaagtggactggtgggacatggtgtgtaacgtgaagaagctgatcaacgagaaaaaggaggatggcaaggtgttttggcagaatctggctggctacaagagacaggaagccctgagaccatacctgagcagcgaggaagatcggaagaagggaaagaaattcgctcggtaccagctgggcgacctgctgctgcacctggaaaagaagcacggcgaggactggggaaaggtgtacgacgaggcctgggagcggattgacaagaaagtggaaggcctgagcaagcacatcaagctggaagaggaacggagaagcgaggacgcccagagcaaggccgccctgaccgactggctgcgggctaaggccagcttcgtgatcgagggcctgaaggaggccgacaaggacgagttctgcagatgcgagctgaagctgcagaagtggtacggggacctgcggggaaagcccttcgccatcgaagccgagaacagcatcctggacatcagcggcttcagcaagcagtacaactgtgccttcatctggcagaaggacggcgtgaagaagctgaacctgtacctgatcatcaactacttcaagggcggcaagctgcggttcaagaagatcaaacctgaagccttcgaagccaacagattctacaccgtgatcaacaaaaagagcggcgagatcgtgcccatggaggtgaacttcaacttcgacgaccccaacctgatcatcctgcctctggcctttggcaagagacagggcagagaattcatctggaacgacctgctgtccctggaaaccggcagcctgaagctggccaacggaagagtgatcgagaagacactgtacaacagaagaacccggcaggatgagcctgccctgttcgtggccctgaccttcgagcggcgggaggtcctggactcctccaatatcaaaccaatgaacctgatcggcgtggcaagaggcgaaaacatccccgccgtgatcgccctgaccgaccccgagggctgcccactgagccggtttaaggatagcctgggaaacccaacccacatcctgagaatcggcgagagctataaggagaagcagcggaccatccaggccaagaaggaggtggagcagcggagagccggcggctacagccggaagtacgccagcaaagccaagaatctggcagacgatatggtgagaaacaccgctagagatctgctgtactacgccgtgacccaggatgccatgctgatcttcgccaacctgagccggggcttcggccggcagggcaagcggaccttcatggccgagagacagtacacacggatggaggactggctgaccgccaagctggcctacgagggcctgagcaagacctacctgtccaagacactggcccagtacacctccaagacatgcagcaactgtgggtttaccatcaccagcgccgactacgacagggtgctggagaagctgaagaagacagcaacaggctggatgaccacaattaacggcaaggagctgaaggtggagggccagattacctactacaacagatacaagagacagaacgtagtcaaggacctgtccgtcgagctggatagactgagcgaagaatctgtgaacaacgacatctcctcctggacaaagggcagaagcggagaagctctgagcctcctgaagaaaagattctcccatagacccgtgcaggagaagttcgtgtgcctgaactgcggcttcgagacacacgcagccgagcaagccgccctgaacatcgccagatcctggctgttcctgcggagccaggagtacaagaaataccagacaaacaagacaaccggcaacaccgataagagagccttcgtcgagacctggcagtccttttaccggaagaagcttaaggaggtgtggaaacctgccgtgcggtctggcggatctggcggaggctcctccccagaagctggtgaccttcgaggacgtggccgtgtacttcacccaggccgagtgggacggcctgagccccgcccagaggatcctgtacagggacgtgatgctggagaactacggcaacgtggccagcctgggcttccccctgctgaagcccgccgtgatcagccagctggagggcggcggcgagctgggcgcccccagccccctggccgccggcaccggcctgcacggcctgaggaccgtgggatctggctccggcagcggccccaagaaaaagagaaaagtctaagctgccttctgcggggcttgccttctggccatgcccttcttctctcccttgcacctgtacctcttggtctttgaataaagcctgagtaggaaggctagcaaaaaaaaaaaaaaaaaaaaaaaaaaaaaaaaaaaaaaaaaaaaaaaaaaaaaaaaaaaaaaaaaaaaaaaaaaaaaaaa

SEQ ID NO: 16699 - RNA, 9485 nt, synthetic construct
  source 1..9485: mol_type = other RNA
aggaaataagagagaaaagaagagtaagaagaaatataagagccaccatggcccctaagaagaagcgtaaagtgagccggatggaacgcctcgtctacgaggtgcggcagaagtgcagaaacatcgaggacatctgcatctcctgcggatctctgaacgtgaccctggagcacccactgttcatcggcggcatgtgccagaactgtaaaaactgttttctggagtgtgcctatcaatacgacgatgacggctaccagagctactgcaccatctgttgcggcggaagagaggtgctgatgtgtggaaataacaactgctgccggtgcttctgcgtggaatgcgtggacctgctggtgggccccggcgccgcccaggccgctattaaggaagatccttggaactgctacatgtgcggccacaagggcacatacggcctgctgagacggagagaggactggcctagcagactgcagatgttcttcgccaataaccacgaccaggagttcgacccccctaaggtgtaccctcccgtccccgccgagaagagaaagcccatccgggtcctgagcctgttcgatggcatcgccaccggtctgctggtgctgaaggacctgggcatccaggtggataggtacattgcctccgaggtgtgcgaggactccatcaccgtgggaatggtgcgtcatcagggcaagatcatgtacgtgggcgacgtgcggagcgtgacacagaagcatatccaggagtggggccctttcgacctggtgatcggcggcagcccttgcaatgacctgagcatcgtgaacccagcccggaagggcctgtacgagggaaccggcagactgttcttcgagttttacagactgctgcacgacgcccggcctaaggaaggcgacgaccggcccttcttttggctgttcgagaatgtggtggccatgggagtcagcgacaagcgggatattagccggttcctggagagcaaccccgtgatgatcgatgccaaggaagtgagcgccgcccaccgggccagatacttctggggcaatctgcctggcatgaacagacccctggccagcaccgtgaacgacaagctggagctgcaggagtgcctggagcacggccggatcgccaagttcagcaaggtgagaaccatcaccacccgaagcaacagcatcaaacaaggcaaggaccagcactttcctgtgttcatgaacgagaaggaggacatcctgtggtgtaccgagatggagagagtgttcgggttcccagtccactacacagatgtcagcaacatgtctagactggccagacagagactgctgggaagaagctggtccgtccctgtgatcagacacctgttcgcccctctgaaggagtacttcgcctgcgtgagcagcggcaacagcaacgccaacagccggggccccagcttctctagcggcctggtgccactgtccctgagagggagccacatgggccccatggagatctacaaaaccgtgagcgcctggaagcggcagcctgtgcgcgtgctgagcctgtttcggaatatcgataaagtcctgaaaagcctgggattcctggagagcggctctggctccggcggtggcaccctgaagtacgtggaggatgtgacaaacgtggtcagacgggatgtggagaagtggggccccttcgatctggtgtacggcagcacccaacccctgggcagctcttgtgaccggtgccctggctggtacatgtttcagttccaccggatcctgcagtacgccctgccgagacaggagtcccagcggccattcttttggattttcatggacaacttgctgctgaccgaggatgaccaggaaactaccactcggttcctgcagaccgaagccgtgaccctgcaggacgtgagaggccgggactaccagaacgccatgcgggtgtggtccaacatccctggactgaaaagcaagcacgcacctctgacccctaaagaagaggagtacctgcaggcccaggtgcggagcagaagcaagctggacgcccctaaggtggatctgctggtgaagaattgcctcctgcccctgagagagtacttcaagtatttcagccagaatagtctgcccctgggaggcagcggcggcggcgccctggtgacatttgaggacgtcgccgtgcggttcacccaggaggaatgggctctgctggatccttctcagaaaatcctgtaccgggacgtgatgagagagacataccggaatctgacctccgtgggcatcaactgggaatgttgggaccttgaagcctgcttcagaagcctgggaagaaacctgagagtgcaggtggtgaagagaaagtgcgagctgaccaacagcggcccctgcgccgagggcggcccaagcagcggcgcccctcctcccagcggcggcagcccagccggctccccaacctctaccgaggagggcacctctgagtccgccacccccgagagcggccctggcacctccaccgagcccagcgagggcagcgcacccggcagccctgccggcagccccacctccacagaggagggaaccagcaccgagcccagcgaaggcagcgccccaggcaccagcaccgagcctagtgagcaggagattaaacggatcaacaagatcagaagaagacttgtgaaagacagcaacaccaagaaggccggcaagacaggccccatgaaaaccctgctggttagagtgatgacacccgatctgagagagcggctggaaaacctgagaaagaagcctgaaaatatcccccagcccatcagcaatacatctagagccaacctgaataagctgctgaccgattacaccgaaatgaagaaggcgatcctgcatgtgtactgggaagagttccagaaggaccctgtgggcctgatgagccgggtggcccagcctgccagcaagaagatcgatcagaacaagctgaaacctgagatggacgagaagggcaacctgaccaccgccggctttgcctgctctcagtgtggccagcccctgttcgtgtacaagctggagcaggtgtctgagaagggcaaggcttacaccaactacttcggacggtgcaatgtggccgagcacgaaaagctgatcctgctggcccagctgaagcccgagaaggatagcgacgaagccgtgacatatagcctgggaaagtttgggcagagggccctggatttctacagcattcatgtgaccaaggagtccacccaccccgtgaagcccctggcccagatcgccggaaacagatacgcctccggacctgtgggaaaggccctgagcgacgcatgtatgggcacaatcgcctccttcctgtctaagtaccaggacatcatcatcgaacaccagaaggtggtgaagggcaaccagaagagactggagagcctgcgggagctggccggcaaggaaaacctggaataccctagcgtgaccctgccacctcagcctcacaccaaggagggcgttgatgcctacaacgaagtgatcgcccgggtgcgaatgtgggtgaacctgaacctgtggcagaagctgaagctaagcagagatgatgccaagcctctgctgagactgaagggattcccttcctttcctctggtcgagagacaggccaacgaagtggactggtgggacatggtgtgtaacgtgaagaagctgatcaacgagaaaaaggaggatggcaaggtgttttggcagaatctggctggctacaagagacaggaagccctgagaccatacctgagcagcgaggaagatcggaagaagggaaagaaattcgctcggtaccagctgggcgacctgctgctgcacctggaaaagaagcacggcgaggactggggaaaggtgtacgacgaggcctgggagcggattgacaagaaagtggaaggcctgagcaagcacatcaagctggaagaggaacggagaagcgaggacgcccagagcaaggccgccctgaccgactggctgcgggctaaggccagcttcgtgatcgagggcctgaaggaggccgacaaggacgagttctgcagatgcgagctgaagctgcagaagtggtacggggacctgcggggaaagcccttcgccatcgaagccgagaacagcatcctggacatcagcggcttcagcaagcagtacaactgtgccttcatctggcagaaggacggcgtgaagaagctgaacctgtacctgatcatcaactacttcaagggcggcaagctgcggttcaagaagatcaaacctgaagccttcgaagccaacagattctacaccgtgatcaacaaaaagagcggcgagatcgtgcccatggaggtgaacttcaacttcgacgaccccaacctgatcatcctgcctctggcctttggcaagagacagggcagagaattcatctggaacgacctgctgtccctggaaaccggcagcctgaagctggccaacggaagagtgatcgagaagacactgtacaacagaagaacccggcaggatgagcctgccctgttcgtggccctgaccttcgagcggcgggaggtcctggactcctccaatatcaaaccaatgaacctgatcggcgtggcaagaggcgaaaacatccccgccgtgatcgccctgaccgaccccgagggctgcccactgagccggtttaaggatagcctgggaaacccaacccacatcctgagaatcggcgagagctataaggagaagcagcggaccatccaggccaagaaggaggtggagcagcggagagccggcggctacagccggaagtacgccagcaaagccaagaatctggcagacgatatggtgagaaacaccgctagagatctgctgtactacgccgtgacccaggatgccatgctgatcttcgccaacctgagccggggcttcggccggcagggcaagcggaccttcatggccgagagacagtacacacggatggaggactggctgaccgccaagctggcctacgagggcctgagcaagacctacctgtccaagacactggcccagtacacctccaagacatgcagcaactgtgggtttaccatcaccagcgccgactacgacagggtgctggagaagctgaagaagacagcaacaggctggatgaccacaattaacggcaaggagctgaaggtggagggccagattacctactacaacagatacaagagacagaacgtagtcaaggacctgtccgtcgagctggatagactgagcgaagaatctgtgaacaacgacatctcctcctggacaaagggcagaagcggagaagctctgagcctcctgaagaaaagattctcccatagacccgtgcaggagaagttcgtgtgcctgaactgcggcttcgagacacacgcagccgagcaagccgccctgaacatcgccagatcctggctgttcctgcggagccaggagtacaagaaataccagacaaacaagacaaccggcaacaccgataagagagccttcgtcgagacctggcagtccttttaccggaagaagcttaaggaggtgtggaaacctgccgtgcggtctggcggatctggcggaggctccagctacgagggcagcgtgagcttcagggacgtggccatcaacttcagcagggaggagtggcagcacctggacctgagccagaggaacctgtacagggacgtgatgctggagacctgcagccacctgctgagcgtgggctaccaggtgcccaagcccgaggtggtgatgctggagcagggcaaggagccctgggccctgcagggcgagaggcccaggcagagctgccccggcgagaagctgtggggcggcccaagcagcggcgcccctcctcccagcggcggcagcccagccggctccccaacctctaccgaggagggcacctctgagtccgccacccccgagagcggccctggcacctccaccgagcccagcgagggcagcgcacccggcagccctgccggcagccccacctccacagaggagggaaccagcaccgagcccagcgaaggcagcgccccaggcaccagcaccgagcctagtgagcaggagattaaacggatcaacaagatcagaagaagacttgtgaaagacagcaacaccaagaaggccggcaagacaggccccatgaaaaccctgctggttagagtgatgacacccgatctgagagagcggctggaaaacctgagaaagaagcctgaaaatatcccccagcccatcagcaatacatctagagccaacctgaataagctgctgaccgattacaccgaaatgaagaaggcgatcctgcatgtgtactgggaagagttccagaaggaccctgtgggcctgatgagccgggtggcccagcctgccagcaagaagatcgatcagaacaagctgaaacctgagatggacgagaagggcaacctgaccaccgccggctttgcctgctctcagtgtggccagcccctgttcgtgtacaagctggagcaggtgtctgagaagggcaaggcttacaccaactacttcggacggtgcaatgtggccgagcacgaaaagctgatcctgctggcccagctgaagcccgagaaggatagcgacgaagccgtgacatatagcctgggaaagtttgggcagagggccctggatttctacagcattcatgtgaccaaggagtccacccaccccgtgaagcccctggcccagatcgccggaaacagatacgcctccggacctgtgggaaaggccctgagcgacgcatgtatgggcacaatcgcctccttcctgtctaagtaccaggacatcatcatcgaacaccagaaggtggtgaagggcaaccagaagagactggagagcctgcgggagctggccggcaaggaaaacctggaataccctagcgtgaccctgccacctcagcctcacaccaaggagggcgttgatgcctacaacgaagtgatcgcccgggtgcgaatgtgggtgaacctgaacctgtggcagaagctgaagctaagcagagatgatgccaagcctctgctgagactgaagggattcccttcctttcctctggtcgagagacaggccaacgaagtggactggtgggacatggtgtgtaacgtgaagaagctgatcaacgagaaaaaggaggatggcaaggtgttttggcagaatctggctggctacaagagacaggaagccctgagaccatacctgagcagcgaggaagatcggaagaagggaaagaaattcgctcggtaccagctgggcgacctgctgctgcacctggaaaagaagcacggcgaggactggggaaaggtgtacgacgaggcctgggagcggattgacaagaaagtggaaggcctgagcaagcacatcaagctggaagaggaacggagaagcgaggacgcccagagcaaggccgccctgaccgactggctgcgggctaaggccagcttcgtgatcgagggcctgaaggaggccgacaaggacgagttctgcagatgcgagctgaagctgcagaagtggtacggggacctgcggggaaagcccttcgccatcgaagccgagaacagcatcctggacatcagcggcttcagcaagcagtacaactgtgccttcatctggcagaaggacggcgtgaagaagctgaacctgtacctgatcatcaactacttcaagggcggcaagctgcggttcaagaagatcaaacctgaagccttcgaagccaacagattctacaccgtgatcaacaaaaagagcggcgagatcgtgcccatggaggtgaacttcaacttcgacgaccccaacctgatcatcctgcctctggcctttggcaagagacagggcagagaattcatctggaacgacctgctgtccctggaaaccggcagcctgaagctggccaacggaagagtgatcgagaagacactgtacaacagaagaacccggcaggatgagcctgccctgttcgtggccctgaccttcgagcggcgggaggtcctggactcctccaatatcaaaccaatgaacctgatcggcgtggcaagaggcgaaaacatccccgccgtgatcgccctgaccgaccccgagggctgcccactgagccggtttaaggatagcctgggaaacccaacccacatcctgagaatcggcgagagctataaggagaagcagcggaccatccaggccaagaaggaggtggagcagcggagagccggcggctacagccggaagtacgccagcaaagccaagaatctggcagacgatatggtgagaaacaccgctagagatctgctgtactacgccgtgacccaggatgccatgctgatcttcgccaacctgagccggggcttcggccggcagggcaagcggaccttcatggccgagagacagtacacacggatggaggactggctgaccgccaagctggcctacgagggcctgagcaagacctacctgtccaagacactggcccagtacacctccaagacatgcagcaactgtgggtttaccatcaccagcgccgactacgacagggtgctggagaagctgaagaagacagcaacaggctggatgaccacaattaacggcaaggagctgaaggtggagggccagattacctactacaacagatacaagagacagaacgtagtcaaggacctgtccgtcgagctggatagactgagcgaagaatctgtgaacaacgacatctcctcctggacaaagggcagaagcggagaagctctgagcctcctgaagaaaagattctcccatagacccgtgcaggagaagttcgtgtgcctgaactgcggcttcgagacacacgcagccgagcaagccgccctgaacatcgccagatcctggctgttcctgcggagccaggagtacaagaaataccagacaaacaagacaaccggcaacaccgataagagagccttcgtcgagacctggcagtccttttaccggaagaagcttaaggaggtgtggaaacctgccgtgcggtctggcggatctggcggaggctcctagctacgagggcagcgtgagcttcagggacgtggccatcaacttcagcagggaggagtggcagcacctggacctgagccagaggaacctgtacagggacgtgatgctggagacctgcagccacctgctgagcgtgggctaccaggtgcccaagcccgaggtggtgatgctggagcagggcaaggagccctgggccctgcagggcgagaggcccaggcagagctgccccggcgagaagctgtggggatctggctccggcagcggccccaagaaaaagagaaaagtctaagctgccttctgcggggcttgccttctggccatgcccttcttctctcccttgcacctgtacctcttggtctttgaataaagcctgagtaggaaggctagcaaaaaaaaaaaaaaaaaaaaaaaaaaaaaaaaaaaaaaaaaaaaaaaaaaaaaaaaaaaaaaaaaaaaaaaaaaaaaaaa

SEQ ID NO: 16700 - RNA, 9485 nt, synthetic construct
  source 1..9485: mol_type = other RNA
aggaaataagagagaaaagaagagtaagaagaaatataagagccaccatggcccctaagaagaagcgtaaagtgagccggatggaacgcctcgtctacgaggtgcggcagaagtgcagaaacatcgaggacatctgcatctcctgcggatctctgaacgtgaccctggagcacccactgttcatcggcggcatgtgccagaactgtaaaaactgttttctggagtgtgcctatcaatacgacgatgacggctaccagagctactgcaccatctgttgcggcggaagagaggtgctgatgtgtggaaataacaactgctgccggtgcttctgcgtggaatgcgtggacctgctggtgggccccggcgccgcccaggccgctattaaggaagatccttggaactgctacatgtgcggccacaagggcacatacggcctgctgagacggagagaggactggcctagcagactgcagatgttcttcgccaataaccacgaccaggagttcgacccccctaaggtgtaccctcccgtccccgccgagaagagaaagcccatccgggtcctgagcctgttcgatggcatcgccaccggtctgctggtgctgaaggacctgggcatccaggtggataggtacattgcctccgaggtgtgcgaggactccatcaccgtgggaatggtgcgtcatcagggcaagatcatgtacgtgggcgacgtgcggagcgtgacacagaagcatatccaggagtggggccctttcgacctggtgatcggcggcagcccttgcaatgacctgagcatcgtgaacccagcccggaagggcctgtacgagggaaccggcagactgttcttcgagttttacagactgctgcacgacgcccggcctaaggaaggcgacgaccggcccttcttttggctgttcgagaatgtggtggccatgggagtcagcgacaagcgggatattagccggttcctggagagcaaccccgtgatgatcgatgccaaggaagtgagcgccgcccaccgggccagatacttctggggcaatctgcctggcatgaacagacccctggccagcaccgtgaacgacaagctggagctgcaggagtgcctggagcacggccggatcgccaagttcagcaaggtgagaaccatcaccacccgaagcaacagcatcaaacaaggcaaggaccagcactttcctgtgttcatgaacgagaaggaggacatcctgtggtgtaccgagatggagagagtgttcgggttcccagtccactacacagatgtcagcaacatgtctagactggccagacagagactgctgggaagaagctggtccgtccctgtgatcagacacctgttcgcccctctgaaggagtacttcgcctgcgtgagcagcggcaacagcaacgccaacagccggggccccagcttctctagcggcctggtgccactgtccctgagagggagccacatgggccccatggagatctacaaaaccgtgagcgcctggaagcggcagcctgtgcgcgtgctgagcctgtttcggaatatcgataaagtcctgaaaagcctgggattcctggagagcggctctggctccggcggtggcaccctgaagtacgtggaggatgtgacaaacgtggtcagacgggatgtggagaagtggggccccttcgatctggtgtacggcagcacccaacccctgggcagctcttgtgaccggtgccctggctggtacatgtttcagttccaccggatcctgcagtacgccctgccgagacaggagtcccagcggccattcttttggattttcatggacaacttgctgctgaccgaggatgaccaggaaactaccactcggttcctgcagaccgaagccgtgaccctgcaggacgtgagaggccgggactaccagaacgccatgcgggtgtggtccaacatccctggactgaaaagcaagcacgcacctctgacccctaaagaagaggagtacctgcaggcccaggtgcggagcagaagcaagctggacgcccctaaggtggatctgctggtgaagaattgcctcctgcccctgagagagtacttcaagtatttcagccagaatagtctgcccctgggaggcagcggcggcggcgccctggtgacatttgaggacgtcgccgtgcggttcacccaggaggaatgggctctgctggatccttctcagaaaatcctgtaccgggacgtgatgagagagacataccggaatctgacctccgtgggcatcaactgggaatgttgggaccttgaagcctgcttcagaagcctgggaagaaacctgagagtgcaggtggtgaagagaaagtgcgagctgaccaacagcggcccctgcgccgagggcggcccaagcagcggcgcccctcctcccagcggcggcagcccagccggctccccaacctctaccgaggagggcacctctgagtccgccacccccgagagcggccctggcacctccaccgagcccagcgagggcagcgcacccggcagccctgccggcagccccacctccacagaggagggaaccagcaccgagcccagcgaaggcagcgccccaggcaccagcaccgagcctagtgagcaggagattaaacggatcaacaagatcagaagaagacttgtgaaagacagcaacaccaagaaggccggcaagacaggccccatgaaaaccctgctggttagagtgatgacacccgatctgagagagcggctggaaaacctgagaaagaagcctgaaaatatcccccagcccatcagcaatacatctagagccaacctgaataagctgctgaccgattacaccgaaatgaagaaggcgatcctgcatgtgtactgggaagagttccagaaggaccctgtgggcctgatgagccgggtggcccagcctgccagcaagaagatcgatcagaacaagctgaaacctgagatggacgagaagggcaacctgaccaccgccggctttgcctgctctcagtgtggccagcccctgttcgtgtacaagctggagcaggtgtctgagaagggcaaggcttacaccaactacttcggacggtgcaatgtggccgagcacgaaaagctgatcctgctggcccagctgaagcccgagaaggatagcgacgaagccgtgacatatagcctgggaaagtttgggcagagggccctggatttctacagcattcatgtgaccaaggagtccacccaccccgtgaagcccctggcccagatcgccggaaacagatacgcctccggacctgtgggaaaggccctgagcgacgcatgtatgggcacaatcgcctccttcctgtctaagtaccaggacatcatcatcgaacaccagaaggtggtgaagggcaaccagaagagactggagagcctgcgggagctggccggcaaggaaaacctggaataccctagcgtgaccctgccacctcagcctcacaccaaggagggcgttgatgcctacaacgaagtgatcgcccgggtgcgaatgtgggtgaacctgaacctgtggcagaagctgaagctaagcagagatgatgccaagcctctgctgagactgaagggattcccttcctttcctctggtcgagagacaggccaacgaagtggactggtgggacatggtgtgtaacgtgaagaagctgatcaacgagaaaaaggaggatggcaaggtgttttggcagaatctggctggctacaagagacaggaagccctgagaccatacctgagcagcgaggaagatcggaagaagggaaagaaattcgctcggtaccagctgggcgacctgctgctgcacctggaaaagaagcacggcgaggactggggaaaggtgtacgacgaggcctgggagcggattgacaagaaagtggaaggcctgagcaagcacatcaagctggaagaggaacggagaagcgaggacgcccagagcaaggccgccctgaccgactggctgcgggctaaggccagcttcgtgatcgagggcctgaaggaggccgacaaggacgagttctgcagatgcgagctgaagctgcagaagtggtacggggacctgcggggaaagcccttcgccatcgaagccgagaacagcatcctggacatcagcggcttcagcaagcagtacaactgtgccttcatctggcagaaggacggcgtgaagaagctgaacctgtacctgatcatcaactacttcaagggcggcaagctgcggttcaagaagatcaaacctgaagccttcgaagccaacagattctacaccgtgatcaacaaaaagagcggcgagatcgtgcccatggaggtgaacttcaacttcgacgaccccaacctgatcatcctgcctctggcctttggcaagagacagggcagagaattcatctggaacgacctgctgtccctggaaaccggcagcctgaagctggccaacggaagagtgatcgagaagacactgtacaacagaagaacccggcaggatgagcctgccctgttcgtggccctgaccttcgagcggcgggaggtcctggactcctccaatatcaaaccaatgaacctgatcggcgtggcaagaggcgaaaacatccccgccgtgatcgccctgaccgaccccgagggctgcccactgagccggtttaaggatagcctgggaaacccaacccacatcctgagaatcggcgagagctataaggagaagcagcggaccatccaggccaagaaggaggtggagcagcggagagccggcggctacagccggaagtacgccagcaaagccaagaatctggcagacgatatggtgagaaacaccgctagagatctgctgtactacgccgtgacccaggatgccatgctgatcttcgccaacctgagccggggcttcggccggcagggcaagcggaccttcatggccgagagacagtacacacggatggaggactggctgaccgccaagctggcctacgagggcctgagcaagacctacctgtccaagacactggcccagtacacctccaagacatgcagcaactgtgggtttaccatcaccagcgccgactacgacagggtgctggagaagctgaagaagacagcaacaggctggatgaccacaattaacggcaaggagctgaaggtggagggccagattacctactacaacagatacaagagacagaacgtagtcaaggacctgtccgtcgagctggatagactgagcgaagaatctgtgaacaacgacatctcctcctggacaaagggcagaagcggagaagctctgagcctcctgaagaaaagattctcccatagacccgtgcaggagaagttcgtgtgcctgaactgcggcttcgagacacacgcagccgagcaagccgccctgaacatcgccagatcctggctgttcctgcggagccaggagtacaagaaataccagacaaacaagacaaccggcaacaccgataagagagccttcgtcgagacctggcagtccttttaccggaagaagcttaaggaggtgtggaaacctgccgtgcggtctggcggatctggcggaggctccttccaggacagcgtgaccttccaggacgtggccgtgaccttcacccccgaggagtggggcaggctggccgccccccagaaggagctgtacagggaggtgatgctggagaacttcggccacctggcctgcctgggcctggccctgagcaagcccgacgtgatctgccagctggagaggggcgaggccccctggatgcccaggggcgacgtgccccagaggcccagcgccgcccccagcggcgacggcggcccaagcagcggcgcccctcctcccagcggcggcagcccagccggctccccaacctctaccgaggagggcacctctgagtccgccacccccgagagcggccctggcacctccaccgagcccagcgagggcagcgcacccggcagccctgccggcagccccacctccacagaggagggaaccagcaccgagcccagcgaaggcagcgccccaggcaccagcaccgagcctagtgagcaggagattaaacggatcaacaagatcagaagaagacttgtgaaagacagcaacaccaagaaggccggcaagacaggccccatgaaaaccctgctggttagagtgatgacacccgatctgagagagcggctggaaaacctgagaaagaagcctgaaaatatcccccagcccatcagcaatacatctagagccaacctgaataagctgctgaccgattacaccgaaatgaagaaggcgatcctgcatgtgtactgggaagagttccagaaggaccctgtgggcctgatgagccgggtggcccagcctgccagcaagaagatcgatcagaacaagctgaaacctgagatggacgagaagggcaacctgaccaccgccggctttgcctgctctcagtgtggccagcccctgttcgtgtacaagctggagcaggtgtctgagaagggcaaggcttacaccaactacttcggacggtgcaatgtggccgagcacgaaaagctgatcctgctggcccagctgaagcccgagaaggatagcgacgaagccgtgacatatagcctgggaaagtttgggcagagggccctggatttctacagcattcatgtgaccaaggagtccacccaccccgtgaagcccctggcccagatcgccggaaacagatacgcctccggacctgtgggaaaggccctgagcgacgcatgtatgggcacaatcgcctccttcctgtctaagtaccaggacatcatcatcgaacaccagaaggtggtgaagggcaaccagaagagactggagagcctgcgggagctggccggcaaggaaaacctggaataccctagcgtgaccctgccacctcagcctcacaccaaggagggcgttgatgcctacaacgaagtgatcgcccgggtgcgaatgtgggtgaacctgaacctgtggcagaagctgaagctaagcagagatgatgccaagcctctgctgagactgaagggattcccttcctttcctctggtcgagagacaggccaacgaagtggactggtgggacatggtgtgtaacgtgaagaagctgatcaacgagaaaaaggaggatggcaaggtgttttggcagaatctggctggctacaagagacaggaagccctgagaccatacctgagcagcgaggaagatcggaagaagggaaagaaattcgctcggtaccagctgggcgacctgctgctgcacctggaaaagaagcacggcgaggactggggaaaggtgtacgacgaggcctgggagcggattgacaagaaagtggaaggcctgagcaagcacatcaagctggaagaggaacggagaagcgaggacgcccagagcaaggccgccctgaccgactggctgcgggctaaggccagcttcgtgatcgagggcctgaaggaggccgacaaggacgagttctgcagatgcgagctgaagctgcagaagtggtacggggacctgcggggaaagcccttcgccatcgaagccgagaacagcatcctggacatcagcggcttcagcaagcagtacaactgtgccttcatctggcagaaggacggcgtgaagaagctgaacctgtacctgatcatcaactacttcaagggcggcaagctgcggttcaagaagatcaaacctgaagccttcgaagccaacagattctacaccgtgatcaacaaaaagagcggcgagatcgtgcccatggaggtgaacttcaacttcgacgaccccaacctgatcatcctgcctctggcctttggcaagagacagggcagagaattcatctggaacgacctgctgtccctggaaaccggcagcctgaagctggccaacggaagagtgatcgagaagacactgtacaacagaagaacccggcaggatgagcctgccctgttcgtggccctgaccttcgagcggcgggaggtcctggactcctccaatatcaaaccaatgaacctgatcggcgtggcaagaggcgaaaacatccccgccgtgatcgccctgaccgaccccgagggctgcccactgagccggtttaaggatagcctgggaaacccaacccacatcctgagaatcggcgagagctataaggagaagcagcggaccatccaggccaagaaggaggtggagcagcggagagccggcggctacagccggaagtacgccagcaaagccaagaatctggcagacgatatggtgagaaacaccgctagagatctgctgtactacgccgtgacccaggatgccatgctgatcttcgccaacctgagccggggcttcggccggcagggcaagcggaccttcatggccgagagacagtacacacggatggaggactggctgaccgccaagctggcctacgagggcctgagcaagacctacctgtccaagacactggcccagtacacctccaagacatgcagcaactgtgggtttaccatcaccagcgccgactacgacagggtgctggagaagctgaagaagacagcaacaggctggatgaccacaattaacggcaaggagctgaaggtggagggccagattacctactacaacagatacaagagacagaacgtagtcaaggacctgtccgtcgagctggatagactgagcgaagaatctgtgaacaacgacatctcctcctggacaaagggcagaagcggagaagctctgagcctcctgaagaaaagattctcccatagacccgtgcaggagaagttcgtgtgcctgaactgcggcttcgagacacacgcagccgagcaagccgccctgaacatcgccagatcctggctgttcctgcggagccaggagtacaagaaataccagacaaacaagacaaccggcaacaccgataagagagccttcgtcgagacctggcagtccttttaccggaagaagcttaaggaggtgtggaaacctgccgtgcggtctggcggatctggcggaggctcctttccaggacagcgtgaccttccaggacgtggccgtgaccttcacccccgaggagtggggcaggctggccgccccccagaaggagctgtacagggaggtgatgctggagaacttcggccacctggcctgcctgggcctggccctgagcaagcccgacgtgatctgccagctggagaggggcgaggccccctggatgcccaggggcgacgtgccccagaggcccagcgccgcccccagcggcgacggatctggctccggcagcggccccaagaaaaagagaaaagtctaagctgccttctgcggggcttgccttctggccatgcccttcttctctcccttgcacctgtacctcttggtctttgaataaagcctgagtaggaaggctagcaaaaaaaaaaaaaaaaaaaaaaaaaaaaaaaaaaaaaaaaaaaaaaaaaaaaaaaaaaaaaaaaaaaaaaaaaaaaaaaa

SEQ ID NO: 16701 - RNA, 9485 nt, synthetic construct
  source 1..9485: mol_type = other RNA
aggaaataagagagaaaagaagagtaagaagaaatataagagccaccatggcccctaagaagaagcgtaaagtgagccggatggaacgcctcgtctacgaggtgcggcagaagtgcagaaacatcgaggacatctgcatctcctgcggatctctgaacgtgaccctggagcacccactgttcatcggcggcatgtgccagaactgtaaaaactgttttctggagtgtgcctatcaatacgacgatgacggctaccagagctactgcaccatctgttgcggcggaagagaggtgctgatgtgtggaaataacaactgctgccggtgcttctgcgtggaatgcgtggacctgctggtgggccccggcgccgcccaggccgctattaaggaagatccttggaactgctacatgtgcggccacaagggcacatacggcctgctgagacggagagaggactggcctagcagactgcagatgttcttcgccaataaccacgaccaggagttcgacccccctaaggtgtaccctcccgtccccgccgagaagagaaagcccatccgggtcctgagcctgttcgatggcatcgccaccggtctgctggtgctgaaggacctgggcatccaggtggataggtacattgcctccgaggtgtgcgaggactccatcaccgtgggaatggtgcgtcatcagggcaagatcatgtacgtgggcgacgtgcggagcgtgacacagaagcatatccaggagtggggccctttcgacctggtgatcggcggcagcccttgcaatgacctgagcatcgtgaacccagcccggaagggcctgtacgagggaaccggcagactgttcttcgagttttacagactgctgcacgacgcccggcctaaggaaggcgacgaccggcccttcttttggctgttcgagaatgtggtggccatgggagtcagcgacaagcgggatattagccggttcctggagagcaaccccgtgatgatcgatgccaaggaagtgagcgccgcccaccgggccagatacttctggggcaatctgcctggcatgaacagacccctggccagcaccgtgaacgacaagctggagctgcaggagtgcctggagcacggccggatcgccaagttcagcaaggtgagaaccatcaccacccgaagcaacagcatcaaacaaggcaaggaccagcactttcctgtgttcatgaacgagaaggaggacatcctgtggtgtaccgagatggagagagtgttcgggttcccagtccactacacagatgtcagcaacatgtctagactggccagacagagactgctgggaagaagctggtccgtccctgtgatcagacacctgttcgcccctctgaaggagtacttcgcctgcgtgagcagcggcaacagcaacgccaacagccggggccccagcttctctagcggcctggtgccactgtccctgagagggagccacatgggccccatggagatctacaaaaccgtgagcgcctggaagcggcagcctgtgcgcgtgctgagcctgtttcggaatatcgataaagtcctgaaaagcctgggattcctggagagcggctctggctccggcggtggcaccctgaagtacgtggaggatgtgacaaacgtggtcagacgggatgtggagaagtggggccccttcgatctggtgtacggcagcacccaacccctgggcagctcttgtgaccggtgccctggctggtacatgtttcagttccaccggatcctgcagtacgccctgccgagacaggagtcccagcggccattcttttggattttcatggacaacttgctgctgaccgaggatgaccaggaaactaccactcggttcctgcagaccgaagccgtgaccctgcaggacgtgagaggccgggactaccagaacgccatgcgggtgtggtccaacatccctggactgaaaagcaagcacgcacctctgacccctaaagaagaggagtacctgcaggcccaggtgcggagcagaagcaagctggacgcccctaaggtggatctgctggtgaagaattgcctcctgcccctgagagagtacttcaagtatttcagccagaatagtctgcccctgggaggcagcggcggcggcgccctggtgacatttgaggacgtcgccgtgcggttcacccaggaggaatgggctctgctggatccttctcagaaaatcctgtaccgggacgtgatgagagagacataccggaatctgacctccgtgggcatcaactgggaatgttgggaccttgaagcctgcttcagaagcctgggaagaaacctgagagtgcaggtggtgaagagaaagtgcgagctgaccaacagcggcccctgcgccgagggcggcccaagcagcggcgcccctcctcccagcggcggcagcccagccggctccccaacctctaccgaggagggcacctctgagtccgccacccccgagagcggccctggcacctccaccgagcccagcgagggcagcgcacccggcagccctgccggcagccccacctccacagaggagggaaccagcaccgagcccagcgaaggcagcgccccaggcaccagcaccgagcctagtgagcaggagattaaacggatcaacaagatcagaagaagacttgtgaaagacagcaacaccaagaaggccggcaagacaggccccatgaaaaccctgctggttagagtgatgacacccgatctgagagagcggctggaaaacctgagaaagaagcctgaaaatatcccccagcccatcagcaatacatctagagccaacctgaataagctgctgaccgattacaccgaaatgaagaaggcgatcctgcatgtgtactgggaagagttccagaaggaccctgtgggcctgatgagccgggtggcccagcctgccagcaagaagatcgatcagaacaagctgaaacctgagatggacgagaagggcaacctgaccaccgccggctttgcctgctctcagtgtggccagcccctgttcgtgtacaagctggagcaggtgtctgagaagggcaaggcttacaccaactacttcggacggtgcaatgtggccgagcacgaaaagctgatcctgctggcccagctgaagcccgagaaggatagcgacgaagccgtgacatatagcctgggaaagtttgggcagagggccctggatttctacagcattcatgtgaccaaggagtccacccaccccgtgaagcccctggcccagatcgccggaaacagatacgcctccggacctgtgggaaaggccctgagcgacgcatgtatgggcacaatcgcctccttcctgtctaagtaccaggacatcatcatcgaacaccagaaggtggtgaagggcaaccagaagagactggagagcctgcgggagctggccggcaaggaaaacctggaataccctagcgtgaccctgccacctcagcctcacaccaaggagggcgttgatgcctacaacgaagtgatcgcccgggtgcgaatgtgggtgaacctgaacctgtggcagaagctgaagctaagcagagatgatgccaagcctctgctgagactgaagggattcccttcctttcctctggtcgagagacaggccaacgaagtggactggtgggacatggtgtgtaacgtgaagaagctgatcaacgagaaaaaggaggatggcaaggtgttttggcagaatctggctggctacaagagacaggaagccctgagaccatacctgagcagcgaggaagatcggaagaagggaaagaaattcgctcggtaccagctgggcgacctgctgctgcacctggaaaagaagcacggcgaggactggggaaaggtgtacgacgaggcctgggagcggattgacaagaaagtggaaggcctgagcaagcacatcaagctggaagaggaacggagaagcgaggacgcccagagcaaggccgccctgaccgactggctgcgggctaaggccagcttcgtgatcgagggcctgaaggaggccgacaaggacgagttctgcagatgcgagctgaagctgcagaagtggtacggggacctgcggggaaagcccttcgccatcgaagccgagaacagcatcctggacatcagcggcttcagcaagcagtacaactgtgccttcatctggcagaaggacggcgtgaagaagctgaacctgtacctgatcatcaactacttcaagggcggcaagctgcggttcaagaagatcaaacctgaagccttcgaagccaacagattctacaccgtgatcaacaaaaagagcggcgagatcgtgcccatggaggtgaacttcaacttcgacgaccccaacctgatcatcctgcctctggcctttggcaagagacagggcagagaattcatctggaacgacctgctgtccctggaaaccggcagcctgaagctggccaacggaagagtgatcgagaagacactgtacaacagaagaacccggcaggatgagcctgccctgttcgtggccctgaccttcgagcggcgggaggtcctggactcctccaatatcaaaccaatgaacctgatcggcgtggcaagaggcgaaaacatccccgccgtgatcgccctgaccgaccccgagggctgcccactgagccggtttaaggatagcctgggaaacccaacccacatcctgagaatcggcgagagctataaggagaagcagcggaccatccaggccaagaaggaggtggagcagcggagagccggcggctacagccggaagtacgccagcaaagccaagaatctggcagacgatatggtgagaaacaccgctagagatctgctgtactacgccgtgacccaggatgccatgctgatcttcgccaacctgagccggggcttcggccggcagggcaagcggaccttcatggccgagagacagtacacacggatggaggactggctgaccgccaagctggcctacgagggcctgagcaagacctacctgtccaagacactggcccagtacacctccaagacatgcagcaactgtgggtttaccatcaccagcgccgactacgacagggtgctggagaagctgaagaagacagcaacaggctggatgaccacaattaacggcaaggagctgaaggtggagggccagattacctactacaacagatacaagagacagaacgtagtcaaggacctgtccgtcgagctggatagactgagcgaagaatctgtgaacaacgacatctcctcctggacaaagggcagaagcggagaagctctgagcctcctgaagaaaagattctcccatagacccgtgcaggagaagttcgtgtgcctgaactgcggcttcgagacacacgcagccgagcaagccgccctgaacatcgccagatcctggctgttcctgcggagccaggagtacaagaaataccagacaaacaagacaaccggcaacaccgataagagagccttcgtcgagacctggcagtccttttaccggaagaagcttaaggaggtgtggaaacctgccgtgcggtctggcggatctggcggaggctccagcctgggcagcgagctgttcagggacgtggccatcgtgttcagccaggaggagtggcagtggctggcccccgcccagagggacctgtacagggacgtgatgctggagacctacagcaacctggtgagcctgggcctggccatcagcaagcccgacgtgatcagcttcctggagcagggcaaggagccctggatggtggagagggtggtgagcaggggcctgtgccccgtgctggagagcaggggcggcccaagcagcggcgcccctcctcccagcggcggcagcccagccggctccccaacctctaccgaggagggcacctctgagtccgccacccccgagagcggccctggcacctccaccgagcccagcgagggcagcgcacccggcagccctgccggcagccccacctccacagaggagggaaccagcaccgagcccagcgaaggcagcgccccaggcaccagcaccgagcctagtgagcaggagattaaacggatcaacaagatcagaagaagacttgtgaaagacagcaacaccaagaaggccggcaagacaggccccatgaaaaccctgctggttagagtgatgacacccgatctgagagagcggctggaaaacctgagaaagaagcctgaaaatatcccccagcccatcagcaatacatctagagccaacctgaataagctgctgaccgattacaccgaaatgaagaaggcgatcctgcatgtgtactgggaagagttccagaaggaccctgtgggcctgatgagccgggtggcccagcctgccagcaagaagatcgatcagaacaagctgaaacctgagatggacgagaagggcaacctgaccaccgccggctttgcctgctctcagtgtggccagcccctgttcgtgtacaagctggagcaggtgtctgagaagggcaaggcttacaccaactacttcggacggtgcaatgtggccgagcacgaaaagctgatcctgctggcccagctgaagcccgagaaggatagcgacgaagccgtgacatatagcctgggaaagtttgggcagagggccctggatttctacagcattcatgtgaccaaggagtccacccaccccgtgaagcccctggcccagatcgccggaaacagatacgcctccggacctgtgggaaaggccctgagcgacgcatgtatgggcacaatcgcctccttcctgtctaagtaccaggacatcatcatcgaacaccagaaggtggtgaagggcaaccagaagagactggagagcctgcgggagctggccggcaaggaaaacctggaataccctagcgtgaccctgccacctcagcctcacaccaaggagggcgttgatgcctacaacgaagtgatcgcccgggtgcgaatgtgggtgaacctgaacctgtggcagaagctgaagctaagcagagatgatgccaagcctctgctgagactgaagggattcccttcctttcctctggtcgagagacaggccaacgaagtggactggtgggacatggtgtgtaacgtgaagaagctgatcaacgagaaaaaggaggatggcaaggtgttttggcagaatctggctggctacaagagacaggaagccctgagaccatacctgagcagcgaggaagatcggaagaagggaaagaaattcgctcggtaccagctgggcgacctgctgctgcacctggaaaagaagcacggcgaggactggggaaaggtgtacgacgaggcctgggagcggattgacaagaaagtggaaggcctgagcaagcacatcaagctggaagaggaacggagaagcgaggacgcccagagcaaggccgccctgaccgactggctgcgggctaaggccagcttcgtgatcgagggcctgaaggaggccgacaaggacgagttctgcagatgcgagctgaagctgcagaagtggtacggggacctgcggggaaagcccttcgccatcgaagccgagaacagcatcctggacatcagcggcttcagcaagcagtacaactgtgccttcatctggcagaaggacggcgtgaagaagctgaacctgtacctgatcatcaactacttcaagggcggcaagctgcggttcaagaagatcaaacctgaagccttcgaagccaacagattctacaccgtgatcaacaaaaagagcggcgagatcgtgcccatggaggtgaacttcaacttcgacgaccccaacctgatcatcctgcctctggcctttggcaagagacagggcagagaattcatctggaacgacctgctgtccctggaaaccggcagcctgaagctggccaacggaagagtgatcgagaagacactgtacaacagaagaacccggcaggatgagcctgccctgttcgtggccctgaccttcgagcggcgggaggtcctggactcctccaatatcaaaccaatgaacctgatcggcgtggcaagaggcgaaaacatccccgccgtgatcgccctgaccgaccccgagggctgcccactgagccggtttaaggatagcctgggaaacccaacccacatcctgagaatcggcgagagctataaggagaagcagcggaccatccaggccaagaaggaggtggagcagcggagagccggcggctacagccggaagtacgccagcaaagccaagaatctggcagacgatatggtgagaaacaccgctagagatctgctgtactacgccgtgacccaggatgccatgctgatcttcgccaacctgagccggggcttcggccggcagggcaagcggaccttcatggccgagagacagtacacacggatggaggactggctgaccgccaagctggcctacgagggcctgagcaagacctacctgtccaagacactggcccagtacacctccaagacatgcagcaactgtgggtttaccatcaccagcgccgactacgacagggtgctggagaagctgaagaagacagcaacaggctggatgaccacaattaacggcaaggagctgaaggtggagggccagattacctactacaacagatacaagagacagaacgtagtcaaggacctgtccgtcgagctggatagactgagcgaagaatctgtgaacaacgacatctcctcctggacaaagggcagaagcggagaagctctgagcctcctgaagaaaagattctcccatagacccgtgcaggagaagttcgtgtgcctgaactgcggcttcgagacacacgcagccgagcaagccgccctgaacatcgccagatcctggctgttcctgcggagccaggagtacaagaaataccagacaaacaagacaaccggcaacaccgataagagagccttcgtcgagacctggcagtccttttaccggaagaagcttaaggaggtgtggaaacctgccgtgcggtctggcggatctggcggaggctcctagcctgggcagcgagctgttcagggacgtggccatcgtgttcagccaggaggagtggcagtggctggcccccgcccagagggacctgtacagggacgtgatgctggagacctacagcaacctggtgagcctgggcctggccatcagcaagcccgacgtgatcagcttcctggagcagggcaaggagccctggatggtggagagggtggtgagcaggggcctgtgccccgtgctggagagcaggggatctggctccggcagcggccccaagaaaaagagaaaagtctaagctgccttctgcggggcttgccttctggccatgcccttcttctctcccttgcacctgtacctcttggtctttgaataaagcctgagtaggaaggctagcaaaaaaaaaaaaaaaaaaaaaaaaaaaaaaaaaaaaaaaaaaaaaaaaaaaaaaaaaaaaaaaaaaaaaaaaaaaaaaaa

SEQ ID NO: 16702 - RNA, 9485 nt, synthetic construct
  source 1..9485: mol_type = other RNA
aggaaataagagagaaaagaagagtaagaagaaatataagagccaccatggcccctaagaagaagcgtaaagtgagccggatggaacgcctcgtctacgaggtgcggcagaagtgcagaaacatcgaggacatctgcatctcctgcggatctctgaacgtgaccctggagcacccactgttcatcggcggcatgtgccagaactgtaaaaactgttttctggagtgtgcctatcaatacgacgatgacggctaccagagctactgcaccatctgttgcggcggaagagaggtgctgatgtgtggaaataacaactgctgccggtgcttctgcgtggaatgcgtggacctgctggtgggccccggcgccgcccaggccgctattaaggaagatccttggaactgctacatgtgcggccacaagggcacatacggcctgctgagacggagagaggactggcctagcagactgcagatgttcttcgccaataaccacgaccaggagttcgacccccctaaggtgtaccctcccgtccccgccgagaagagaaagcccatccgggtcctgagcctgttcgatggcatcgccaccggtctgctggtgctgaaggacctgggcatccaggtggataggtacattgcctccgaggtgtgcgaggactccatcaccgtgggaatggtgcgtcatcagggcaagatcatgtacgtgggcgacgtgcggagcgtgacacagaagcatatccaggagtggggccctttcgacctggtgatcggcggcagcccttgcaatgacctgagcatcgtgaacccagcccggaagggcctgtacgagggaaccggcagactgttcttcgagttttacagactgctgcacgacgcccggcctaaggaaggcgacgaccggcccttcttttggctgttcgagaatgtggtggccatgggagtcagcgacaagcgggatattagccggttcctggagagcaaccccgtgatgatcgatgccaaggaagtgagcgccgcccaccgggccagatacttctggggcaatctgcctggcatgaacagacccctggccagcaccgtgaacgacaagctggagctgcaggagtgcctggagcacggccggatcgccaagttcagcaaggtgagaaccatcaccacccgaagcaacagcatcaaacaaggcaaggaccagcactttcctgtgttcatgaacgagaaggaggacatcctgtggtgtaccgagatggagagagtgttcgggttcccagtccactacacagatgtcagcaacatgtctagactggccagacagagactgctgggaagaagctggtccgtccctgtgatcagacacctgttcgcccctctgaaggagtacttcgcctgcgtgagcagcggcaacagcaacgccaacagccggggccccagcttctctagcggcctggtgccactgtccctgagagggagccacatgggccccatggagatctacaaaaccgtgagcgcctggaagcggcagcctgtgcgcgtgctgagcctgtttcggaatatcgataaagtcctgaaaagcctgggattcctggagagcggctctggctccggcggtggcaccctgaagtacgtggaggatgtgacaaacgtggtcagacgggatgtggagaagtggggccccttcgatctggtgtacggcagcacccaacccctgggcagctcttgtgaccggtgccctggctggtacatgtttcagttccaccggatcctgcagtacgccctgccgagacaggagtcccagcggccattcttttggattttcatggacaacttgctgctgaccgaggatgaccaggaaactaccactcggttcctgcagaccgaagccgtgaccctgcaggacgtgagaggccgggactaccagaacgccatgcgggtgtggtccaacatccctggactgaaaagcaagcacgcacctctgacccctaaagaagaggagtacctgcaggcccaggtgcggagcagaagcaagctggacgcccctaaggtggatctgctggtgaagaattgcctcctgcccctgagagagtacttcaagtatttcagccagaatagtctgcccctgggaggcagcggcggcggcgccctggtgacatttgaggacgtcgccgtgcggttcacccaggaggaatgggctctgctggatccttctcagaaaatcctgtaccgggacgtgatgagagagacataccggaatctgacctccgtgggcatcaactgggaatgttgggaccttgaagcctgcttcagaagcctgggaagaaacctgagagtgcaggtggtgaagagaaagtgcgagctgaccaacagcggcccctgcgccgagggcggcccaagcagcggcgcccctcctcccagcggcggcagcccagccggctccccaacctctaccgaggagggcacctctgagtccgccacccccgagagcggccctggcacctccaccgagcccagcgagggcagcgcacccggcagccctgccggcagccccacctccacagaggagggaaccagcaccgagcccagcgaaggcagcgccccaggcaccagcaccgagcctagtgagcaggagattaaacggatcaacaagatcagaagaagacttgtgaaagacagcaacaccaagaaggccggcaagacaggccccatgaaaaccctgctggttagagtgatgacacccgatctgagagagcggctggaaaacctgagaaagaagcctgaaaatatcccccagcccatcagcaatacatctagagccaacctgaataagctgctgaccgattacaccgaaatgaagaaggcgatcctgcatgtgtactgggaagagttccagaaggaccctgtgggcctgatgagccgggtggcccagcctgccagcaagaagatcgatcagaacaagctgaaacctgagatggacgagaagggcaacctgaccaccgccggctttgcctgctctcagtgtggccagcccctgttcgtgtacaagctggagcaggtgtctgagaagggcaaggcttacaccaactacttcggacggtgcaatgtggccgagcacgaaaagctgatcctgctggcccagctgaagcccgagaaggatagcgacgaagccgtgacatatagcctgggaaagtttgggcagagggccctggatttctacagcattcatgtgaccaaggagtccacccaccccgtgaagcccctggcccagatcgccggaaacagatacgcctccggacctgtgggaaaggccctgagcgacgcatgtatgggcacaatcgcctccttcctgtctaagtaccaggacatcatcatcgaacaccagaaggtggtgaagggcaaccagaagagactggagagcctgcgggagctggccggcaaggaaaacctggaataccctagcgtgaccctgccacctcagcctcacaccaaggagggcgttgatgcctacaacgaagtgatcgcccgggtgcgaatgtgggtgaacctgaacctgtggcagaagctgaagctaagcagagatgatgccaagcctctgctgagactgaagggattcccttcctttcctctggtcgagagacaggccaacgaagtggactggtgggacatggtgtgtaacgtgaagaagctgatcaacgagaaaaaggaggatggcaaggtgttttggcagaatctggctggctacaagagacaggaagccctgagaccatacctgagcagcgaggaagatcggaagaagggaaagaaattcgctcggtaccagctgggcgacctgctgctgcacctggaaaagaagcacggcgaggactggggaaaggtgtacgacgaggcctgggagcggattgacaagaaagtggaaggcctgagcaagcacatcaagctggaagaggaacggagaagcgaggacgcccagagcaaggccgccctgaccgactggctgcgggctaaggccagcttcgtgatcgagggcctgaaggaggccgacaaggacgagttctgcagatgcgagctgaagctgcagaagtggtacggggacctgcggggaaagcccttcgccatcgaagccgagaacagcatcctggacatcagcggcttcagcaagcagtacaactgtgccttcatctggcagaaggacggcgtgaagaagctgaacctgtacctgatcatcaactacttcaagggcggcaagctgcggttcaagaagatcaaacctgaagccttcgaagccaacagattctacaccgtgatcaacaaaaagagcggcgagatcgtgcccatggaggtgaacttcaacttcgacgaccccaacctgatcatcctgcctctggcctttggcaagagacagggcagagaattcatctggaacgacctgctgtccctggaaaccggcagcctgaagctggccaacggaagagtgatcgagaagacactgtacaacagaagaacccggcaggatgagcctgccctgttcgtggccctgaccttcgagcggcgggaggtcctggactcctccaatatcaaaccaatgaacctgatcggcgtggcaagaggcgaaaacatccccgccgtgatcgccctgaccgaccccgagggctgcccactgagccggtttaaggatagcctgggaaacccaacccacatcctgagaatcggcgagagctataaggagaagcagcggaccatccaggccaagaaggaggtggagcagcggagagccggcggctacagccggaagtacgccagcaaagccaagaatctggcagacgatatggtgagaaacaccgctagagatctgctgtactacgccgtgacccaggatgccatgctgatcttcgccaacctgagccggggcttcggccggcagggcaagcggaccttcatggccgagagacagtacacacggatggaggactggctgaccgccaagctggcctacgagggcctgagcaagacctacctgtccaagacactggcccagtacacctccaagacatgcagcaactgtgggtttaccatcaccagcgccgactacgacagggtgctggagaagctgaagaagacagcaacaggctggatgaccacaattaacggcaaggagctgaaggtggagggccagattacctactacaacagatacaagagacagaacgtagtcaaggacctgtccgtcgagctggatagactgagcgaagaatctgtgaacaacgacatctcctcctggacaaagggcagaagcggagaagctctgagcctcctgaagaaaagattctcccatagacccgtgcaggagaagttcgtgtgcctgaactgcggcttcgagacacacgcagccgagcaagccgccctgaacatcgccagatcctggctgttcctgcggagccaggagtacaagaaataccagacaaacaagacaaccggcaacaccgataagagagccttcgtcgagacctggcagtccttttaccggaagaagcttaaggaggtgtggaaacctgccgtgcggtctggcggatctggcggaggctccggcgaggaggccgtgaccttcagggacgtggccctggacttcacctgggaggagtggggctgcctgagcgccgcccagagggagctgtacaaggacgtgatgctggagaactacaggaacctggtgagcctggccggcctgcccggccccaagcccggcctgatcagctggctggagggcgaggaggagccccacccctgggacagcctggtgcacgccgccaggagcaccagcctgagcaagggcggcccaagcagcggcgcccctcctcccagcggcggcagcccagccggctccccaacctctaccgaggagggcacctctgagtccgccacccccgagagcggccctggcacctccaccgagcccagcgagggcagcgcacccggcagccctgccggcagccccacctccacagaggagggaaccagcaccgagcccagcgaaggcagcgccccaggcaccagcaccgagcctagtgagcaggagattaaacggatcaacaagatcagaagaagacttgtgaaagacagcaacaccaagaaggccggcaagacaggccccatgaaaaccctgctggttagagtgatgacacccgatctgagagagcggctggaaaacctgagaaagaagcctgaaaatatcccccagcccatcagcaatacatctagagccaacctgaataagctgctgaccgattacaccgaaatgaagaaggcgatcctgcatgtgtactgggaagagttccagaaggaccctgtgggcctgatgagccgggtggcccagcctgccagcaagaagatcgatcagaacaagctgaaacctgagatggacgagaagggcaacctgaccaccgccggctttgcctgctctcagtgtggccagcccctgttcgtgtacaagctggagcaggtgtctgagaagggcaaggcttacaccaactacttcggacggtgcaatgtggccgagcacgaaaagctgatcctgctggcccagctgaagcccgagaaggatagcgacgaagccgtgacatatagcctgggaaagtttgggcagagggccctggatttctacagcattcatgtgaccaaggagtccacccaccccgtgaagcccctggcccagatcgccggaaacagatacgcctccggacctgtgggaaaggccctgagcgacgcatgtatgggcacaatcgcctccttcctgtctaagtaccaggacatcatcatcgaacaccagaaggtggtgaagggcaaccagaagagactggagagcctgcgggagctggccggcaaggaaaacctggaataccctagcgtgaccctgccacctcagcctcacaccaaggagggcgttgatgcctacaacgaagtgatcgcccgggtgcgaatgtgggtgaacctgaacctgtggcagaagctgaagctaagcagagatgatgccaagcctctgctgagactgaagggattcccttcctttcctctggtcgagagacaggccaacgaagtggactggtgggacatggtgtgtaacgtgaagaagctgatcaacgagaaaaaggaggatggcaaggtgttttggcagaatctggctggctacaagagacaggaagccctgagaccatacctgagcagcgaggaagatcggaagaagggaaagaaattcgctcggtaccagctgggcgacctgctgctgcacctggaaaagaagcacggcgaggactggggaaaggtgtacgacgaggcctgggagcggattgacaagaaagtggaaggcctgagcaagcacatcaagctggaagaggaacggagaagcgaggacgcccagagcaaggccgccctgaccgactggctgcgggctaaggccagcttcgtgatcgagggcctgaaggaggccgacaaggacgagttctgcagatgcgagctgaagctgcagaagtggtacggggacctgcggggaaagcccttcgccatcgaagccgagaacagcatcctggacatcagcggcttcagcaagcagtacaactgtgccttcatctggcagaaggacggcgtgaagaagctgaacctgtacctgatcatcaactacttcaagggcggcaagctgcggttcaagaagatcaaacctgaagccttcgaagccaacagattctacaccgtgatcaacaaaaagagcggcgagatcgtgcccatggaggtgaacttcaacttcgacgaccccaacctgatcatcctgcctctggcctttggcaagagacagggcagagaattcatctggaacgacctgctgtccctggaaaccggcagcctgaagctggccaacggaagagtgatcgagaagacactgtacaacagaagaacccggcaggatgagcctgccctgttcgtggccctgaccttcgagcggcgggaggtcctggactcctccaatatcaaaccaatgaacctgatcggcgtggcaagaggcgaaaacatccccgccgtgatcgccctgaccgaccccgagggctgcccactgagccggtttaaggatagcctgggaaacccaacccacatcctgagaatcggcgagagctataaggagaagcagcggaccatccaggccaagaaggaggtggagcagcggagagccggcggctacagccggaagtacgccagcaaagccaagaatctggcagacgatatggtgagaaacaccgctagagatctgctgtactacgccgtgacccaggatgccatgctgatcttcgccaacctgagccggggcttcggccggcagggcaagcggaccttcatggccgagagacagtacacacggatggaggactggctgaccgccaagctggcctacgagggcctgagcaagacctacctgtccaagacactggcccagtacacctccaagacatgcagcaactgtgggtttaccatcaccagcgccgactacgacagggtgctggagaagctgaagaagacagcaacaggctggatgaccacaattaacggcaaggagctgaaggtggagggccagattacctactacaacagatacaagagacagaacgtagtcaaggacctgtccgtcgagctggatagactgagcgaagaatctgtgaacaacgacatctcctcctggacaaagggcagaagcggagaagctctgagcctcctgaagaaaagattctcccatagacccgtgcaggagaagttcgtgtgcctgaactgcggcttcgagacacacgcagccgagcaagccgccctgaacatcgccagatcctggctgttcctgcggagccaggagtacaagaaataccagacaaacaagacaaccggcaacaccgataagagagccttcgtcgagacctggcagtccttttaccggaagaagcttaaggaggtgtggaaacctgccgtgcggtctggcggatctggcggaggctcctggcgaggaggccgtgaccttcagggacgtggccctggacttcacctgggaggagtggggctgcctgagcgccgcccagagggagctgtacaaggacgtgatgctggagaactacaggaacctggtgagcctggccggcctgcccggccccaagcccggcctgatcagctggctggagggcgaggaggagccccacccctgggacagcctggtgcacgccgccaggagcaccagcctgagcaagggatctggctccggcagcggccccaagaaaaagagaaaagtctaagctgccttctgcggggcttgccttctggccatgcccttcttctctcccttgcacctgtacctcttggtctttgaataaagcctgagtaggaaggctagcaaaaaaaaaaaaaaaaaaaaaaaaaaaaaaaaaaaaaaaaaaaaaaaaaaaaaaaaaaaaaaaaaaaaaaaaaaaaaaaa

SEQ ID NO: 16703 - RNA, 9485 nt, synthetic construct
  source 1..9485: mol_type = other RNA
aggaaataagagagaaaagaagagtaagaagaaatataagagccaccatggcccctaagaagaagcgtaaagtgagccggatggaacgcctcgtctacgaggtgcggcagaagtgcagaaacatcgaggacatctgcatctcctgcggatctctgaacgtgaccctggagcacccactgttcatcggcggcatgtgccagaactgtaaaaactgttttctggagtgtgcctatcaatacgacgatgacggctaccagagctactgcaccatctgttgcggcggaagagaggtgctgatgtgtggaaataacaactgctgccggtgcttctgcgtggaatgcgtggacctgctggtgggccccggcgccgcccaggccgctattaaggaagatccttggaactgctacatgtgcggccacaagggcacatacggcctgctgagacggagagaggactggcctagcagactgcagatgttcttcgccaataaccacgaccaggagttcgacccccctaaggtgtaccctcccgtccccgccgagaagagaaagcccatccgggtcctgagcctgttcgatggcatcgccaccggtctgctggtgctgaaggacctgggcatccaggtggataggtacattgcctccgaggtgtgcgaggactccatcaccgtgggaatggtgcgtcatcagggcaagatcatgtacgtgggcgacgtgcggagcgtgacacagaagcatatccaggagtggggccctttcgacctggtgatcggcggcagcccttgcaatgacctgagcatcgtgaacccagcccggaagggcctgtacgagggaaccggcagactgttcttcgagttttacagactgctgcacgacgcccggcctaaggaaggcgacgaccggcccttcttttggctgttcgagaatgtggtggccatgggagtcagcgacaagcgggatattagccggttcctggagagcaaccccgtgatgatcgatgccaaggaagtgagcgccgcccaccgggccagatacttctggggcaatctgcctggcatgaacagacccctggccagcaccgtgaacgacaagctggagctgcaggagtgcctggagcacggccggatcgccaagttcagcaaggtgagaaccatcaccacccgaagcaacagcatcaaacaaggcaaggaccagcactttcctgtgttcatgaacgagaaggaggacatcctgtggtgtaccgagatggagagagtgttcgggttcccagtccactacacagatgtcagcaacatgtctagactggccagacagagactgctgggaagaagctggtccgtccctgtgatcagacacctgttcgcccctctgaaggagtacttcgcctgcgtgagcagcggcaacagcaacgccaacagccggggccccagcttctctagcggcctggtgccactgtccctgagagggagccacatgggccccatggagatctacaaaaccgtgagcgcctggaagcggcagcctgtgcgcgtgctgagcctgtttcggaatatcgataaagtcctgaaaagcctgggattcctggagagcggctctggctccggcggtggcaccctgaagtacgtggaggatgtgacaaacgtggtcagacgggatgtggagaagtggggccccttcgatctggtgtacggcagcacccaacccctgggcagctcttgtgaccggtgccctggctggtacatgtttcagttccaccggatcctgcagtacgccctgccgagacaggagtcccagcggccattcttttggattttcatggacaacttgctgctgaccgaggatgaccaggaaactaccactcggttcctgcagaccgaagccgtgaccctgcaggacgtgagaggccgggactaccagaacgccatgcgggtgtggtccaacatccctggactgaaaagcaagcacgcacctctgacccctaaagaagaggagtacctgcaggcccaggtgcggagcagaagcaagctggacgcccctaaggtggatctgctggtgaagaattgcctcctgcccctgagagagtacttcaagtatttcagccagaatagtctgcccctgggaggcagcggcggcggcgccctggtgacatttgaggacgtcgccgtgcggttcacccaggaggaatgggctctgctggatccttctcagaaaatcctgtaccgggacgtgatgagagagacataccggaatctgacctccgtgggcatcaactgggaatgttgggaccttgaagcctgcttcagaagcctgggaagaaacctgagagtgcaggtggtgaagagaaagtgcgagctgaccaacagcggcccctgcgccgagggcggcccaagcagcggcgcccctcctcccagcggcggcagcccagccggctccccaacctctaccgaggagggcacctctgagtccgccacccccgagagcggccctggcacctccaccgagcccagcgagggcagcgcacccggcagccctgccggcagccccacctccacagaggagggaaccagcaccgagcccagcgaaggcagcgccccaggcaccagcaccgagcctagtgagcaggagattaaacggatcaacaagatcagaagaagacttgtgaaagacagcaacaccaagaaggccggcaagacaggccccatgaaaaccctgctggttagagtgatgacacccgatctgagagagcggctggaaaacctgagaaagaagcctgaaaatatcccccagcccatcagcaatacatctagagccaacctgaataagctgctgaccgattacaccgaaatgaagaaggcgatcctgcatgtgtactgggaagagttccagaaggaccctgtgggcctgatgagccgggtggcccagcctgccagcaagaagatcgatcagaacaagctgaaacctgagatggacgagaagggcaacctgaccaccgccggctttgcctgctctcagtgtggccagcccctgttcgtgtacaagctggagcaggtgtctgagaagggcaaggcttacaccaactacttcggacggtgcaatgtggccgagcacgaaaagctgatcctgctggcccagctgaagcccgagaaggatagcgacgaagccgtgacatatagcctgggaaagtttgggcagagggccctggatttctacagcattcatgtgaccaaggagtccacccaccccgtgaagcccctggcccagatcgccggaaacagatacgcctccggacctgtgggaaaggccctgagcgacgcatgtatgggcacaatcgcctccttcctgtctaagtaccaggacatcatcatcgaacaccagaaggtggtgaagggcaaccagaagagactggagagcctgcgggagctggccggcaaggaaaacctggaataccctagcgtgaccctgccacctcagcctcacaccaaggagggcgttgatgcctacaacgaagtgatcgcccgggtgcgaatgtgggtgaacctgaacctgtggcagaagctgaagctaagcagagatgatgccaagcctctgctgagactgaagggattcccttcctttcctctggtcgagagacaggccaacgaagtggactggtgggacatggtgtgtaacgtgaagaagctgatcaacgagaaaaaggaggatggcaaggtgttttggcagaatctggctggctacaagagacaggaagccctgagaccatacctgagcagcgaggaagatcggaagaagggaaagaaattcgctcggtaccagctgggcgacctgctgctgcacctggaaaagaagcacggcgaggactggggaaaggtgtacgacgaggcctgggagcggattgacaagaaagtggaaggcctgagcaagcacatcaagctggaagaggaacggagaagcgaggacgcccagagcaaggccgccctgaccgactggctgcgggctaaggccagcttcgtgatcgagggcctgaaggaggccgacaaggacgagttctgcagatgcgagctgaagctgcagaagtggtacggggacctgcggggaaagcccttcgccatcgaagccgagaacagcatcctggacatcagcggcttcagcaagcagtacaactgtgccttcatctggcagaaggacggcgtgaagaagctgaacctgtacctgatcatcaactacttcaagggcggcaagctgcggttcaagaagatcaaacctgaagccttcgaagccaacagattctacaccgtgatcaacaaaaagagcggcgagatcgtgcccatggaggtgaacttcaacttcgacgaccccaacctgatcatcctgcctctggcctttggcaagagacagggcagagaattcatctggaacgacctgctgtccctggaaaccggcagcctgaagctggccaacggaagagtgatcgagaagacactgtacaacagaagaacccggcaggatgagcctgccctgttcgtggccctgaccttcgagcggcgggaggtcctggactcctccaatatcaaaccaatgaacctgatcggcgtggcaagaggcgaaaacatccccgccgtgatcgccctgaccgaccccgagggctgcccactgagccggtttaaggatagcctgggaaacccaacccacatcctgagaatcggcgagagctataaggagaagcagcggaccatccaggccaagaaggaggtggagcagcggagagccggcggctacagccggaagtacgccagcaaagccaagaatctggcagacgatatggtgagaaacaccgctagagatctgctgtactacgccgtgacccaggatgccatgctgatcttcgccaacctgagccggggcttcggccggcagggcaagcggaccttcatggccgagagacagtacacacggatggaggactggctgaccgccaagctggcctacgagggcctgagcaagacctacctgtccaagacactggcccagtacacctccaagacatgcagcaactgtgggtttaccatcaccagcgccgactacgacagggtgctggagaagctgaagaagacagcaacaggctggatgaccacaattaacggcaaggagctgaaggtggagggccagattacctactacaacagatacaagagacagaacgtagtcaaggacctgtccgtcgagctggatagactgagcgaagaatctgtgaacaacgacatctcctcctggacaaagggcagaagcggagaagctctgagcctcctgaagaaaagattctcccatagacccgtgcaggagaagttcgtgtgcctgaactgcggcttcgagacacacgcagccgagcaagccgccctgaacatcgccagatcctggctgttcctgcggagccaggagtacaagaaataccagacaaacaagacaaccggcaacaccgataagagagccttcgtcgagacctggcagtccttttaccggaagaagcttaaggaggtgtggaaacctgccgtgcggtctggcggatctggcggaggctccctgcagaggctgctgaccttcagggacgtggccatcgagttcagccaggaggagtggacctgcctgaaccacacccagaggaagctgtacagggacgtgatgctggagaactacggccacctgctgttcctgggcctgatcgtgagcaagcccgacctggtgagcttcctggagcagaagaaggagccctggagcgtgaagaggaagaagagggtgaccatccaccccggcaaggtggcccagggcggcccaagcagcggcgcccctcctcccagcggcggcagcccagccggctccccaacctctaccgaggagggcacctctgagtccgccacccccgagagcggccctggcacctccaccgagcccagcgagggcagcgcacccggcagccctgccggcagccccacctccacagaggagggaaccagcaccgagcccagcgaaggcagcgccccaggcaccagcaccgagcctagtgagcaggagattaaacggatcaacaagatcagaagaagacttgtgaaagacagcaacaccaagaaggccggcaagacaggccccatgaaaaccctgctggttagagtgatgacacccgatctgagagagcggctggaaaacctgagaaagaagcctgaaaatatcccccagcccatcagcaatacatctagagccaacctgaataagctgctgaccgattacaccgaaatgaagaaggcgatcctgcatgtgtactgggaagagttccagaaggaccctgtgggcctgatgagccgggtggcccagcctgccagcaagaagatcgatcagaacaagctgaaacctgagatggacgagaagggcaacctgaccaccgccggctttgcctgctctcagtgtggccagcccctgttcgtgtacaagctggagcaggtgtctgagaagggcaaggcttacaccaactacttcggacggtgcaatgtggccgagcacgaaaagctgatcctgctggcccagctgaagcccgagaaggatagcgacgaagccgtgacatatagcctgggaaagtttgggcagagggccctggatttctacagcattcatgtgaccaaggagtccacccaccccgtgaagcccctggcccagatcgccggaaacagatacgcctccggacctgtgggaaaggccctgagcgacgcatgtatgggcacaatcgcctccttcctgtctaagtaccaggacatcatcatcgaacaccagaaggtggtgaagggcaaccagaagagactggagagcctgcgggagctggccggcaaggaaaacctggaataccctagcgtgaccctgccacctcagcctcacaccaaggagggcgttgatgcctacaacgaagtgatcgcccgggtgcgaatgtgggtgaacctgaacctgtggcagaagctgaagctaagcagagatgatgccaagcctctgctgagactgaagggattcccttcctttcctctggtcgagagacaggccaacgaagtggactggtgggacatggtgtgtaacgtgaagaagctgatcaacgagaaaaaggaggatggcaaggtgttttggcagaatctggctggctacaagagacaggaagccctgagaccatacctgagcagcgaggaagatcggaagaagggaaagaaattcgctcggtaccagctgggcgacctgctgctgcacctggaaaagaagcacggcgaggactggggaaaggtgtacgacgaggcctgggagcggattgacaagaaagtggaaggcctgagcaagcacatcaagctggaagaggaacggagaagcgaggacgcccagagcaaggccgccctgaccgactggctgcgggctaaggccagcttcgtgatcgagggcctgaaggaggccgacaaggacgagttctgcagatgcgagctgaagctgcagaagtggtacggggacctgcggggaaagcccttcgccatcgaagccgagaacagcatcctggacatcagcggcttcagcaagcagtacaactgtgccttcatctggcagaaggacggcgtgaagaagctgaacctgtacctgatcatcaactacttcaagggcggcaagctgcggttcaagaagatcaaacctgaagccttcgaagccaacagattctacaccgtgatcaacaaaaagagcggcgagatcgtgcccatggaggtgaacttcaacttcgacgaccccaacctgatcatcctgcctctggcctttggcaagagacagggcagagaattcatctggaacgacctgctgtccctggaaaccggcagcctgaagctggccaacggaagagtgatcgagaagacactgtacaacagaagaacccggcaggatgagcctgccctgttcgtggccctgaccttcgagcggcgggaggtcctggactcctccaatatcaaaccaatgaacctgatcggcgtggcaagaggcgaaaacatccccgccgtgatcgccctgaccgaccccgagggctgcccactgagccggtttaaggatagcctgggaaacccaacccacatcctgagaatcggcgagagctataaggagaagcagcggaccatccaggccaagaaggaggtggagcagcggagagccggcggctacagccggaagtacgccagcaaagccaagaatctggcagacgatatggtgagaaacaccgctagagatctgctgtactacgccgtgacccaggatgccatgctgatcttcgccaacctgagccggggcttcggccggcagggcaagcggaccttcatggccgagagacagtacacacggatggaggactggctgaccgccaagctggcctacgagggcctgagcaagacctacctgtccaagacactggcccagtacacctccaagacatgcagcaactgtgggtttaccatcaccagcgccgactacgacagggtgctggagaagctgaagaagacagcaacaggctggatgaccacaattaacggcaaggagctgaaggtggagggccagattacctactacaacagatacaagagacagaacgtagtcaaggacctgtccgtcgagctggatagactgagcgaagaatctgtgaacaacgacatctcctcctggacaaagggcagaagcggagaagctctgagcctcctgaagaaaagattctcccatagacccgtgcaggagaagttcgtgtgcctgaactgcggcttcgagacacacgcagccgagcaagccgccctgaacatcgccagatcctggctgttcctgcggagccaggagtacaagaaataccagacaaacaagacaaccggcaacaccgataagagagccttcgtcgagacctggcagtccttttaccggaagaagcttaaggaggtgtggaaacctgccgtgcggtctggcggatctggcggaggctcctctgcagaggctgctgaccttcagggacgtggccatcgagttcagccaggaggagtggacctgcctgaaccacacccagaggaagctgtacagggacgtgatgctggagaactacggccacctgctgttcctgggcctgatcgtgagcaagcccgacctggtgagcttcctggagcagaagaaggagccctggagcgtgaagaggaagaagagggtgaccatccaccccggcaaggtggcccagggatctggctccggcagcggccccaagaaaaagagaaaagtctaagctgccttctgcggggcttgccttctggccatgcccttcttctctcccttgcacctgtacctcttggtctttgaataaagcctgagtaggaaggctagcaaaaaaaaaaaaaaaaaaaaaaaaaaaaaaaaaaaaaaaaaaaaaaaaaaaaaaaaaaaaaaaaaaaaaaaaaaaaaaaa

SEQ ID NO: 16704 - RNA, 9485 nt, synthetic construct
  source 1..9485: mol_type = other RNA
aggaaataagagagaaaagaagagtaagaagaaatataagagccaccatggcccctaagaagaagcgtaaagtgagccggatggaacgcctcgtctacgaggtgcggcagaagtgcagaaacatcgaggacatctgcatctcctgcggatctctgaacgtgaccctggagcacccactgttcatcggcggcatgtgccagaactgtaaaaactgttttctggagtgtgcctatcaatacgacgatgacggctaccagagctactgcaccatctgttgcggcggaagagaggtgctgatgtgtggaaataacaactgctgccggtgcttctgcgtggaatgcgtggacctgctggtgggccccggcgccgcccaggccgctattaaggaagatccttggaactgctacatgtgcggccacaagggcacatacggcctgctgagacggagagaggactggcctagcagactgcagatgttcttcgccaataaccacgaccaggagttcgacccccctaaggtgtaccctcccgtccccgccgagaagagaaagcccatccgggtcctgagcctgttcgatggcatcgccaccggtctgctggtgctgaaggacctgggcatccaggtggataggtacattgcctccgaggtgtgcgaggactccatcaccgtgggaatggtgcgtcatcagggcaagatcatgtacgtgggcgacgtgcggagcgtgacacagaagcatatccaggagtggggccctttcgacctggtgatcggcggcagcccttgcaatgacctgagcatcgtgaacccagcccggaagggcctgtacgagggaaccggcagactgttcttcgagttttacagactgctgcacgacgcccggcctaaggaaggcgacgaccggcccttcttttggctgttcgagaatgtggtggccatgggagtcagcgacaagcgggatattagccggttcctggagagcaaccccgtgatgatcgatgccaaggaagtgagcgccgcccaccgggccagatacttctggggcaatctgcctggcatgaacagacccctggccagcaccgtgaacgacaagctggagctgcaggagtgcctggagcacggccggatcgccaagttcagcaaggtgagaaccatcaccacccgaagcaacagcatcaaacaaggcaaggaccagcactttcctgtgttcatgaacgagaaggaggacatcctgtggtgtaccgagatggagagagtgttcgggttcccagtccactacacagatgtcagcaacatgtctagactggccagacagagactgctgggaagaagctggtccgtccctgtgatcagacacctgttcgcccctctgaaggagtacttcgcctgcgtgagcagcggcaacagcaacgccaacagccggggccccagcttctctagcggcctggtgccactgtccctgagagggagccacatgggccccatggagatctacaaaaccgtgagcgcctggaagcggcagcctgtgcgcgtgctgagcctgtttcggaatatcgataaagtcctgaaaagcctgggattcctggagagcggctctggctccggcggtggcaccctgaagtacgtggaggatgtgacaaacgtggtcagacgggatgtggagaagtggggccccttcgatctggtgtacggcagcacccaacccctgggcagctcttgtgaccggtgccctggctggtacatgtttcagttccaccggatcctgcagtacgccctgccgagacaggagtcccagcggccattcttttggattttcatggacaacttgctgctgaccgaggatgaccaggaaactaccactcggttcctgcagaccgaagccgtgaccctgcaggacgtgagaggccgggactaccagaacgccatgcgggtgtggtccaacatccctggactgaaaagcaagcacgcacctctgacccctaaagaagaggagtacctgcaggcccaggtgcggagcagaagcaagctggacgcccctaaggtggatctgctggtgaagaattgcctcctgcccctgagagagtacttcaagtatttcagccagaatagtctgcccctgggaggcagcggcggcggcgccctggtgacatttgaggacgtcgccgtgcggttcacccaggaggaatgggctctgctggatccttctcagaaaatcctgtaccgggacgtgatgagagagacataccggaatctgacctccgtgggcatcaactgggaatgttgggaccttgaagcctgcttcagaagcctgggaagaaacctgagagtgcaggtggtgaagagaaagtgcgagctgaccaacagcggcccctgcgccgagggcggcccaagcagcggcgcccctcctcccagcggcggcagcccagccggctccccaacctctaccgaggagggcacctctgagtccgccacccccgagagcggccctggcacctccaccgagcccagcgagggcagcgcacccggcagccctgccggcagccccacctccacagaggagggaaccagcaccgagcccagcgaaggcagcgccccaggcaccagcaccgagcctagtgagcaggagattaaacggatcaacaagatcagaagaagacttgtgaaagacagcaacaccaagaaggccggcaagacaggccccatgaaaaccctgctggttagagtgatgacacccgatctgagagagcggctggaaaacctgagaaagaagcctgaaaatatcccccagcccatcagcaatacatctagagccaacctgaataagctgctgaccgattacaccgaaatgaagaaggcgatcctgcatgtgtactgggaagagttccagaaggaccctgtgggcctgatgagccgggtggcccagcctgccagcaagaagatcgatcagaacaagctgaaacctgagatggacgagaagggcaacctgaccaccgccggctttgcctgctctcagtgtggccagcccctgttcgtgtacaagctggagcaggtgtctgagaagggcaaggcttacaccaactacttcggacggtgcaatgtggccgagcacgaaaagctgatcctgctggcccagctgaagcccgagaaggatagcgacgaagccgtgacatatagcctgggaaagtttgggcagagggccctggatttctacagcattcatgtgaccaaggagtccacccaccccgtgaagcccctggcccagatcgccggaaacagatacgcctccggacctgtgggaaaggccctgagcgacgcatgtatgggcacaatcgcctccttcctgtctaagtaccaggacatcatcatcgaacaccagaaggtggtgaagggcaaccagaagagactggagagcctgcgggagctggccggcaaggaaaacctggaataccctagcgtgaccctgccacctcagcctcacaccaaggagggcgttgatgcctacaacgaagtgatcgcccgggtgcgaatgtgggtgaacctgaacctgtggcagaagctgaagctaagcagagatgatgccaagcctctgctgagactgaagggattcccttcctttcctctggtcgagagacaggccaacgaagtggactggtgggacatggtgtgtaacgtgaagaagctgatcaacgagaaaaaggaggatggcaaggtgttttggcagaatctggctggctacaagagacaggaagccctgagaccatacctgagcagcgaggaagatcggaagaagggaaagaaattcgctcggtaccagctgggcgacctgctgctgcacctggaaaagaagcacggcgaggactggggaaaggtgtacgacgaggcctgggagcggattgacaagaaagtggaaggcctgagcaagcacatcaagctggaagaggaacggagaagcgaggacgcccagagcaaggccgccctgaccgactggctgcgggctaaggccagcttcgtgatcgagggcctgaaggaggccgacaaggacgagttctgcagatgcgagctgaagctgcagaagtggtacggggacctgcggggaaagcccttcgccatcgaagccgagaacagcatcctggacatcagcggcttcagcaagcagtacaactgtgccttcatctggcagaaggacggcgtgaagaagctgaacctgtacctgatcatcaactacttcaagggcggcaagctgcggttcaagaagatcaaacctgaagccttcgaagccaacagattctacaccgtgatcaacaaaaagagcggcgagatcgtgcccatggaggtgaacttcaacttcgacgaccccaacctgatcatcctgcctctggcctttggcaagagacagggcagagaattcatctggaacgacctgctgtccctggaaaccggcagcctgaagctggccaacggaagagtgatcgagaagacactgtacaacagaagaacccggcaggatgagcctgccctgttcgtggccctgaccttcgagcggcgggaggtcctggactcctccaatatcaaaccaatgaacctgatcggcgtggcaagaggcgaaaacatccccgccgtgatcgccctgaccgaccccgagggctgcccactgagccggtttaaggatagcctgggaaacccaacccacatcctgagaatcggcgagagctataaggagaagcagcggaccatccaggccaagaaggaggtggagcagcggagagccggcggctacagccggaagtacgccagcaaagccaagaatctggcagacgatatggtgagaaacaccgctagagatctgctgtactacgccgtgacccaggatgccatgctgatcttcgccaacctgagccggggcttcggccggcagggcaagcggaccttcatggccgagagacagtacacacggatggaggactggctgaccgccaagctggcctacgagggcctgagcaagacctacctgtccaagacactggcccagtacacctccaagacatgcagcaactgtgggtttaccatcaccagcgccgactacgacagggtgctggagaagctgaagaagacagcaacaggctggatgaccacaattaacggcaaggagctgaaggtggagggccagattacctactacaacagatacaagagacagaacgtagtcaaggacctgtccgtcgagctggatagactgagcgaagaatctgtgaacaacgacatctcctcctggacaaagggcagaagcggagaagctctgagcctcctgaagaaaagattctcccatagacccgtgcaggagaagttcgtgtgcctgaactgcggcttcgagacacacgcagccgagcaagccgccctgaacatcgccagatcctggctgttcctgcggagccaggagtacaagaaataccagacaaacaagacaaccggcaacaccgataagagagccttcgtcgagacctggcagtccttttaccggaagaagcttaaggaggtgtggaaacctgccgtgcggtctggcggatctggcggaggctccggcaagcccggcgccctgagcttcgccgacgtggccgtgtacttcagcagcgaggagtggggctgcctgaggcccgcccagagggccctgtacagggacgtgatgagggagacctacggccacctgggcgccctgggcgaggccaggccccccgccctgatcagctggatggagaggaagaaggaggcctggagccccgaggccgaggaccccgaggacagggccaggcaccccggctacggcggcggcccaagcagcggcgcccctcctcccagcggcggcagcccagccggctccccaacctctaccgaggagggcacctctgagtccgccacccccgagagcggccctggcacctccaccgagcccagcgagggcagcgcacccggcagccctgccggcagccccacctccacagaggagggaaccagcaccgagcccagcgaaggcagcgccccaggcaccagcaccgagcctagtgagcaggagattaaacggatcaacaagatcagaagaagacttgtgaaagacagcaacaccaagaaggccggcaagacaggccccatgaaaaccctgctggttagagtgatgacacccgatctgagagagcggctggaaaacctgagaaagaagcctgaaaatatcccccagcccatcagcaatacatctagagccaacctgaataagctgctgaccgattacaccgaaatgaagaaggcgatcctgcatgtgtactgggaagagttccagaaggaccctgtgggcctgatgagccgggtggcccagcctgccagcaagaagatcgatcagaacaagctgaaacctgagatggacgagaagggcaacctgaccaccgccggctttgcctgctctcagtgtggccagcccctgttcgtgtacaagctggagcaggtgtctgagaagggcaaggcttacaccaactacttcggacggtgcaatgtggccgagcacgaaaagctgatcctgctggcccagctgaagcccgagaaggatagcgacgaagccgtgacatatagcctgggaaagtttgggcagagggccctggatttctacagcattcatgtgaccaaggagtccacccaccccgtgaagcccctggcccagatcgccggaaacagatacgcctccggacctgtgggaaaggccctgagcgacgcatgtatgggcacaatcgcctccttcctgtctaagtaccaggacatcatcatcgaacaccagaaggtggtgaagggcaaccagaagagactggagagcctgcgggagctggccggcaaggaaaacctggaataccctagcgtgaccctgccacctcagcctcacaccaaggagggcgttgatgcctacaacgaagtgatcgcccgggtgcgaatgtgggtgaacctgaacctgtggcagaagctgaagctaagcagagatgatgccaagcctctgctgagactgaagggattcccttcctttcctctggtcgagagacaggccaacgaagtggactggtgggacatggtgtgtaacgtgaagaagctgatcaacgagaaaaaggaggatggcaaggtgttttggcagaatctggctggctacaagagacaggaagccctgagaccatacctgagcagcgaggaagatcggaagaagggaaagaaattcgctcggtaccagctgggcgacctgctgctgcacctggaaaagaagcacggcgaggactggggaaaggtgtacgacgaggcctgggagcggattgacaagaaagtggaaggcctgagcaagcacatcaagctggaagaggaacggagaagcgaggacgcccagagcaaggccgccctgaccgactggctgcgggctaaggccagcttcgtgatcgagggcctgaaggaggccgacaaggacgagttctgcagatgcgagctgaagctgcagaagtggtacggggacctgcggggaaagcccttcgccatcgaagccgagaacagcatcctggacatcagcggcttcagcaagcagtacaactgtgccttcatctggcagaaggacggcgtgaagaagctgaacctgtacctgatcatcaactacttcaagggcggcaagctgcggttcaagaagatcaaacctgaagccttcgaagccaacagattctacaccgtgatcaacaaaaagagcggcgagatcgtgcccatggaggtgaacttcaacttcgacgaccccaacctgatcatcctgcctctggcctttggcaagagacagggcagagaattcatctggaacgacctgctgtccctggaaaccggcagcctgaagctggccaacggaagagtgatcgagaagacactgtacaacagaagaacccggcaggatgagcctgccctgttcgtggccctgaccttcgagcggcgggaggtcctggactcctccaatatcaaaccaatgaacctgatcggcgtggcaagaggcgaaaacatccccgccgtgatcgccctgaccgaccccgagggctgcccactgagccggtttaaggatagcctgggaaacccaacccacatcctgagaatcggcgagagctataaggagaagcagcggaccatccaggccaagaaggaggtggagcagcggagagccggcggctacagccggaagtacgccagcaaagccaagaatctggcagacgatatggtgagaaacaccgctagagatctgctgtactacgccgtgacccaggatgccatgctgatcttcgccaacctgagccggggcttcggccggcagggcaagcggaccttcatggccgagagacagtacacacggatggaggactggctgaccgccaagctggcctacgagggcctgagcaagacctacctgtccaagacactggcccagtacacctccaagacatgcagcaactgtgggtttaccatcaccagcgccgactacgacagggtgctggagaagctgaagaagacagcaacaggctggatgaccacaattaacggcaaggagctgaaggtggagggccagattacctactacaacagatacaagagacagaacgtagtcaaggacctgtccgtcgagctggatagactgagcgaagaatctgtgaacaacgacatctcctcctggacaaagggcagaagcggagaagctctgagcctcctgaagaaaagattctcccatagacccgtgcaggagaagttcgtgtgcctgaactgcggcttcgagacacacgcagccgagcaagccgccctgaacatcgccagatcctggctgttcctgcggagccaggagtacaagaaataccagacaaacaagacaaccggcaacaccgataagagagccttcgtcgagacctggcagtccttttaccggaagaagcttaaggaggtgtggaaacctgccgtgcggtctggcggatctggcggaggctcctggcaagcccggcgccctgagcttcgccgacgtggccgtgtacttcagcagcgaggagtggggctgcctgaggcccgcccagagggccctgtacagggacgtgatgagggagacctacggccacctgggcgccctgggcgaggccaggccccccgccctgatcagctggatggagaggaagaaggaggcctggagccccgaggccgaggaccccgaggacagggccaggcaccccggctacggcggatctggctccggcagcggccccaagaaaaagagaaaagtctaagctgccttctgcggggcttgccttctggccatgcccttcttctctcccttgcacctgtacctcttggtctttgaataaagcctgagtaggaaggctagcaaaaaaaaaaaaaaaaaaaaaaaaaaaaaaaaaaaaaaaaaaaaaaaaaaaaaaaaaaaaaaaaaaaaaaaaaaaaaaaa

SEQ ID NO: 16705 - RNA, 9485 nt, synthetic construct
  source 1..9485: mol_type = other RNA
aggaaataagagagaaaagaagagtaagaagaaatataagagccaccatggcccctaagaagaagcgtaaagtgagccggatggaacgcctcgtctacgaggtgcggcagaagtgcagaaacatcgaggacatctgcatctcctgcggatctctgaacgtgaccctggagcacccactgttcatcggcggcatgtgccagaactgtaaaaactgttttctggagtgtgcctatcaatacgacgatgacggctaccagagctactgcaccatctgttgcggcggaagagaggtgctgatgtgtggaaataacaactgctgccggtgcttctgcgtggaatgcgtggacctgctggtgggccccggcgccgcccaggccgctattaaggaagatccttggaactgctacatgtgcggccacaagggcacatacggcctgctgagacggagagaggactggcctagcagactgcagatgttcttcgccaataaccacgaccaggagttcgacccccctaaggtgtaccctcccgtccccgccgagaagagaaagcccatccgggtcctgagcctgttcgatggcatcgccaccggtctgctggtgctgaaggacctgggcatccaggtggataggtacattgcctccgaggtgtgcgaggactccatcaccgtgggaatggtgcgtcatcagggcaagatcatgtacgtgggcgacgtgcggagcgtgacacagaagcatatccaggagtggggccctttcgacctggtgatcggcggcagcccttgcaatgacctgagcatcgtgaacccagcccggaagggcctgtacgagggaaccggcagactgttcttcgagttttacagactgctgcacgacgcccggcctaaggaaggcgacgaccggcccttcttttggctgttcgagaatgtggtggccatgggagtcagcgacaagcgggatattagccggttcctggagagcaaccccgtgatgatcgatgccaaggaagtgagcgccgcccaccgggccagatacttctggggcaatctgcctggcatgaacagacccctggccagcaccgtgaacgacaagctggagctgcaggagtgcctggagcacggccggatcgccaagttcagcaaggtgagaaccatcaccacccgaagcaacagcatcaaacaaggcaaggaccagcactttcctgtgttcatgaacgagaaggaggacatcctgtggtgtaccgagatggagagagtgttcgggttcccagtccactacacagatgtcagcaacatgtctagactggccagacagagactgctgggaagaagctggtccgtccctgtgatcagacacctgttcgcccctctgaaggagtacttcgcctgcgtgagcagcggcaacagcaacgccaacagccggggccccagcttctctagcggcctggtgccactgtccctgagagggagccacatgggccccatggagatctacaaaaccgtgagcgcctggaagcggcagcctgtgcgcgtgctgagcctgtttcggaatatcgataaagtcctgaaaagcctgggattcctggagagcggctctggctccggcggtggcaccctgaagtacgtggaggatgtgacaaacgtggtcagacgggatgtggagaagtggggccccttcgatctggtgtacggcagcacccaacccctgggcagctcttgtgaccggtgccctggctggtacatgtttcagttccaccggatcctgcagtacgccctgccgagacaggagtcccagcggccattcttttggattttcatggacaacttgctgctgaccgaggatgaccaggaaactaccactcggttcctgcagaccgaagccgtgaccctgcaggacgtgagaggccgggactaccagaacgccatgcgggtgtggtccaacatccctggactgaaaagcaagcacgcacctctgacccctaaagaagaggagtacctgcaggcccaggtgcggagcagaagcaagctggacgcccctaaggtggatctgctggtgaagaattgcctcctgcccctgagagagtacttcaagtatttcagccagaatagtctgcccctgggaggcagcggcggcggcgccctggtgacatttgaggacgtcgccgtgcggttcacccaggaggaatgggctctgctggatccttctcagaaaatcctgtaccgggacgtgatgagagagacataccggaatctgacctccgtgggcatcaactgggaatgttgggaccttgaagcctgcttcagaagcctgggaagaaacctgagagtgcaggtggtgaagagaaagtgcgagctgaccaacagcggcccctgcgccgagggcggcccaagcagcggcgcccctcctcccagcggcggcagcccagccggctccccaacctctaccgaggagggcacctctgagtccgccacccccgagagcggccctggcacctccaccgagcccagcgagggcagcgcacccggcagccctgccggcagccccacctccacagaggagggaaccagcaccgagcccagcgaaggcagcgccccaggcaccagcaccgagcctagtgagcaggagattaaacggatcaacaagatcagaagaagacttgtgaaagacagcaacaccaagaaggccggcaagacaggccccatgaaaaccctgctggttagagtgatgacacccgatctgagagagcggctggaaaacctgagaaagaagcctgaaaatatcccccagcccatcagcaatacatctagagccaacctgaataagctgctgaccgattacaccgaaatgaagaaggcgatcctgcatgtgtactgggaagagttccagaaggaccctgtgggcctgatgagccgggtggcccagcctgccagcaagaagatcgatcagaacaagctgaaacctgagatggacgagaagggcaacctgaccaccgccggctttgcctgctctcagtgtggccagcccctgttcgtgtacaagctggagcaggtgtctgagaagggcaaggcttacaccaactacttcggacggtgcaatgtggccgagcacgaaaagctgatcctgctggcccagctgaagcccgagaaggatagcgacgaagccgtgacatatagcctgggaaagtttgggcagagggccctggatttctacagcattcatgtgaccaaggagtccacccaccccgtgaagcccctggcccagatcgccggaaacagatacgcctccggacctgtgggaaaggccctgagcgacgcatgtatgggcacaatcgcctccttcctgtctaagtaccaggacatcatcatcgaacaccagaaggtggtgaagggcaaccagaagagactggagagcctgcgggagctggccggcaaggaaaacctggaataccctagcgtgaccctgccacctcagcctcacaccaaggagggcgttgatgcctacaacgaagtgatcgcccgggtgcgaatgtgggtgaacctgaacctgtggcagaagctgaagctaagcagagatgatgccaagcctctgctgagactgaagggattcccttcctttcctctggtcgagagacaggccaacgaagtggactggtgggacatggtgtgtaacgtgaagaagctgatcaacgagaaaaaggaggatggcaaggtgttttggcagaatctggctggctacaagagacaggaagccctgagaccatacctgagcagcgaggaagatcggaagaagggaaagaaattcgctcggtaccagctgggcgacctgctgctgcacctggaaaagaagcacggcgaggactggggaaaggtgtacgacgaggcctgggagcggattgacaagaaagtggaaggcctgagcaagcacatcaagctggaagaggaacggagaagcgaggacgcccagagcaaggccgccctgaccgactggctgcgggctaaggccagcttcgtgatcgagggcctgaaggaggccgacaaggacgagttctgcagatgcgagctgaagctgcagaagtggtacggggacctgcggggaaagcccttcgccatcgaagccgagaacagcatcctggacatcagcggcttcagcaagcagtacaactgtgccttcatctggcagaaggacggcgtgaagaagctgaacctgtacctgatcatcaactacttcaagggcggcaagctgcggttcaagaagatcaaacctgaagccttcgaagccaacagattctacaccgtgatcaacaaaaagagcggcgagatcgtgcccatggaggtgaacttcaacttcgacgaccccaacctgatcatcctgcctctggcctttggcaagagacagggcagagaattcatctggaacgacctgctgtccctggaaaccggcagcctgaagctggccaacggaagagtgatcgagaagacactgtacaacagaagaacccggcaggatgagcctgccctgttcgtggccctgaccttcgagcggcgggaggtcctggactcctccaatatcaaaccaatgaacctgatcggcgtggcaagaggcgaaaacatccccgccgtgatcgccctgaccgaccccgagggctgcccactgagccggtttaaggatagcctgggaaacccaacccacatcctgagaatcggcgagagctataaggagaagcagcggaccatccaggccaagaaggaggtggagcagcggagagccggcggctacagccggaagtacgccagcaaagccaagaatctggcagacgatatggtgagaaacaccgctagagatctgctgtactacgccgtgacccaggatgccatgctgatcttcgccaacctgagccggggcttcggccggcagggcaagcggaccttcatggccgagagacagtacacacggatggaggactggctgaccgccaagctggcctacgagggcctgagcaagacctacctgtccaagacactggcccagtacacctccaagacatgcagcaactgtgggtttaccatcaccagcgccgactacgacagggtgctggagaagctgaagaagacagcaacaggctggatgaccacaattaacggcaaggagctgaaggtggagggccagattacctactacaacagatacaagagacagaacgtagtcaaggacctgtccgtcgagctggatagactgagcgaagaatctgtgaacaacgacatctcctcctggacaaagggcagaagcggagaagctctgagcctcctgaagaaaagattctcccatagacccgtgcaggagaagttcgtgtgcctgaactgcggcttcgagacacacgcagccgagcaagccgccctgaacatcgccagatcctggctgttcctgcggagccaggagtacaagaaataccagacaaacaagacaaccggcaacaccgataagagagccttcgtcgagacctggcagtccttttaccggaagaagcttaaggaggtgtggaaacctgccgtgcggtctggcggatctggcggaggctcccaccaggacctggtgaccttcaaggacgtggccgtggacttcacccccgaggagtggggccagctggtgcccagccagaaggagctgtacagggacgtgatgctggagaactaccagaacctggtgtggctgggcctggccgtgagcaagcccgacgtgatctaccagctggagcaggtgggcggcacctgggtgcccgagggcgagaccctgaccgtgagctgcagcgacttcgtgaccaggggcggcccaagcagcggcgcccctcctcccagcggcggcagcccagccggctccccaacctctaccgaggagggcacctctgagtccgccacccccgagagcggccctggcacctccaccgagcccagcgagggcagcgcacccggcagccctgccggcagccccacctccacagaggagggaaccagcaccgagcccagcgaaggcagcgccccaggcaccagcaccgagcctagtgagcaggagattaaacggatcaacaagatcagaagaagacttgtgaaagacagcaacaccaagaaggccggcaagacaggccccatgaaaaccctgctggttagagtgatgacacccgatctgagagagcggctggaaaacctgagaaagaagcctgaaaatatcccccagcccatcagcaatacatctagagccaacctgaataagctgctgaccgattacaccgaaatgaagaaggcgatcctgcatgtgtactgggaagagttccagaaggaccctgtgggcctgatgagccgggtggcccagcctgccagcaagaagatcgatcagaacaagctgaaacctgagatggacgagaagggcaacctgaccaccgccggctttgcctgctctcagtgtggccagcccctgttcgtgtacaagctggagcaggtgtctgagaagggcaaggcttacaccaactacttcggacggtgcaatgtggccgagcacgaaaagctgatcctgctggcccagctgaagcccgagaaggatagcgacgaagccgtgacatatagcctgggaaagtttgggcagagggccctggatttctacagcattcatgtgaccaaggagtccacccaccccgtgaagcccctggcccagatcgccggaaacagatacgcctccggacctgtgggaaaggccctgagcgacgcatgtatgggcacaatcgcctccttcctgtctaagtaccaggacatcatcatcgaacaccagaaggtggtgaagggcaaccagaagagactggagagcctgcgggagctggccggcaaggaaaacctggaataccctagcgtgaccctgccacctcagcctcacaccaaggagggcgttgatgcctacaacgaagtgatcgcccgggtgcgaatgtgggtgaacctgaacctgtggcagaagctgaagctaagcagagatgatgccaagcctctgctgagactgaagggattcccttcctttcctctggtcgagagacaggccaacgaagtggactggtgggacatggtgtgtaacgtgaagaagctgatcaacgagaaaaaggaggatggcaaggtgttttggcagaatctggctggctacaagagacaggaagccctgagaccatacctgagcagcgaggaagatcggaagaagggaaagaaattcgctcggtaccagctgggcgacctgctgctgcacctggaaaagaagcacggcgaggactggggaaaggtgtacgacgaggcctgggagcggattgacaagaaagtggaaggcctgagcaagcacatcaagctggaagaggaacggagaagcgaggacgcccagagcaaggccgccctgaccgactggctgcgggctaaggccagcttcgtgatcgagggcctgaaggaggccgacaaggacgagttctgcagatgcgagctgaagctgcagaagtggtacggggacctgcggggaaagcccttcgccatcgaagccgagaacagcatcctggacatcagcggcttcagcaagcagtacaactgtgccttcatctggcagaaggacggcgtgaagaagctgaacctgtacctgatcatcaactacttcaagggcggcaagctgcggttcaagaagatcaaacctgaagccttcgaagccaacagattctacaccgtgatcaacaaaaagagcggcgagatcgtgcccatggaggtgaacttcaacttcgacgaccccaacctgatcatcctgcctctggcctttggcaagagacagggcagagaattcatctggaacgacctgctgtccctggaaaccggcagcctgaagctggccaacggaagagtgatcgagaagacactgtacaacagaagaacccggcaggatgagcctgccctgttcgtggccctgaccttcgagcggcgggaggtcctggactcctccaatatcaaaccaatgaacctgatcggcgtggcaagaggcgaaaacatccccgccgtgatcgccctgaccgaccccgagggctgcccactgagccggtttaaggatagcctgggaaacccaacccacatcctgagaatcggcgagagctataaggagaagcagcggaccatccaggccaagaaggaggtggagcagcggagagccggcggctacagccggaagtacgccagcaaagccaagaatctggcagacgatatggtgagaaacaccgctagagatctgctgtactacgccgtgacccaggatgccatgctgatcttcgccaacctgagccggggcttcggccggcagggcaagcggaccttcatggccgagagacagtacacacggatggaggactggctgaccgccaagctggcctacgagggcctgagcaagacctacctgtccaagacactggcccagtacacctccaagacatgcagcaactgtgggtttaccatcaccagcgccgactacgacagggtgctggagaagctgaagaagacagcaacaggctggatgaccacaattaacggcaaggagctgaaggtggagggccagattacctactacaacagatacaagagacagaacgtagtcaaggacctgtccgtcgagctggatagactgagcgaagaatctgtgaacaacgacatctcctcctggacaaagggcagaagcggagaagctctgagcctcctgaagaaaagattctcccatagacccgtgcaggagaagttcgtgtgcctgaactgcggcttcgagacacacgcagccgagcaagccgccctgaacatcgccagatcctggctgttcctgcggagccaggagtacaagaaataccagacaaacaagacaaccggcaacaccgataagagagccttcgtcgagacctggcagtccttttaccggaagaagcttaaggaggtgtggaaacctgccgtgcggtctggcggatctggcggaggctcctcaccaggacctggtgaccttcaaggacgtggccgtggacttcacccccgaggagtggggccagctggtgcccagccagaaggagctgtacagggacgtgatgctggagaactaccagaacctggtgtggctgggcctggccgtgagcaagcccgacgtgatctaccagctggagcaggtgggcggcacctgggtgcccgagggcgagaccctgaccgtgagctgcagcgacttcgtgaccaggggatctggctccggcagcggccccaagaaaaagagaaaagtctaagctgccttctgcggggcttgccttctggccatgcccttcttctctcccttgcacctgtacctcttggtctttgaataaagcctgagtaggaaggctagcaaaaaaaaaaaaaaaaaaaaaaaaaaaaaaaaaaaaaaaaaaaaaaaaaaaaaaaaaaaaaaaaaaaaaaaaaaaaaaaa

SEQ ID NO: 16706 - RNA, 9521 nt, synthetic construct
  source 1..9521: mol_type = other RNA
aggaaataagagagaaaagaagagtaagaagaaatataagagccaccatggcccctaagaagaagcgtaaagtgagccggatggaacgcctcgtctacgaggtgcggcagaagtgcagaaacatcgaggacatctgcatctcctgcggatctctgaacgtgaccctggagcacccactgttcatcggcggcatgtgccagaactgtaaaaactgttttctggagtgtgcctatcaatacgacgatgacggctaccagagctactgcaccatctgttgcggcggaagagaggtgctgatgtgtggaaataacaactgctgccggtgcttctgcgtggaatgcgtggacctgctggtgggccccggcgccgcccaggccgctattaaggaagatccttggaactgctacatgtgcggccacaagggcacatacggcctgctgagacggagagaggactggcctagcagactgcagatgttcttcgccaataaccacgaccaggagttcgacccccctaaggtgtaccctcccgtccccgccgagaagagaaagcccatccgggtcctgagcctgttcgatggcatcgccaccggtctgctggtgctgaaggacctgggcatccaggtggataggtacattgcctccgaggtgtgcgaggactccatcaccgtgggaatggtgcgtcatcagggcaagatcatgtacgtgggcgacgtgcggagcgtgacacagaagcatatccaggagtggggccctttcgacctggtgatcggcggcagcccttgcaatgacctgagcatcgtgaacccagcccggaagggcctgtacgagggaaccggcagactgttcttcgagttttacagactgctgcacgacgcccggcctaaggaaggcgacgaccggcccttcttttggctgttcgagaatgtggtggccatgggagtcagcgacaagcgggatattagccggttcctggagagcaaccccgtgatgatcgatgccaaggaagtgagcgccgcccaccgggccagatacttctggggcaatctgcctggcatgaacagacccctggccagcaccgtgaacgacaagctggagctgcaggagtgcctggagcacggccggatcgccaagttcagcaaggtgagaaccatcaccacccgaagcaacagcatcaaacaaggcaaggaccagcactttcctgtgttcatgaacgagaaggaggacatcctgtggtgtaccgagatggagagagtgttcgggttcccagtccactacacagatgtcagcaacatgtctagactggccagacagagactgctgggaagaagctggtccgtccctgtgatcagacacctgttcgcccctctgaaggagtacttcgcctgcgtgagcagcggcaacagcaacgccaacagccggggccccagcttctctagcggcctggtgccactgtccctgagagggagccacatgggccccatggagatctacaaaaccgtgagcgcctggaagcggcagcctgtgcgcgtgctgagcctgtttcggaatatcgataaagtcctgaaaagcctgggattcctggagagcggctctggctccggcggtggcaccctgaagtacgtggaggatgtgacaaacgtggtcagacgggatgtggagaagtggggccccttcgatctggtgtacggcagcacccaacccctgggcagctcttgtgaccggtgccctggctggtacatgtttcagttccaccggatcctgcagtacgccctgccgagacaggagtcccagcggccattcttttggattttcatggacaacttgctgctgaccgaggatgaccaggaaactaccactcggttcctgcagaccgaagccgtgaccctgcaggacgtgagaggccgggactaccagaacgccatgcgggtgtggtccaacatccctggactgaaaagcaagcacgcacctctgacccctaaagaagaggagtacctgcaggcccaggtgcggagcagaagcaagctggacgcccctaaggtggatctgctggtgaagaattgcctcctgcccctgagagagtacttcaagtatttcagccagaatagtctgcccctgggaggcagcggcggcggcgccctggtgacatttgaggacgtcgccgtgcggttcacccaggaggaatgggctctgctggatccttctcagaaaatcctgtaccgggacgtgatgagagagacataccggaatctgacctccgtgggcatcaactgggaatgttgggaccttgaagcctgcttcagaagcctgggaagaaacctgagagtgcaggtggtgaagagaaagtgcgagctgaccaacagcggcccctgcgccgagggcggcccaagcagcggcgcccctcctcccagcggcggcagcccagccggctccccaacctctaccgaggagggcacctctgagtccgccacccccgagagcggccctggcacctccaccgagcccagcgagggcagcgcacccggcagccctgccggcagccccacctccacagaggagggaaccagcaccgagcccagcgaaggcagcgccccaggcaccagcaccgagcctagtgagcaggagattaaacggatcaacaagatcagaagaagacttgtgaaagacagcaacaccaagaaggccggcaagacaggccccatgaaaaccctgctggttagagtgatgacacccgatctgagagagcggctggaaaacctgagaaagaagcctgaaaatatcccccagcccatcagcaatacatctagagccaacctgaataagctgctgaccgattacaccgaaatgaagaaggcgatcctgcatgtgtactgggaagagttccagaaggaccctgtgggcctgatgagccgggtggcccagcctgccagcaagaagatcgatcagaacaagctgaaacctgagatggacgagaagggcaacctgaccaccgccggctttgcctgctctcagtgtggccagcccctgttcgtgtacaagctggagcaggtgtctgagaagggcaaggcttacaccaactacttcggacggtgcaatgtggccgagcacgaaaagctgatcctgctggcccagctgaagcccgagaaggatagcgacgaagccgtgacatatagcctgggaaagtttgggcagagggccctggatttctacagcattcatgtgaccaaggagtccacccaccccgtgaagcccctggcccagatcgccggaaacagatacgcctccggacctgtgggaaaggccctgagcgacgcatgtatgggcacaatcgcctccttcctgtctaagtaccaggacatcatcatcgaacaccagaaggtggtgaagggcaaccagaagagactggagagcctgcgggagctggccggcaaggaaaacctggaataccctagcgtgaccctgccacctcagcctcacaccaaggagggcgttgatgcctacaacgaagtgatcgcccgggtgcgaatgtgggtgaacctgaacctgtggcagaagctgaagctaagcagagatgatgccaagcctctgctgagactgaagggattcccttcctttcctctggtcgagagacaggccaacgaagtggactggtgggacatggtgtgtaacgtgaagaagctgatcaacgagaaaaaggaggatggcaaggtgttttggcagaatctggctggctacaagagacaggaagccctgagaccatacctgagcagcgaggaagatcggaagaagggaaagaaattcgctcggtaccagctgggcgacctgctgctgcacctggaaaagaagcacggcgaggactggggaaaggtgtacgacgaggcctgggagcggattgacaagaaagtggaaggcctgagcaagcacatcaagctggaagaggaacggagaagcgaggacgcccagagcaaggccgccctgaccgactggctgcgggctaaggccagcttcgtgatcgagggcctgaaggaggccgacaaggacgagttctgcagatgcgagctgaagctgcagaagtggtacggggacctgcggggaaagcccttcgccatcgaagccgagaacagcatcctggacatcagcggcttcagcaagcagtacaactgtgccttcatctggcagaaggacggcgtgaagaagctgaacctgtacctgatcatcaactacttcaagggcggcaagctgcggttcaagaagatcaaacctgaagccttcgaagccaacagattctacaccgtgatcaacaaaaagagcggcgagatcgtgcccatggaggtgaacttcaacttcgacgaccccaacctgatcatcctgcctctggcctttggcaagagacagggcagagaattcatctggaacgacctgctgtccctggaaaccggcagcctgaagctggccaacggaagagtgatcgagaagacactgtacaacagaagaacccggcaggatgagcctgccctgttcgtggccctgaccttcgagcggcgggaggtcctggactcctccaatatcaaaccaatgaacctgatcggcgtggcaagaggcgaaaacatccccgccgtgatcgccctgaccgaccccgagggctgcccactgagccggtttaaggatagcctgggaaacccaacccacatcctgagaatcggcgagagctataaggagaagcagcggaccatccaggccaagaaggaggtggagcagcggagagccggcggctacagccggaagtacgccagcaaagccaagaatctggcagacgatatggtgagaaacaccgctagagatctgctgtactacgccgtgacccaggatgccatgctgatcttcgccaacctgagccggggcttcggccggcagggcaagcggaccttcatggccgagagacagtacacacggatggaggactggctgaccgccaagctggcctacgagggcctgagcaagacctacctgtccaagacactggcccagtacacctccaagacatgcagcaactgtgggtttaccatcaccagcgccgactacgacagggtgctggagaagctgaagaagacagcaacaggctggatgaccacaattaacggcaaggagctgaaggtggagggccagattacctactacaacagatacaagagacagaacgtagtcaaggacctgtccgtcgagctggatagactgagcgaagaatctgtgaacaacgacatctcctcctggacaaagggcagaagcggagaagctctgagcctcctgaagaaaagattctcccatagacccgtgcaggagaagttcgtgtgcctgaactgcggcttcgagacacacgcagccgagcaagccgccctgaacatcgccagatcctggctgttcctgcggagccaggagtacaagaaataccagacaaacaagacaaccggcaacaccgataagagagccttcgtcgagacctggcagtccttttaccggaagaagcttaaggaggtgtggaaacctgccgtgcggtctggcggatctggcggaggctccgtgaccttcgaggacgtggccgtgaacttcagcctggaggagtgggccctgctggacctgagccagaagaagctgtacagggacgtgatgcaggagaccttcaggaacctggccagcgtgggcgagaagtgggacaaccacaacatcgaggactggaacaagacccagggcaggaagctgaggagccacatggtggagaagctgagcgagagcaaggagggcggccagcacggcgagaccgccagccagatccccaacctgggcggcccaagcagcggcgcccctcctcccagcggcggcagcccagccggctccccaacctctaccgaggagggcacctctgagtccgccacccccgagagcggccctggcacctccaccgagcccagcgagggcagcgcacccggcagccctgccggcagccccacctccacagaggagggaaccagcaccgagcccagcgaaggcagcgccccaggcaccagcaccgagcctagtgagcaggagattaaacggatcaacaagatcagaagaagacttgtgaaagacagcaacaccaagaaggccggcaagacaggccccatgaaaaccctgctggttagagtgatgacacccgatctgagagagcggctggaaaacctgagaaagaagcctgaaaatatcccccagcccatcagcaatacatctagagccaacctgaataagctgctgaccgattacaccgaaatgaagaaggcgatcctgcatgtgtactgggaagagttccagaaggaccctgtgggcctgatgagccgggtggcccagcctgccagcaagaagatcgatcagaacaagctgaaacctgagatggacgagaagggcaacctgaccaccgccggctttgcctgctctcagtgtggccagcccctgttcgtgtacaagctggagcaggtgtctgagaagggcaaggcttacaccaactacttcggacggtgcaatgtggccgagcacgaaaagctgatcctgctggcccagctgaagcccgagaaggatagcgacgaagccgtgacatatagcctgggaaagtttgggcagagggccctggatttctacagcattcatgtgaccaaggagtccacccaccccgtgaagcccctggcccagatcgccggaaacagatacgcctccggacctgtgggaaaggccctgagcgacgcatgtatgggcacaatcgcctccttcctgtctaagtaccaggacatcatcatcgaacaccagaaggtggtgaagggcaaccagaagagactggagagcctgcgggagctggccggcaaggaaaacctggaataccctagcgtgaccctgccacctcagcctcacaccaaggagggcgttgatgcctacaacgaagtgatcgcccgggtgcgaatgtgggtgaacctgaacctgtggcagaagctgaagctaagcagagatgatgccaagcctctgctgagactgaagggattcccttcctttcctctggtcgagagacaggccaacgaagtggactggtgggacatggtgtgtaacgtgaagaagctgatcaacgagaaaaaggaggatggcaaggtgttttggcagaatctggctggctacaagagacaggaagccctgagaccatacctgagcagcgaggaagatcggaagaagggaaagaaattcgctcggtaccagctgggcgacctgctgctgcacctggaaaagaagcacggcgaggactggggaaaggtgtacgacgaggcctgggagcggattgacaagaaagtggaaggcctgagcaagcacatcaagctggaagaggaacggagaagcgaggacgcccagagcaaggccgccctgaccgactggctgcgggctaaggccagcttcgtgatcgagggcctgaaggaggccgacaaggacgagttctgcagatgcgagctgaagctgcagaagtggtacggggacctgcggggaaagcccttcgccatcgaagccgagaacagcatcctggacatcagcggcttcagcaagcagtacaactgtgccttcatctggcagaaggacggcgtgaagaagctgaacctgtacctgatcatcaactacttcaagggcggcaagctgcggttcaagaagatcaaacctgaagccttcgaagccaacagattctacaccgtgatcaacaaaaagagcggcgagatcgtgcccatggaggtgaacttcaacttcgacgaccccaacctgatcatcctgcctctggcctttggcaagagacagggcagagaattcatctggaacgacctgctgtccctggaaaccggcagcctgaagctggccaacggaagagtgatcgagaagacactgtacaacagaagaacccggcaggatgagcctgccctgttcgtggccctgaccttcgagcggcgggaggtcctggactcctccaatatcaaaccaatgaacctgatcggcgtggcaagaggcgaaaacatccccgccgtgatcgccctgaccgaccccgagggctgcccactgagccggtttaaggatagcctgggaaacccaacccacatcctgagaatcggcgagagctataaggagaagcagcggaccatccaggccaagaaggaggtggagcagcggagagccggcggctacagccggaagtacgccagcaaagccaagaatctggcagacgatatggtgagaaacaccgctagagatctgctgtactacgccgtgacccaggatgccatgctgatcttcgccaacctgagccggggcttcggccggcagggcaagcggaccttcatggccgagagacagtacacacggatggaggactggctgaccgccaagctggcctacgagggcctgagcaagacctacctgtccaagacactggcccagtacacctccaagacatgcagcaactgtgggtttaccatcaccagcgccgactacgacagggtgctggagaagctgaagaagacagcaacaggctggatgaccacaattaacggcaaggagctgaaggtggagggccagattacctactacaacagatacaagagacagaacgtagtcaaggacctgtccgtcgagctggatagactgagcgaagaatctgtgaacaacgacatctcctcctggacaaagggcagaagcggagaagctctgagcctcctgaagaaaagattctcccatagacccgtgcaggagaagttcgtgtgcctgaactgcggcttcgagacacacgcagccgagcaagccgccctgaacatcgccagatcctggctgttcctgcggagccaggagtacaagaaataccagacaaacaagacaaccggcaacaccgataagagagccttcgtcgagacctggcagtccttttaccggaagaagcttaaggaggtgtggaaacctgccgtgcggtctggcggatctggcggaggctcctgtgaccttcgaggacgtggccgtgaacttcagcctggaggagtgggccctgctggacctgagccagaagaagctgtacagggacgtgatgcaggagaccttcaggaacctggccagcgtgggcgagaagtgggacaaccacaacatcgaggactggaacaagacccagggcaggaagctgaggagccacatggtggagaagctgagcgagagcaaggagggcggccagcacggcgagaccgccagccagatccccaacctgggatctggctccggcagcggccccaagaaaaagagaaaagtctaagctgccttctgcggggcttgccttctggccatgcccttcttctctcccttgcacctgtacctcttggtctttgaataaagcctgagtaggaaggctagcaaaaaaaaaaaaaaaaaaaaaaaaaaaaaaaaaaaaaaaaaaaaaaaaaaaaaaaaaaaaaaaaaaaaaaaaaaaaaaaa

SEQ ID NO: 16707 - RNA, 9485 nt, synthetic construct
  source 1..9485: mol_type = other RNA
aggaaataagagagaaaagaagagtaagaagaaatataagagccaccatggcccctaagaagaagcgtaaagtgagccggatggaacgcctcgtctacgaggtgcggcagaagtgcagaaacatcgaggacatctgcatctcctgcggatctctgaacgtgaccctggagcacccactgttcatcggcggcatgtgccagaactgtaaaaactgttttctggagtgtgcctatcaatacgacgatgacggctaccagagctactgcaccatctgttgcggcggaagagaggtgctgatgtgtggaaataacaactgctgccggtgcttctgcgtggaatgcgtggacctgctggtgggccccggcgccgcccaggccgctattaaggaagatccttggaactgctacatgtgcggccacaagggcacatacggcctgctgagacggagagaggactggcctagcagactgcagatgttcttcgccaataaccacgaccaggagttcgacccccctaaggtgtaccctcccgtccccgccgagaagagaaagcccatccgggtcctgagcctgttcgatggcatcgccaccggtctgctggtgctgaaggacctgggcatccaggtggataggtacattgcctccgaggtgtgcgaggactccatcaccgtgggaatggtgcgtcatcagggcaagatcatgtacgtgggcgacgtgcggagcgtgacacagaagcatatccaggagtggggccctttcgacctggtgatcggcggcagcccttgcaatgacctgagcatcgtgaacccagcccggaagggcctgtacgagggaaccggcagactgttcttcgagttttacagactgctgcacgacgcccggcctaaggaaggcgacgaccggcccttcttttggctgttcgagaatgtggtggccatgggagtcagcgacaagcgggatattagccggttcctggagagcaaccccgtgatgatcgatgccaaggaagtgagcgccgcccaccgggccagatacttctggggcaatctgcctggcatgaacagacccctggccagcaccgtgaacgacaagctggagctgcaggagtgcctggagcacggccggatcgccaagttcagcaaggtgagaaccatcaccacccgaagcaacagcatcaaacaaggcaaggaccagcactttcctgtgttcatgaacgagaaggaggacatcctgtggtgtaccgagatggagagagtgttcgggttcccagtccactacacagatgtcagcaacatgtctagactggccagacagagactgctgggaagaagctggtccgtccctgtgatcagacacctgttcgcccctctgaaggagtacttcgcctgcgtgagcagcggcaacagcaacgccaacagccggggccccagcttctctagcggcctggtgccactgtccctgagagggagccacatgggccccatggagatctacaaaaccgtgagcgcctggaagcggcagcctgtgcgcgtgctgagcctgtttcggaatatcgataaagtcctgaaaagcctgggattcctggagagcggctctggctccggcggtggcaccctgaagtacgtggaggatgtgacaaacgtggtcagacgggatgtggagaagtggggccccttcgatctggtgtacggcagcacccaacccctgggcagctcttgtgaccggtgccctggctggtacatgtttcagttccaccggatcctgcagtacgccctgccgagacaggagtcccagcggccattcttttggattttcatggacaacttgctgctgaccgaggatgaccaggaaactaccactcggttcctgcagaccgaagccgtgaccctgcaggacgtgagaggccgggactaccagaacgccatgcgggtgtggtccaacatccctggactgaaaagcaagcacgcacctctgacccctaaagaagaggagtacctgcaggcccaggtgcggagcagaagcaagctggacgcccctaaggtggatctgctggtgaagaattgcctcctgcccctgagagagtacttcaagtatttcagccagaatagtctgcccctgggaggcagcggcggcggcgccctggtgacatttgaggacgtcgccgtgcggttcacccaggaggaatgggctctgctggatccttctcagaaaatcctgtaccgggacgtgatgagagagacataccggaatctgacctccgtgggcatcaactgggaatgttgggaccttgaagcctgcttcagaagcctgggaagaaacctgagagtgcaggtggtgaagagaaagtgcgagctgaccaacagcggcccctgcgccgagggcggcccaagcagcggcgcccctcctcccagcggcggcagcccagccggctccccaacctctaccgaggagggcacctctgagtccgccacccccgagagcggccctggcacctccaccgagcccagcgagggcagcgcacccggcagccctgccggcagccccacctccacagaggagggaaccagcaccgagcccagcgaaggcagcgccccaggcaccagcaccgagcctagtgagcaggagattaaacggatcaacaagatcagaagaagacttgtgaaagacagcaacaccaagaaggccggcaagacaggccccatgaaaaccctgctggttagagtgatgacacccgatctgagagagcggctggaaaacctgagaaagaagcctgaaaatatcccccagcccatcagcaatacatctagagccaacctgaataagctgctgaccgattacaccgaaatgaagaaggcgatcctgcatgtgtactgggaagagttccagaaggaccctgtgggcctgatgagccgggtggcccagcctgccagcaagaagatcgatcagaacaagctgaaacctgagatggacgagaagggcaacctgaccaccgccggctttgcctgctctcagtgtggccagcccctgttcgtgtacaagctggagcaggtgtctgagaagggcaaggcttacaccaactacttcggacggtgcaatgtggccgagcacgaaaagctgatcctgctggcccagctgaagcccgagaaggatagcgacgaagccgtgacatatagcctgggaaagtttgggcagagggccctggatttctacagcattcatgtgaccaaggagtccacccaccccgtgaagcccctggcccagatcgccggaaacagatacgcctccggacctgtgggaaaggccctgagcgacgcatgtatgggcacaatcgcctccttcctgtctaagtaccaggacatcatcatcgaacaccagaaggtggtgaagggcaaccagaagagactggagagcctgcgggagctggccggcaaggaaaacctggaataccctagcgtgaccctgccacctcagcctcacaccaaggagggcgttgatgcctacaacgaagtgatcgcccgggtgcgaatgtgggtgaacctgaacctgtggcagaagctgaagctaagcagagatgatgccaagcctctgctgagactgaagggattcccttcctttcctctggtcgagagacaggccaacgaagtggactggtgggacatggtgtgtaacgtgaagaagctgatcaacgagaaaaaggaggatggcaaggtgttttggcagaatctggctggctacaagagacaggaagccctgagaccatacctgagcagcgaggaagatcggaagaagggaaagaaattcgctcggtaccagctgggcgacctgctgctgcacctggaaaagaagcacggcgaggactggggaaaggtgtacgacgaggcctgggagcggattgacaagaaagtggaaggcctgagcaagcacatcaagctggaagaggaacggagaagcgaggacgcccagagcaaggccgccctgaccgactggctgcgggctaaggccagcttcgtgatcgagggcctgaaggaggccgacaaggacgagttctgcagatgcgagctgaagctgcagaagtggtacggggacctgcggggaaagcccttcgccatcgaagccgagaacagcatcctggacatcagcggcttcagcaagcagtacaactgtgccttcatctggcagaaggacggcgtgaagaagctgaacctgtacctgatcatcaactacttcaagggcggcaagctgcggttcaagaagatcaaacctgaagccttcgaagccaacagattctacaccgtgatcaacaaaaagagcggcgagatcgtgcccatggaggtgaacttcaacttcgacgaccccaacctgatcatcctgcctctggcctttggcaagagacagggcagagaattcatctggaacgacctgctgtccctggaaaccggcagcctgaagctggccaacggaagagtgatcgagaagacactgtacaacagaagaacccggcaggatgagcctgccctgttcgtggccctgaccttcgagcggcgggaggtcctggactcctccaatatcaaaccaatgaacctgatcggcgtggcaagaggcgaaaacatccccgccgtgatcgccctgaccgaccccgagggctgcccactgagccggtttaaggatagcctgggaaacccaacccacatcctgagaatcggcgagagctataaggagaagcagcggaccatccaggccaagaaggaggtggagcagcggagagccggcggctacagccggaagtacgccagcaaagccaagaatctggcagacgatatggtgagaaacaccgctagagatctgctgtactacgccgtgacccaggatgccatgctgatcttcgccaacctgagccggggcttcggccggcagggcaagcggaccttcatggccgagagacagtacacacggatggaggactggctgaccgccaagctggcctacgagggcctgagcaagacctacctgtccaagacactggcccagtacacctccaagacatgcagcaactgtgggtttaccatcaccagcgccgactacgacagggtgctggagaagctgaagaagacagcaacaggctggatgaccacaattaacggcaaggagctgaaggtggagggccagattacctactacaacagatacaagagacagaacgtagtcaaggacctgtccgtcgagctggatagactgagcgaagaatctgtgaacaacgacatctcctcctggacaaagggcagaagcggagaagctctgagcctcctgaagaaaagattctcccatagacccgtgcaggagaagttcgtgtgcctgaactgcggcttcgagacacacgcagccgagcaagccgccctgaacatcgccagatcctggctgttcctgcggagccaggagtacaagaaataccagacaaacaagacaaccggcaacaccgataagagagccttcgtcgagacctggcagtccttttaccggaagaagcttaaggaggtgtggaaacctgccgtgcggtctggcggatctggcggaggctccagccaggtgagcctgaccttcgaggacgtggccgtgctgttcaccagggacgagtggaagaagctggtgcccagccagaggagcctgtacagggaggtgatgctggagaactacagcaacctggccagcctggccggcttccccttcaccaagcccaaggtgatcagcctgctgcagcagggcgaggacccctggaaggtggaggaggagggccccggcggcttcagcctgggcctgaagtgcggcggcccaagcagcggcgcccctcctcccagcggcggcagcccagccggctccccaacctctaccgaggagggcacctctgagtccgccacccccgagagcggccctggcacctccaccgagcccagcgagggcagcgcacccggcagccctgccggcagccccacctccacagaggagggaaccagcaccgagcccagcgaaggcagcgccccaggcaccagcaccgagcctagtgagcaggagattaaacggatcaacaagatcagaagaagacttgtgaaagacagcaacaccaagaaggccggcaagacaggccccatgaaaaccctgctggttagagtgatgacacccgatctgagagagcggctggaaaacctgagaaagaagcctgaaaatatcccccagcccatcagcaatacatctagagccaacctgaataagctgctgaccgattacaccgaaatgaagaaggcgatcctgcatgtgtactgggaagagttccagaaggaccctgtgggcctgatgagccgggtggcccagcctgccagcaagaagatcgatcagaacaagctgaaacctgagatggacgagaagggcaacctgaccaccgccggctttgcctgctctcagtgtggccagcccctgttcgtgtacaagctggagcaggtgtctgagaagggcaaggcttacaccaactacttcggacggtgcaatgtggccgagcacgaaaagctgatcctgctggcccagctgaagcccgagaaggatagcgacgaagccgtgacatatagcctgggaaagtttgggcagagggccctggatttctacagcattcatgtgaccaaggagtccacccaccccgtgaagcccctggcccagatcgccggaaacagatacgcctccggacctgtgggaaaggccctgagcgacgcatgtatgggcacaatcgcctccttcctgtctaagtaccaggacatcatcatcgaacaccagaaggtggtgaagggcaaccagaagagactggagagcctgcgggagctggccggcaaggaaaacctggaataccctagcgtgaccctgccacctcagcctcacaccaaggagggcgttgatgcctacaacgaagtgatcgcccgggtgcgaatgtgggtgaacctgaacctgtggcagaagctgaagctaagcagagatgatgccaagcctctgctgagactgaagggattcccttcctttcctctggtcgagagacaggccaacgaagtggactggtgggacatggtgtgtaacgtgaagaagctgatcaacgagaaaaaggaggatggcaaggtgttttggcagaatctggctggctacaagagacaggaagccctgagaccatacctgagcagcgaggaagatcggaagaagggaaagaaattcgctcggtaccagctgggcgacctgctgctgcacctggaaaagaagcacggcgaggactggggaaaggtgtacgacgaggcctgggagcggattgacaagaaagtggaaggcctgagcaagcacatcaagctggaagaggaacggagaagcgaggacgcccagagcaaggccgccctgaccgactggctgcgggctaaggccagcttcgtgatcgagggcctgaaggaggccgacaaggacgagttctgcagatgcgagctgaagctgcagaagtggtacggggacctgcggggaaagcccttcgccatcgaagccgagaacagcatcctggacatcagcggcttcagcaagcagtacaactgtgccttcatctggcagaaggacggcgtgaagaagctgaacctgtacctgatcatcaactacttcaagggcggcaagctgcggttcaagaagatcaaacctgaagccttcgaagccaacagattctacaccgtgatcaacaaaaagagcggcgagatcgtgcccatggaggtgaacttcaacttcgacgaccccaacctgatcatcctgcctctggcctttggcaagagacagggcagagaattcatctggaacgacctgctgtccctggaaaccggcagcctgaagctggccaacggaagagtgatcgagaagacactgtacaacagaagaacccggcaggatgagcctgccctgttcgtggccctgaccttcgagcggcgggaggtcctggactcctccaatatcaaaccaatgaacctgatcggcgtggcaagaggcgaaaacatccccgccgtgatcgccctgaccgaccccgagggctgcccactgagccggtttaaggatagcctgggaaacccaacccacatcctgagaatcggcgagagctataaggagaagcagcggaccatccaggccaagaaggaggtggagcagcggagagccggcggctacagccggaagtacgccagcaaagccaagaatctggcagacgatatggtgagaaacaccgctagagatctgctgtactacgccgtgacccaggatgccatgctgatcttcgccaacctgagccggggcttcggccggcagggcaagcggaccttcatggccgagagacagtacacacggatggaggactggctgaccgccaagctggcctacgagggcctgagcaagacctacctgtccaagacactggcccagtacacctccaagacatgcagcaactgtgggtttaccatcaccagcgccgactacgacagggtgctggagaagctgaagaagacagcaacaggctggatgaccacaattaacggcaaggagctgaaggtggagggccagattacctactacaacagatacaagagacagaacgtagtcaaggacctgtccgtcgagctggatagactgagcgaagaatctgtgaacaacgacatctcctcctggacaaagggcagaagcggagaagctctgagcctcctgaagaaaagattctcccatagacccgtgcaggagaagttcgtgtgcctgaactgcggcttcgagacacacgcagccgagcaagccgccctgaacatcgccagatcctggctgttcctgcggagccaggagtacaagaaataccagacaaacaagacaaccggcaacaccgataagagagccttcgtcgagacctggcagtccttttaccggaagaagcttaaggaggtgtggaaacctgccgtgcggtctggcggatctggcggaggctcctagccaggtgagcctgaccttcgaggacgtggccgtgctgttcaccagggacgagtggaagaagctggtgcccagccagaggagcctgtacagggaggtgatgctggagaactacagcaacctggccagcctggccggcttccccttcaccaagcccaaggtgatcagcctgctgcagcagggcgaggacccctggaaggtggaggaggagggccccggcggcttcagcctgggcctgaagtgcggatctggctccggcagcggccccaagaaaaagagaaaagtctaagctgccttctgcggggcttgccttctggccatgcccttcttctctcccttgcacctgtacctcttggtctttgaataaagcctgagtaggaaggctagcaaaaaaaaaaaaaaaaaaaaaaaaaaaaaaaaaaaaaaaaaaaaaaaaaaaaaaaaaaaaaaaaaaaaaaaaaaaaaaaa

SEQ ID NO: 16708 - RNA, 9485 nt, synthetic construct
  source 1..9485: mol_type = other RNA
aggaaataagagagaaaagaagagtaagaagaaatataagagccaccatggcccctaagaagaagcgtaaagtgagccggatggaacgcctcgtctacgaggtgcggcagaagtgcagaaacatcgaggacatctgcatctcctgcggatctctgaacgtgaccctggagcacccactgttcatcggcggcatgtgccagaactgtaaaaactgttttctggagtgtgcctatcaatacgacgatgacggctaccagagctactgcaccatctgttgcggcggaagagaggtgctgatgtgtggaaataacaactgctgccggtgcttctgcgtggaatgcgtggacctgctggtgggccccggcgccgcccaggccgctattaaggaagatccttggaactgctacatgtgcggccacaagggcacatacggcctgctgagacggagagaggactggcctagcagactgcagatgttcttcgccaataaccacgaccaggagttcgacccccctaaggtgtaccctcccgtccccgccgagaagagaaagcccatccgggtcctgagcctgttcgatggcatcgccaccggtctgctggtgctgaaggacctgggcatccaggtggataggtacattgcctccgaggtgtgcgaggactccatcaccgtgggaatggtgcgtcatcagggcaagatcatgtacgtgggcgacgtgcggagcgtgacacagaagcatatccaggagtggggccctttcgacctggtgatcggcggcagcccttgcaatgacctgagcatcgtgaacccagcccggaagggcctgtacgagggaaccggcagactgttcttcgagttttacagactgctgcacgacgcccggcctaaggaaggcgacgaccggcccttcttttggctgttcgagaatgtggtggccatgggagtcagcgacaagcgggatattagccggttcctggagagcaaccccgtgatgatcgatgccaaggaagtgagcgccgcccaccgggccagatacttctggggcaatctgcctggcatgaacagacccctggccagcaccgtgaacgacaagctggagctgcaggagtgcctggagcacggccggatcgccaagttcagcaaggtgagaaccatcaccacccgaagcaacagcatcaaacaaggcaaggaccagcactttcctgtgttcatgaacgagaaggaggacatcctgtggtgtaccgagatggagagagtgttcgggttcccagtccactacacagatgtcagcaacatgtctagactggccagacagagactgctgggaagaagctggtccgtccctgtgatcagacacctgttcgcccctctgaaggagtacttcgcctgcgtgagcagcggcaacagcaacgccaacagccggggccccagcttctctagcggcctggtgccactgtccctgagagggagccacatgggccccatggagatctacaaaaccgtgagcgcctggaagcggcagcctgtgcgcgtgctgagcctgtttcggaatatcgataaagtcctgaaaagcctgggattcctggagagcggctctggctccggcggtggcaccctgaagtacgtggaggatgtgacaaacgtggtcagacgggatgtggagaagtggggccccttcgatctggtgtacggcagcacccaacccctgggcagctcttgtgaccggtgccctggctggtacatgtttcagttccaccggatcctgcagtacgccctgccgagacaggagtcccagcggccattcttttggattttcatggacaacttgctgctgaccgaggatgaccaggaaactaccactcggttcctgcagaccgaagccgtgaccctgcaggacgtgagaggccgggactaccagaacgccatgcgggtgtggtccaacatccctggactgaaaagcaagcacgcacctctgacccctaaagaagaggagtacctgcaggcccaggtgcggagcagaagcaagctggacgcccctaaggtggatctgctggtgaagaattgcctcctgcccctgagagagtacttcaagtatttcagccagaatagtctgcccctgggaggcagcggcggcggcgccctggtgacatttgaggacgtcgccgtgcggttcacccaggaggaatgggctctgctggatccttctcagaaaatcctgtaccgggacgtgatgagagagacataccggaatctgacctccgtgggcatcaactgggaatgttgggaccttgaagcctgcttcagaagcctgggaagaaacctgagagtgcaggtggtgaagagaaagtgcgagctgaccaacagcggcccctgcgccgagggcggcccaagcagcggcgcccctcctcccagcggcggcagcccagccggctccccaacctctaccgaggagggcacctctgagtccgccacccccgagagcggccctggcacctccaccgagcccagcgagggcagcgcacccggcagccctgccggcagccccacctccacagaggagggaaccagcaccgagcccagcgaaggcagcgccccaggcaccagcaccgagcctagtgagcaggagattaaacggatcaacaagatcagaagaagacttgtgaaagacagcaacaccaagaaggccggcaagacaggccccatgaaaaccctgctggttagagtgatgacacccgatctgagagagcggctggaaaacctgagaaagaagcctgaaaatatcccccagcccatcagcaatacatctagagccaacctgaataagctgctgaccgattacaccgaaatgaagaaggcgatcctgcatgtgtactgggaagagttccagaaggaccctgtgggcctgatgagccgggtggcccagcctgccagcaagaagatcgatcagaacaagctgaaacctgagatggacgagaagggcaacctgaccaccgccggctttgcctgctctcagtgtggccagcccctgttcgtgtacaagctggagcaggtgtctgagaagggcaaggcttacaccaactacttcggacggtgcaatgtggccgagcacgaaaagctgatcctgctggcccagctgaagcccgagaaggatagcgacgaagccgtgacatatagcctgggaaagtttgggcagagggccctggatttctacagcattcatgtgaccaaggagtccacccaccccgtgaagcccctggcccagatcgccggaaacagatacgcctccggacctgtgggaaaggccctgagcgacgcatgtatgggcacaatcgcctccttcctgtctaagtaccaggacatcatcatcgaacaccagaaggtggtgaagggcaaccagaagagactggagagcctgcgggagctggccggcaaggaaaacctggaataccctagcgtgaccctgccacctcagcctcacaccaaggagggcgttgatgcctacaacgaagtgatcgcccgggtgcgaatgtgggtgaacctgaacctgtggcagaagctgaagctaagcagagatgatgccaagcctctgctgagactgaagggattcccttcctttcctctggtcgagagacaggccaacgaagtggactggtgggacatggtgtgtaacgtgaagaagctgatcaacgagaaaaaggaggatggcaaggtgttttggcagaatctggctggctacaagagacaggaagccctgagaccatacctgagcagcgaggaagatcggaagaagggaaagaaattcgctcggtaccagctgggcgacctgctgctgcacctggaaaagaagcacggcgaggactggggaaaggtgtacgacgaggcctgggagcggattgacaagaaagtggaaggcctgagcaagcacatcaagctggaagaggaacggagaagcgaggacgcccagagcaaggccgccctgaccgactggctgcgggctaaggccagcttcgtgatcgagggcctgaaggaggccgacaaggacgagttctgcagatgcgagctgaagctgcagaagtggtacggggacctgcggggaaagcccttcgccatcgaagccgagaacagcatcctggacatcagcggcttcagcaagcagtacaactgtgccttcatctggcagaaggacggcgtgaagaagctgaacctgtacctgatcatcaactacttcaagggcggcaagctgcggttcaagaagatcaaacctgaagccttcgaagccaacagattctacaccgtgatcaacaaaaagagcggcgagatcgtgcccatggaggtgaacttcaacttcgacgaccccaacctgatcatcctgcctctggcctttggcaagagacagggcagagaattcatctggaacgacctgctgtccctggaaaccggcagcctgaagctggccaacggaagagtgatcgagaagacactgtacaacagaagaacccggcaggatgagcctgccctgttcgtggccctgaccttcgagcggcgggaggtcctggactcctccaatatcaaaccaatgaacctgatcggcgtggcaagaggcgaaaacatccccgccgtgatcgccctgaccgaccccgagggctgcccactgagccggtttaaggatagcctgggaaacccaacccacatcctgagaatcggcgagagctataaggagaagcagcggaccatccaggccaagaaggaggtggagcagcggagagccggcggctacagccggaagtacgccagcaaagccaagaatctggcagacgatatggtgagaaacaccgctagagatctgctgtactacgccgtgacccaggatgccatgctgatcttcgccaacctgagccggggcttcggccggcagggcaagcggaccttcatggccgagagacagtacacacggatggaggactggctgaccgccaagctggcctacgagggcctgagcaagacctacctgtccaagacactggcccagtacacctccaagacatgcagcaactgtgggtttaccatcaccagcgccgactacgacagggtgctggagaagctgaagaagacagcaacaggctggatgaccacaattaacggcaaggagctgaaggtggagggccagattacctactacaacagatacaagagacagaacgtagtcaaggacctgtccgtcgagctggatagactgagcgaagaatctgtgaacaacgacatctcctcctggacaaagggcagaagcggagaagctctgagcctcctgaagaaaagattctcccatagacccgtgcaggagaagttcgtgtgcctgaactgcggcttcgagacacacgcagccgagcaagccgccctgaacatcgccagatcctggctgttcctgcggagccaggagtacaagaaataccagacaaacaagacaaccggcaacaccgataagagagccttcgtcgagacctggcagtccttttaccggaagaagcttaaggaggtgtggaaacctgccgtgcggtctggcggatctggcggaggctccccccaggagcccgtgaccttcgccgacgtggccgtgctgttcacccccgaggagtggctgttcctggacagcgcccagaagagcctgtacagggacgtgatgctggagaactacaggaacctggccagcgtgggcgaccagctgtgcaagaccaggatgagcagccacatggagcagagggaggagctgtgcgtgaccgagaggggcgtgttccccggcgcccagctgggcccccacctgcagggcggcccaagcagcggcgcccctcctcccagcggcggcagcccagccggctccccaacctctaccgaggagggcacctctgagtccgccacccccgagagcggccctggcacctccaccgagcccagcgagggcagcgcacccggcagccctgccggcagccccacctccacagaggagggaaccagcaccgagcccagcgaaggcagcgccccaggcaccagcaccgagcctagtgagcaggagattaaacggatcaacaagatcagaagaagacttgtgaaagacagcaacaccaagaaggccggcaagacaggccccatgaaaaccctgctggttagagtgatgacacccgatctgagagagcggctggaaaacctgagaaagaagcctgaaaatatcccccagcccatcagcaatacatctagagccaacctgaataagctgctgaccgattacaccgaaatgaagaaggcgatcctgcatgtgtactgggaagagttccagaaggaccctgtgggcctgatgagccgggtggcccagcctgccagcaagaagatcgatcagaacaagctgaaacctgagatggacgagaagggcaacctgaccaccgccggctttgcctgctctcagtgtggccagcccctgttcgtgtacaagctggagcaggtgtctgagaagggcaaggcttacaccaactacttcggacggtgcaatgtggccgagcacgaaaagctgatcctgctggcccagctgaagcccgagaaggatagcgacgaagccgtgacatatagcctgggaaagtttgggcagagggccctggatttctacagcattcatgtgaccaaggagtccacccaccccgtgaagcccctggcccagatcgccggaaacagatacgcctccggacctgtgggaaaggccctgagcgacgcatgtatgggcacaatcgcctccttcctgtctaagtaccaggacatcatcatcgaacaccagaaggtggtgaagggcaaccagaagagactggagagcctgcgggagctggccggcaaggaaaacctggaataccctagcgtgaccctgccacctcagcctcacaccaaggagggcgttgatgcctacaacgaagtgatcgcccgggtgcgaatgtgggtgaacctgaacctgtggcagaagctgaagctaagcagagatgatgccaagcctctgctgagactgaagggattcccttcctttcctctggtcgagagacaggccaacgaagtggactggtgggacatggtgtgtaacgtgaagaagctgatcaacgagaaaaaggaggatggcaaggtgttttggcagaatctggctggctacaagagacaggaagccctgagaccatacctgagcagcgaggaagatcggaagaagggaaagaaattcgctcggtaccagctgggcgacctgctgctgcacctggaaaagaagcacggcgaggactggggaaaggtgtacgacgaggcctgggagcggattgacaagaaagtggaaggcctgagcaagcacatcaagctggaagaggaacggagaagcgaggacgcccagagcaaggccgccctgaccgactggctgcgggctaaggccagcttcgtgatcgagggcctgaaggaggccgacaaggacgagttctgcagatgcgagctgaagctgcagaagtggtacggggacctgcggggaaagcccttcgccatcgaagccgagaacagcatcctggacatcagcggcttcagcaagcagtacaactgtgccttcatctggcagaaggacggcgtgaagaagctgaacctgtacctgatcatcaactacttcaagggcggcaagctgcggttcaagaagatcaaacctgaagccttcgaagccaacagattctacaccgtgatcaacaaaaagagcggcgagatcgtgcccatggaggtgaacttcaacttcgacgaccccaacctgatcatcctgcctctggcctttggcaagagacagggcagagaattcatctggaacgacctgctgtccctggaaaccggcagcctgaagctggccaacggaagagtgatcgagaagacactgtacaacagaagaacccggcaggatgagcctgccctgttcgtggccctgaccttcgagcggcgggaggtcctggactcctccaatatcaaaccaatgaacctgatcggcgtggcaagaggcgaaaacatccccgccgtgatcgccctgaccgaccccgagggctgcccactgagccggtttaaggatagcctgggaaacccaacccacatcctgagaatcggcgagagctataaggagaagcagcggaccatccaggccaagaaggaggtggagcagcggagagccggcggctacagccggaagtacgccagcaaagccaagaatctggcagacgatatggtgagaaacaccgctagagatctgctgtactacgccgtgacccaggatgccatgctgatcttcgccaacctgagccggggcttcggccggcagggcaagcggaccttcatggccgagagacagtacacacggatggaggactggctgaccgccaagctggcctacgagggcctgagcaagacctacctgtccaagacactggcccagtacacctccaagacatgcagcaactgtgggtttaccatcaccagcgccgactacgacagggtgctggagaagctgaagaagacagcaacaggctggatgaccacaattaacggcaaggagctgaaggtggagggccagattacctactacaacagatacaagagacagaacgtagtcaaggacctgtccgtcgagctggatagactgagcgaagaatctgtgaacaacgacatctcctcctggacaaagggcagaagcggagaagctctgagcctcctgaagaaaagattctcccatagacccgtgcaggagaagttcgtgtgcctgaactgcggcttcgagacacacgcagccgagcaagccgccctgaacatcgccagatcctggctgttcctgcggagccaggagtacaagaaataccagacaaacaagacaaccggcaacaccgataagagagccttcgtcgagacctggcagtccttttaccggaagaagcttaaggaggtgtggaaacctgccgtgcggtctggcggatctggcggaggctcctccccaggagcccgtgaccttcgccgacgtggccgtgctgttcacccccgaggagtggctgttcctggacagcgcccagaagagcctgtacagggacgtgatgctggagaactacaggaacctggccagcgtgggcgaccagctgtgcaagaccaggatgagcagccacatggagcagagggaggagctgtgcgtgaccgagaggggcgtgttccccggcgcccagctgggcccccacctgcagggatctggctccggcagcggccccaagaaaaagagaaaagtctaagctgccttctgcggggcttgccttctggccatgcccttcttctctcccttgcacctgtacctcttggtctttgaataaagcctgagtaggaaggctagcaaaaaaaaaaaaaaaaaaaaaaaaaaaaaaaaaaaaaaaaaaaaaaaaaaaaaaaaaaaaaaaaaaaaaaaaaaaaaaaa

SEQ ID NO: 16709 - RNA, 9485 nt, synthetic construct
  source 1..9485: mol_type = other RNA
aggaaataagagagaaaagaagagtaagaagaaatataagagccaccatggcccctaagaagaagcgtaaagtgagccggatggaacgcctcgtctacgaggtgcggcagaagtgcagaaacatcgaggacatctgcatctcctgcggatctctgaacgtgaccctggagcacccactgttcatcggcggcatgtgccagaactgtaaaaactgttttctggagtgtgcctatcaatacgacgatgacggctaccagagctactgcaccatctgttgcggcggaagagaggtgctgatgtgtggaaataacaactgctgccggtgcttctgcgtggaatgcgtggacctgctggtgggccccggcgccgcccaggccgctattaaggaagatccttggaactgctacatgtgcggccacaagggcacatacggcctgctgagacggagagaggactggcctagcagactgcagatgttcttcgccaataaccacgaccaggagttcgacccccctaaggtgtaccctcccgtccccgccgagaagagaaagcccatccgggtcctgagcctgttcgatggcatcgccaccggtctgctggtgctgaaggacctgggcatccaggtggataggtacattgcctccgaggtgtgcgaggactccatcaccgtgggaatggtgcgtcatcagggcaagatcatgtacgtgggcgacgtgcggagcgtgacacagaagcatatccaggagtggggccctttcgacctggtgatcggcggcagcccttgcaatgacctgagcatcgtgaacccagcccggaagggcctgtacgagggaaccggcagactgttcttcgagttttacagactgctgcacgacgcccggcctaaggaaggcgacgaccggcccttcttttggctgttcgagaatgtggtggccatgggagtcagcgacaagcgggatattagccggttcctggagagcaaccccgtgatgatcgatgccaaggaagtgagcgccgcccaccgggccagatacttctggggcaatctgcctggcatgaacagacccctggccagcaccgtgaacgacaagctggagctgcaggagtgcctggagcacggccggatcgccaagttcagcaaggtgagaaccatcaccacccgaagcaacagcatcaaacaaggcaaggaccagcactttcctgtgttcatgaacgagaaggaggacatcctgtggtgtaccgagatggagagagtgttcgggttcccagtccactacacagatgtcagcaacatgtctagactggccagacagagactgctgggaagaagctggtccgtccctgtgatcagacacctgttcgcccctctgaaggagtacttcgcctgcgtgagcagcggcaacagcaacgccaacagccggggccccagcttctctagcggcctggtgccactgtccctgagagggagccacatgggccccatggagatctacaaaaccgtgagcgcctggaagcggcagcctgtgcgcgtgctgagcctgtttcggaatatcgataaagtcctgaaaagcctgggattcctggagagcggctctggctccggcggtggcaccctgaagtacgtggaggatgtgacaaacgtggtcagacgggatgtggagaagtggggccccttcgatctggtgtacggcagcacccaacccctgggcagctcttgtgaccggtgccctggctggtacatgtttcagttccaccggatcctgcagtacgccctgccgagacaggagtcccagcggccattcttttggattttcatggacaacttgctgctgaccgaggatgaccaggaaactaccactcggttcctgcagaccgaagccgtgaccctgcaggacgtgagaggccgggactaccagaacgccatgcgggtgtggtccaacatccctggactgaaaagcaagcacgcacctctgacccctaaagaagaggagtacctgcaggcccaggtgcggagcagaagcaagctggacgcccctaaggtggatctgctggtgaagaattgcctcctgcccctgagagagtacttcaagtatttcagccagaatagtctgcccctgggaggcagcggcggcggcgccctggtgacatttgaggacgtcgccgtgcggttcacccaggaggaatgggctctgctggatccttctcagaaaatcctgtaccgggacgtgatgagagagacataccggaatctgacctccgtgggcatcaactgggaatgttgggaccttgaagcctgcttcagaagcctgggaagaaacctgagagtgcaggtggtgaagagaaagtgcgagctgaccaacagcggcccctgcgccgagggcggcccaagcagcggcgcccctcctcccagcggcggcagcccagccggctccccaacctctaccgaggagggcacctctgagtccgccacccccgagagcggccctggcacctccaccgagcccagcgagggcagcgcacccggcagccctgccggcagccccacctccacagaggagggaaccagcaccgagcccagcgaaggcagcgccccaggcaccagcaccgagcctagtgagcaggagattaaacggatcaacaagatcagaagaagacttgtgaaagacagcaacaccaagaaggccggcaagacaggccccatgaaaaccctgctggttagagtgatgacacccgatctgagagagcggctggaaaacctgagaaagaagcctgaaaatatcccccagcccatcagcaatacatctagagccaacctgaataagctgctgaccgattacaccgaaatgaagaaggcgatcctgcatgtgtactgggaagagttccagaaggaccctgtgggcctgatgagccgggtggcccagcctgccagcaagaagatcgatcagaacaagctgaaacctgagatggacgagaagggcaacctgaccaccgccggctttgcctgctctcagtgtggccagcccctgttcgtgtacaagctggagcaggtgtctgagaagggcaaggcttacaccaactacttcggacggtgcaatgtggccgagcacgaaaagctgatcctgctggcccagctgaagcccgagaaggatagcgacgaagccgtgacatatagcctgggaaagtttgggcagagggccctggatttctacagcattcatgtgaccaaggagtccacccaccccgtgaagcccctggcccagatcgccggaaacagatacgcctccggacctgtgggaaaggccctgagcgacgcatgtatgggcacaatcgcctccttcctgtctaagtaccaggacatcatcatcgaacaccagaaggtggtgaagggcaaccagaagagactggagagcctgcgggagctggccggcaaggaaaacctggaataccctagcgtgaccctgccacctcagcctcacaccaaggagggcgttgatgcctacaacgaagtgatcgcccgggtgcgaatgtgggtgaacctgaacctgtggcagaagctgaagctaagcagagatgatgccaagcctctgctgagactgaagggattcccttcctttcctctggtcgagagacaggccaacgaagtggactggtgggacatggtgtgtaacgtgaagaagctgatcaacgagaaaaaggaggatggcaaggtgttttggcagaatctggctggctacaagagacaggaagccctgagaccatacctgagcagcgaggaagatcggaagaagggaaagaaattcgctcggtaccagctgggcgacctgctgctgcacctggaaaagaagcacggcgaggactggggaaaggtgtacgacgaggcctgggagcggattgacaagaaagtggaaggcctgagcaagcacatcaagctggaagaggaacggagaagcgaggacgcccagagcaaggccgccctgaccgactggctgcgggctaaggccagcttcgtgatcgagggcctgaaggaggccgacaaggacgagttctgcagatgcgagctgaagctgcagaagtggtacggggacctgcggggaaagcccttcgccatcgaagccgagaacagcatcctggacatcagcggcttcagcaagcagtacaactgtgccttcatctggcagaaggacggcgtgaagaagctgaacctgtacctgatcatcaactacttcaagggcggcaagctgcggttcaagaagatcaaacctgaagccttcgaagccaacagattctacaccgtgatcaacaaaaagagcggcgagatcgtgcccatggaggtgaacttcaacttcgacgaccccaacctgatcatcctgcctctggcctttggcaagagacagggcagagaattcatctggaacgacctgctgtccctggaaaccggcagcctgaagctggccaacggaagagtgatcgagaagacactgtacaacagaagaacccggcaggatgagcctgccctgttcgtggccctgaccttcgagcggcgggaggtcctggactcctccaatatcaaaccaatgaacctgatcggcgtggcaagaggcgaaaacatccccgccgtgatcgccctgaccgaccccgagggctgcccactgagccggtttaaggatagcctgggaaacccaacccacatcctgagaatcggcgagagctataaggagaagcagcggaccatccaggccaagaaggaggtggagcagcggagagccggcggctacagccggaagtacgccagcaaagccaagaatctggcagacgatatggtgagaaacaccgctagagatctgctgtactacgccgtgacccaggatgccatgctgatcttcgccaacctgagccggggcttcggccggcagggcaagcggaccttcatggccgagagacagtacacacggatggaggactggctgaccgccaagctggcctacgagggcctgagcaagacctacctgtccaagacactggcccagtacacctccaagacatgcagcaactgtgggtttaccatcaccagcgccgactacgacagggtgctggagaagctgaagaagacagcaacaggctggatgaccacaattaacggcaaggagctgaaggtggagggccagattacctactacaacagatacaagagacagaacgtagtcaaggacctgtccgtcgagctggatagactgagcgaagaatctgtgaacaacgacatctcctcctggacaaagggcagaagcggagaagctctgagcctcctgaagaaaagattctcccatagacccgtgcaggagaagttcgtgtgcctgaactgcggcttcgagacacacgcagccgagcaagccgccctgaacatcgccagatcctggctgttcctgcggagccaggagtacaagaaataccagacaaacaagacaaccggcaacaccgataagagagccttcgtcgagacctggcagtccttttaccggaagaagcttaaggaggtgtggaaacctgccgtgcggtctggcggatctggcggaggctcccaggaccccagcgccgagaggctgatggaggaggtgcccgtggtgttcgaggagctgcccgtggtgttcgaggacgtggccgtgtacttcaccagggaggagtggggcatgctggacaagaggcagaaggagctgtacagggacgtgatgaggatgaactacgagctgctggccagcctgggccccgccgccgccaagcccgacctgatcagcaagctggagaggagggccgccccctggatcggcggcccaagcagcggcgcccctcctcccagcggcggcagcccagccggctccccaacctctaccgaggagggcacctctgagtccgccacccccgagagcggccctggcacctccaccgagcccagcgagggcagcgcacccggcagccctgccggcagccccacctccacagaggagggaaccagcaccgagcccagcgaaggcagcgccccaggcaccagcaccgagcctagtgagcaggagattaaacggatcaacaagatcagaagaagacttgtgaaagacagcaacaccaagaaggccggcaagacaggccccatgaaaaccctgctggttagagtgatgacacccgatctgagagagcggctggaaaacctgagaaagaagcctgaaaatatcccccagcccatcagcaatacatctagagccaacctgaataagctgctgaccgattacaccgaaatgaagaaggcgatcctgcatgtgtactgggaagagttccagaaggaccctgtgggcctgatgagccgggtggcccagcctgccagcaagaagatcgatcagaacaagctgaaacctgagatggacgagaagggcaacctgaccaccgccggctttgcctgctctcagtgtggccagcccctgttcgtgtacaagctggagcaggtgtctgagaagggcaaggcttacaccaactacttcggacggtgcaatgtggccgagcacgaaaagctgatcctgctggcccagctgaagcccgagaaggatagcgacgaagccgtgacatatagcctgggaaagtttgggcagagggccctggatttctacagcattcatgtgaccaaggagtccacccaccccgtgaagcccctggcccagatcgccggaaacagatacgcctccggacctgtgggaaaggccctgagcgacgcatgtatgggcacaatcgcctccttcctgtctaagtaccaggacatcatcatcgaacaccagaaggtggtgaagggcaaccagaagagactggagagcctgcgggagctggccggcaaggaaaacctggaataccctagcgtgaccctgccacctcagcctcacaccaaggagggcgttgatgcctacaacgaagtgatcgcccgggtgcgaatgtgggtgaacctgaacctgtggcagaagctgaagctaagcagagatgatgccaagcctctgctgagactgaagggattcccttcctttcctctggtcgagagacaggccaacgaagtggactggtgggacatggtgtgtaacgtgaagaagctgatcaacgagaaaaaggaggatggcaaggtgttttggcagaatctggctggctacaagagacaggaagccctgagaccatacctgagcagcgaggaagatcggaagaagggaaagaaattcgctcggtaccagctgggcgacctgctgctgcacctggaaaagaagcacggcgaggactggggaaaggtgtacgacgaggcctgggagcggattgacaagaaagtggaaggcctgagcaagcacatcaagctggaagaggaacggagaagcgaggacgcccagagcaaggccgccctgaccgactggctgcgggctaaggccagcttcgtgatcgagggcctgaaggaggccgacaaggacgagttctgcagatgcgagctgaagctgcagaagtggtacggggacctgcggggaaagcccttcgccatcgaagccgagaacagcatcctggacatcagcggcttcagcaagcagtacaactgtgccttcatctggcagaaggacggcgtgaagaagctgaacctgtacctgatcatcaactacttcaagggcggcaagctgcggttcaagaagatcaaacctgaagccttcgaagccaacagattctacaccgtgatcaacaaaaagagcggcgagatcgtgcccatggaggtgaacttcaacttcgacgaccccaacctgatcatcctgcctctggcctttggcaagagacagggcagagaattcatctggaacgacctgctgtccctggaaaccggcagcctgaagctggccaacggaagagtgatcgagaagacactgtacaacagaagaacccggcaggatgagcctgccctgttcgtggccctgaccttcgagcggcgggaggtcctggactcctccaatatcaaaccaatgaacctgatcggcgtggcaagaggcgaaaacatccccgccgtgatcgccctgaccgaccccgagggctgcccactgagccggtttaaggatagcctgggaaacccaacccacatcctgagaatcggcgagagctataaggagaagcagcggaccatccaggccaagaaggaggtggagcagcggagagccggcggctacagccggaagtacgccagcaaagccaagaatctggcagacgatatggtgagaaacaccgctagagatctgctgtactacgccgtgacccaggatgccatgctgatcttcgccaacctgagccggggcttcggccggcagggcaagcggaccttcatggccgagagacagtacacacggatggaggactggctgaccgccaagctggcctacgagggcctgagcaagacctacctgtccaagacactggcccagtacacctccaagacatgcagcaactgtgggtttaccatcaccagcgccgactacgacagggtgctggagaagctgaagaagacagcaacaggctggatgaccacaattaacggcaaggagctgaaggtggagggccagattacctactacaacagatacaagagacagaacgtagtcaaggacctgtccgtcgagctggatagactgagcgaagaatctgtgaacaacgacatctcctcctggacaaagggcagaagcggagaagctctgagcctcctgaagaaaagattctcccatagacccgtgcaggagaagttcgtgtgcctgaactgcggcttcgagacacacgcagccgagcaagccgccctgaacatcgccagatcctggctgttcctgcggagccaggagtacaagaaataccagacaaacaagacaaccggcaacaccgataagagagccttcgtcgagacctggcagtccttttaccggaagaagcttaaggaggtgtggaaacctgccgtgcggtctggcggatctggcggaggctcctcaggaccccagcgccgagaggctgatggaggaggtgcccgtggtgttcgaggagctgcccgtggtgttcgaggacgtggccgtgtacttcaccagggaggagtggggcatgctggacaagaggcagaaggagctgtacagggacgtgatgaggatgaactacgagctgctggccagcctgggccccgccgccgccaagcccgacctgatcagcaagctggagaggagggccgccccctggatcggatctggctccggcagcggccccaagaaaaagagaaaagtctaagctgccttctgcggggcttgccttctggccatgcccttcttctctcccttgcacctgtacctcttggtctttgaataaagcctgagtaggaaggctagcaaaaaaaaaaaaaaaaaaaaaaaaaaaaaaaaaaaaaaaaaaaaaaaaaaaaaaaaaaaaaaaaaaaaaaaaaaaaaaaa

SEQ ID NO: 16710 - RNA, 9485 nt, synthetic construct
  source 1..9485: mol_type = other RNA
aggaaataagagagaaaagaagagtaagaagaaatataagagccaccatggcccctaagaagaagcgtaaagtgagccggatggaacgcctcgtctacgaggtgcggcagaagtgcagaaacatcgaggacatctgcatctcctgcggatctctgaacgtgaccctggagcacccactgttcatcggcggcatgtgccagaactgtaaaaactgttttctggagtgtgcctatcaatacgacgatgacggctaccagagctactgcaccatctgttgcggcggaagagaggtgctgatgtgtggaaataacaactgctgccggtgcttctgcgtggaatgcgtggacctgctggtgggccccggcgccgcccaggccgctattaaggaagatccttggaactgctacatgtgcggccacaagggcacatacggcctgctgagacggagagaggactggcctagcagactgcagatgttcttcgccaataaccacgaccaggagttcgacccccctaaggtgtaccctcccgtccccgccgagaagagaaagcccatccgggtcctgagcctgttcgatggcatcgccaccggtctgctggtgctgaaggacctgggcatccaggtggataggtacattgcctccgaggtgtgcgaggactccatcaccgtgggaatggtgcgtcatcagggcaagatcatgtacgtgggcgacgtgcggagcgtgacacagaagcatatccaggagtggggccctttcgacctggtgatcggcggcagcccttgcaatgacctgagcatcgtgaacccagcccggaagggcctgtacgagggaaccggcagactgttcttcgagttttacagactgctgcacgacgcccggcctaaggaaggcgacgaccggcccttcttttggctgttcgagaatgtggtggccatgggagtcagcgacaagcgggatattagccggttcctggagagcaaccccgtgatgatcgatgccaaggaagtgagcgccgcccaccgggccagatacttctggggcaatctgcctggcatgaacagacccctggccagcaccgtgaacgacaagctggagctgcaggagtgcctggagcacggccggatcgccaagttcagcaaggtgagaaccatcaccacccgaagcaacagcatcaaacaaggcaaggaccagcactttcctgtgttcatgaacgagaaggaggacatcctgtggtgtaccgagatggagagagtgttcgggttcccagtccactacacagatgtcagcaacatgtctagactggccagacagagactgctgggaagaagctggtccgtccctgtgatcagacacctgttcgcccctctgaaggagtacttcgcctgcgtgagcagcggcaacagcaacgccaacagccggggccccagcttctctagcggcctggtgccactgtccctgagagggagccacatgggccccatggagatctacaaaaccgtgagcgcctggaagcggcagcctgtgcgcgtgctgagcctgtttcggaatatcgataaagtcctgaaaagcctgggattcctggagagcggctctggctccggcggtggcaccctgaagtacgtggaggatgtgacaaacgtggtcagacgggatgtggagaagtggggccccttcgatctggtgtacggcagcacccaacccctgggcagctcttgtgaccggtgccctggctggtacatgtttcagttccaccggatcctgcagtacgccctgccgagacaggagtcccagcggccattcttttggattttcatggacaacttgctgctgaccgaggatgaccaggaaactaccactcggttcctgcagaccgaagccgtgaccctgcaggacgtgagaggccgggactaccagaacgccatgcgggtgtggtccaacatccctggactgaaaagcaagcacgcacctctgacccctaaagaagaggagtacctgcaggcccaggtgcggagcagaagcaagctggacgcccctaaggtggatctgctggtgaagaattgcctcctgcccctgagagagtacttcaagtatttcagccagaatagtctgcccctgggaggcagcggcggcggcgccctggtgacatttgaggacgtcgccgtgcggttcacccaggaggaatgggctctgctggatccttctcagaaaatcctgtaccgggacgtgatgagagagacataccggaatctgacctccgtgggcatcaactgggaatgttgggaccttgaagcctgcttcagaagcctgggaagaaacctgagagtgcaggtggtgaagagaaagtgcgagctgaccaacagcggcccctgcgccgagggcggcccaagcagcggcgcccctcctcccagcggcggcagcccagccggctccccaacctctaccgaggagggcacctctgagtccgccacccccgagagcggccctggcacctccaccgagcccagcgagggcagcgcacccggcagccctgccggcagccccacctccacagaggagggaaccagcaccgagcccagcgaaggcagcgccccaggcaccagcaccgagcctagtgagcaggagattaaacggatcaacaagatcagaagaagacttgtgaaagacagcaacaccaagaaggccggcaagacaggccccatgaaaaccctgctggttagagtgatgacacccgatctgagagagcggctggaaaacctgagaaagaagcctgaaaatatcccccagcccatcagcaatacatctagagccaacctgaataagctgctgaccgattacaccgaaatgaagaaggcgatcctgcatgtgtactgggaagagttccagaaggaccctgtgggcctgatgagccgggtggcccagcctgccagcaagaagatcgatcagaacaagctgaaacctgagatggacgagaagggcaacctgaccaccgccggctttgcctgctctcagtgtggccagcccctgttcgtgtacaagctggagcaggtgtctgagaagggcaaggcttacaccaactacttcggacggtgcaatgtggccgagcacgaaaagctgatcctgctggcccagctgaagcccgagaaggatagcgacgaagccgtgacatatagcctgggaaagtttgggcagagggccctggatttctacagcattcatgtgaccaaggagtccacccaccccgtgaagcccctggcccagatcgccggaaacagatacgcctccggacctgtgggaaaggccctgagcgacgcatgtatgggcacaatcgcctccttcctgtctaagtaccaggacatcatcatcgaacaccagaaggtggtgaagggcaaccagaagagactggagagcctgcgggagctggccggcaaggaaaacctggaataccctagcgtgaccctgccacctcagcctcacaccaaggagggcgttgatgcctacaacgaagtgatcgcccgggtgcgaatgtgggtgaacctgaacctgtggcagaagctgaagctaagcagagatgatgccaagcctctgctgagactgaagggattcccttcctttcctctggtcgagagacaggccaacgaagtggactggtgggacatggtgtgtaacgtgaagaagctgatcaacgagaaaaaggaggatggcaaggtgttttggcagaatctggctggctacaagagacaggaagccctgagaccatacctgagcagcgaggaagatcggaagaagggaaagaaattcgctcggtaccagctgggcgacctgctgctgcacctggaaaagaagcacggcgaggactggggaaaggtgtacgacgaggcctgggagcggattgacaagaaagtggaaggcctgagcaagcacatcaagctggaagaggaacggagaagcgaggacgcccagagcaaggccgccctgaccgactggctgcgggctaaggccagcttcgtgatcgagggcctgaaggaggccgacaaggacgagttctgcagatgcgagctgaagctgcagaagtggtacggggacctgcggggaaagcccttcgccatcgaagccgagaacagcatcctggacatcagcggcttcagcaagcagtacaactgtgccttcatctggcagaaggacggcgtgaagaagctgaacctgtacctgatcatcaactacttcaagggcggcaagctgcggttcaagaagatcaaacctgaagccttcgaagccaacagattctacaccgtgatcaacaaaaagagcggcgagatcgtgcccatggaggtgaacttcaacttcgacgaccccaacctgatcatcctgcctctggcctttggcaagagacagggcagagaattcatctggaacgacctgctgtccctggaaaccggcagcctgaagctggccaacggaagagtgatcgagaagacactgtacaacagaagaacccggcaggatgagcctgccctgttcgtggccctgaccttcgagcggcgggaggtcctggactcctccaatatcaaaccaatgaacctgatcggcgtggcaagaggcgaaaacatccccgccgtgatcgccctgaccgaccccgagggctgcccactgagccggtttaaggatagcctgggaaacccaacccacatcctgagaatcggcgagagctataaggagaagcagcggaccatccaggccaagaaggaggtggagcagcggagagccggcggctacagccggaagtacgccagcaaagccaagaatctggcagacgatatggtgagaaacaccgctagagatctgctgtactacgccgtgacccaggatgccatgctgatcttcgccaacctgagccggggcttcggccggcagggcaagcggaccttcatggccgagagacagtacacacggatggaggactggctgaccgccaagctggcctacgagggcctgagcaagacctacctgtccaagacactggcccagtacacctccaagacatgcagcaactgtgggtttaccatcaccagcgccgactacgacagggtgctggagaagctgaagaagacagcaacaggctggatgaccacaattaacggcaaggagctgaaggtggagggccagattacctactacaacagatacaagagacagaacgtagtcaaggacctgtccgtcgagctggatagactgagcgaagaatctgtgaacaacgacatctcctcctggacaaagggcagaagcggagaagctctgagcctcctgaagaaaagattctcccatagacccgtgcaggagaagttcgtgtgcctgaactgcggcttcgagacacacgcagccgagcaagccgccctgaacatcgccagatcctggctgttcctgcggagccaggagtacaagaaataccagacaaacaagacaaccggcaacaccgataagagagccttcgtcgagacctggcagtccttttaccggaagaagcttaaggaggtgtggaaacctgccgtgcggtctggcggatctggcggaggctccgcccagatgcccgtgaagttcgaggacatcgccgtgagcttcagccaggaggagtgggagtacctgaacgaggagcagaaggagctgtacagggaggtgatggaggagaactaccagaccctgatcagcctgggcagcccccccgtgacccccgacatcatcagccacatcgagaggggcgaggagccctacatcagggaggagcccggcagcgaggagagggagcccggcaggagcagctgcggcggcccaagcagcggcgcccctcctcccagcggcggcagcccagccggctccccaacctctaccgaggagggcacctctgagtccgccacccccgagagcggccctggcacctccaccgagcccagcgagggcagcgcacccggcagccctgccggcagccccacctccacagaggagggaaccagcaccgagcccagcgaaggcagcgccccaggcaccagcaccgagcctagtgagcaggagattaaacggatcaacaagatcagaagaagacttgtgaaagacagcaacaccaagaaggccggcaagacaggccccatgaaaaccctgctggttagagtgatgacacccgatctgagagagcggctggaaaacctgagaaagaagcctgaaaatatcccccagcccatcagcaatacatctagagccaacctgaataagctgctgaccgattacaccgaaatgaagaaggcgatcctgcatgtgtactgggaagagttccagaaggaccctgtgggcctgatgagccgggtggcccagcctgccagcaagaagatcgatcagaacaagctgaaacctgagatggacgagaagggcaacctgaccaccgccggctttgcctgctctcagtgtggccagcccctgttcgtgtacaagctggagcaggtgtctgagaagggcaaggcttacaccaactacttcggacggtgcaatgtggccgagcacgaaaagctgatcctgctggcccagctgaagcccgagaaggatagcgacgaagccgtgacatatagcctgggaaagtttgggcagagggccctggatttctacagcattcatgtgaccaaggagtccacccaccccgtgaagcccctggcccagatcgccggaaacagatacgcctccggacctgtgggaaaggccctgagcgacgcatgtatgggcacaatcgcctccttcctgtctaagtaccaggacatcatcatcgaacaccagaaggtggtgaagggcaaccagaagagactggagagcctgcgggagctggccggcaaggaaaacctggaataccctagcgtgaccctgccacctcagcctcacaccaaggagggcgttgatgcctacaacgaagtgatcgcccgggtgcgaatgtgggtgaacctgaacctgtggcagaagctgaagctaagcagagatgatgccaagcctctgctgagactgaagggattcccttcctttcctctggtcgagagacaggccaacgaagtggactggtgggacatggtgtgtaacgtgaagaagctgatcaacgagaaaaaggaggatggcaaggtgttttggcagaatctggctggctacaagagacaggaagccctgagaccatacctgagcagcgaggaagatcggaagaagggaaagaaattcgctcggtaccagctgggcgacctgctgctgcacctggaaaagaagcacggcgaggactggggaaaggtgtacgacgaggcctgggagcggattgacaagaaagtggaaggcctgagcaagcacatcaagctggaagaggaacggagaagcgaggacgcccagagcaaggccgccctgaccgactggctgcgggctaaggccagcttcgtgatcgagggcctgaaggaggccgacaaggacgagttctgcagatgcgagctgaagctgcagaagtggtacggggacctgcggggaaagcccttcgccatcgaagccgagaacagcatcctggacatcagcggcttcagcaagcagtacaactgtgccttcatctggcagaaggacggcgtgaagaagctgaacctgtacctgatcatcaactacttcaagggcggcaagctgcggttcaagaagatcaaacctgaagccttcgaagccaacagattctacaccgtgatcaacaaaaagagcggcgagatcgtgcccatggaggtgaacttcaacttcgacgaccccaacctgatcatcctgcctctggcctttggcaagagacagggcagagaattcatctggaacgacctgctgtccctggaaaccggcagcctgaagctggccaacggaagagtgatcgagaagacactgtacaacagaagaacccggcaggatgagcctgccctgttcgtggccctgaccttcgagcggcgggaggtcctggactcctccaatatcaaaccaatgaacctgatcggcgtggcaagaggcgaaaacatccccgccgtgatcgccctgaccgaccccgagggctgcccactgagccggtttaaggatagcctgggaaacccaacccacatcctgagaatcggcgagagctataaggagaagcagcggaccatccaggccaagaaggaggtggagcagcggagagccggcggctacagccggaagtacgccagcaaagccaagaatctggcagacgatatggtgagaaacaccgctagagatctgctgtactacgccgtgacccaggatgccatgctgatcttcgccaacctgagccggggcttcggccggcagggcaagcggaccttcatggccgagagacagtacacacggatggaggactggctgaccgccaagctggcctacgagggcctgagcaagacctacctgtccaagacactggcccagtacacctccaagacatgcagcaactgtgggtttaccatcaccagcgccgactacgacagggtgctggagaagctgaagaagacagcaacaggctggatgaccacaattaacggcaaggagctgaaggtggagggccagattacctactacaacagatacaagagacagaacgtagtcaaggacctgtccgtcgagctggatagactgagcgaagaatctgtgaacaacgacatctcctcctggacaaagggcagaagcggagaagctctgagcctcctgaagaaaagattctcccatagacccgtgcaggagaagttcgtgtgcctgaactgcggcttcgagacacacgcagccgagcaagccgccctgaacatcgccagatcctggctgttcctgcggagccaggagtacaagaaataccagacaaacaagacaaccggcaacaccgataagagagccttcgtcgagacctggcagtccttttaccggaagaagcttaaggaggtgtggaaacctgccgtgcggtctggcggatctggcggaggctcctgcccagatgcccgtgaagttcgaggacatcgccgtgagcttcagccaggaggagtgggagtacctgaacgaggagcagaaggagctgtacagggaggtgatggaggagaactaccagaccctgatcagcctgggcagcccccccgtgacccccgacatcatcagccacatcgagaggggcgaggagccctacatcagggaggagcccggcagcgaggagagggagcccggcaggagcagctgcggatctggctccggcagcggccccaagaaaaagagaaaagtctaagctgccttctgcggggcttgccttctggccatgcccttcttctctcccttgcacctgtacctcttggtctttgaataaagcctgagtaggaaggctagcaaaaaaaaaaaaaaaaaaaaaaaaaaaaaaaaaaaaaaaaaaaaaaaaaaaaaaaaaaaaaaaaaaaaaaaaaaaaaaaa

SEQ ID NO: 16711 - RNA, 9485 nt, synthetic construct
  source 1..9485: mol_type = other RNA
aggaaataagagagaaaagaagagtaagaagaaatataagagccaccatggcccctaagaagaagcgtaaagtgagccggatggaacgcctcgtctacgaggtgcggcagaagtgcagaaacatcgaggacatctgcatctcctgcggatctctgaacgtgaccctggagcacccactgttcatcggcggcatgtgccagaactgtaaaaactgttttctggagtgtgcctatcaatacgacgatgacggctaccagagctactgcaccatctgttgcggcggaagagaggtgctgatgtgtggaaataacaactgctgccggtgcttctgcgtggaatgcgtggacctgctggtgggccccggcgccgcccaggccgctattaaggaagatccttggaactgctacatgtgcggccacaagggcacatacggcctgctgagacggagagaggactggcctagcagactgcagatgttcttcgccaataaccacgaccaggagttcgacccccctaaggtgtaccctcccgtccccgccgagaagagaaagcccatccgggtcctgagcctgttcgatggcatcgccaccggtctgctggtgctgaaggacctgggcatccaggtggataggtacattgcctccgaggtgtgcgaggactccatcaccgtgggaatggtgcgtcatcagggcaagatcatgtacgtgggcgacgtgcggagcgtgacacagaagcatatccaggagtggggccctttcgacctggtgatcggcggcagcccttgcaatgacctgagcatcgtgaacccagcccggaagggcctgtacgagggaaccggcagactgttcttcgagttttacagactgctgcacgacgcccggcctaaggaaggcgacgaccggcccttcttttggctgttcgagaatgtggtggccatgggagtcagcgacaagcgggatattagccggttcctggagagcaaccccgtgatgatcgatgccaaggaagtgagcgccgcccaccgggccagatacttctggggcaatctgcctggcatgaacagacccctggccagcaccgtgaacgacaagctggagctgcaggagtgcctggagcacggccggatcgccaagttcagcaaggtgagaaccatcaccacccgaagcaacagcatcaaacaaggcaaggaccagcactttcctgtgttcatgaacgagaaggaggacatcctgtggtgtaccgagatggagagagtgttcgggttcccagtccactacacagatgtcagcaacatgtctagactggccagacagagactgctgggaagaagctggtccgtccctgtgatcagacacctgttcgcccctctgaaggagtacttcgcctgcgtgagcagcggcaacagcaacgccaacagccggggccccagcttctctagcggcctggtgccactgtccctgagagggagccacatgggccccatggagatctacaaaaccgtgagcgcctggaagcggcagcctgtgcgcgtgctgagcctgtttcggaatatcgataaagtcctgaaaagcctgggattcctggagagcggctctggctccggcggtggcaccctgaagtacgtggaggatgtgacaaacgtggtcagacgggatgtggagaagtggggccccttcgatctggtgtacggcagcacccaacccctgggcagctcttgtgaccggtgccctggctggtacatgtttcagttccaccggatcctgcagtacgccctgccgagacaggagtcccagcggccattcttttggattttcatggacaacttgctgctgaccgaggatgaccaggaaactaccactcggttcctgcagaccgaagccgtgaccctgcaggacgtgagaggccgggactaccagaacgccatgcgggtgtggtccaacatccctggactgaaaagcaagcacgcacctctgacccctaaagaagaggagtacctgcaggcccaggtgcggagcagaagcaagctggacgcccctaaggtggatctgctggtgaagaattgcctcctgcccctgagagagtacttcaagtatttcagccagaatagtctgcccctgggaggcagcggcggcggcgccctggtgacatttgaggacgtcgccgtgcggttcacccaggaggaatgggctctgctggatccttctcagaaaatcctgtaccgggacgtgatgagagagacataccggaatctgacctccgtgggcatcaactgggaatgttgggaccttgaagcctgcttcagaagcctgggaagaaacctgagagtgcaggtggtgaagagaaagtgcgagctgaccaacagcggcccctgcgccgagggcggcccaagcagcggcgcccctcctcccagcggcggcagcccagccggctccccaacctctaccgaggagggcacctctgagtccgccacccccgagagcggccctggcacctccaccgagcccagcgagggcagcgcacccggcagccctgccggcagccccacctccacagaggagggaaccagcaccgagcccagcgaaggcagcgccccaggcaccagcaccgagcctagtgagcaggagattaaacggatcaacaagatcagaagaagacttgtgaaagacagcaacaccaagaaggccggcaagacaggccccatgaaaaccctgctggttagagtgatgacacccgatctgagagagcggctggaaaacctgagaaagaagcctgaaaatatcccccagcccatcagcaatacatctagagccaacctgaataagctgctgaccgattacaccgaaatgaagaaggcgatcctgcatgtgtactgggaagagttccagaaggaccctgtgggcctgatgagccgggtggcccagcctgccagcaagaagatcgatcagaacaagctgaaacctgagatggacgagaagggcaacctgaccaccgccggctttgcctgctctcagtgtggccagcccctgttcgtgtacaagctggagcaggtgtctgagaagggcaaggcttacaccaactacttcggacggtgcaatgtggccgagcacgaaaagctgatcctgctggcccagctgaagcccgagaaggatagcgacgaagccgtgacatatagcctgggaaagtttgggcagagggccctggatttctacagcattcatgtgaccaaggagtccacccaccccgtgaagcccctggcccagatcgccggaaacagatacgcctccggacctgtgggaaaggccctgagcgacgcatgtatgggcacaatcgcctccttcctgtctaagtaccaggacatcatcatcgaacaccagaaggtggtgaagggcaaccagaagagactggagagcctgcgggagctggccggcaaggaaaacctggaataccctagcgtgaccctgccacctcagcctcacaccaaggagggcgttgatgcctacaacgaagtgatcgcccgggtgcgaatgtgggtgaacctgaacctgtggcagaagctgaagctaagcagagatgatgccaagcctctgctgagactgaagggattcccttcctttcctctggtcgagagacaggccaacgaagtggactggtgggacatggtgtgtaacgtgaagaagctgatcaacgagaaaaaggaggatggcaaggtgttttggcagaatctggctggctacaagagacaggaagccctgagaccatacctgagcagcgaggaagatcggaagaagggaaagaaattcgctcggtaccagctgggcgacctgctgctgcacctggaaaagaagcacggcgaggactggggaaaggtgtacgacgaggcctgggagcggattgacaagaaagtggaaggcctgagcaagcacatcaagctggaagaggaacggagaagcgaggacgcccagagcaaggccgccctgaccgactggctgcgggctaaggccagcttcgtgatcgagggcctgaaggaggccgacaaggacgagttctgcagatgcgagctgaagctgcagaagtggtacggggacctgcggggaaagcccttcgccatcgaagccgagaacagcatcctggacatcagcggcttcagcaagcagtacaactgtgccttcatctggcagaaggacggcgtgaagaagctgaacctgtacctgatcatcaactacttcaagggcggcaagctgcggttcaagaagatcaaacctgaagccttcgaagccaacagattctacaccgtgatcaacaaaaagagcggcgagatcgtgcccatggaggtgaacttcaacttcgacgaccccaacctgatcatcctgcctctggcctttggcaagagacagggcagagaattcatctggaacgacctgctgtccctggaaaccggcagcctgaagctggccaacggaagagtgatcgagaagacactgtacaacagaagaacccggcaggatgagcctgccctgttcgtggccctgaccttcgagcggcgggaggtcctggactcctccaatatcaaaccaatgaacctgatcggcgtggcaagaggcgaaaacatccccgccgtgatcgccctgaccgaccccgagggctgcccactgagccggtttaaggatagcctgggaaacccaacccacatcctgagaatcggcgagagctataaggagaagcagcggaccatccaggccaagaaggaggtggagcagcggagagccggcggctacagccggaagtacgccagcaaagccaagaatctggcagacgatatggtgagaaacaccgctagagatctgctgtactacgccgtgacccaggatgccatgctgatcttcgccaacctgagccggggcttcggccggcagggcaagcggaccttcatggccgagagacagtacacacggatggaggactggctgaccgccaagctggcctacgagggcctgagcaagacctacctgtccaagacactggcccagtacacctccaagacatgcagcaactgtgggtttaccatcaccagcgccgactacgacagggtgctggagaagctgaagaagacagcaacaggctggatgaccacaattaacggcaaggagctgaaggtggagggccagattacctactacaacagatacaagagacagaacgtagtcaaggacctgtccgtcgagctggatagactgagcgaagaatctgtgaacaacgacatctcctcctggacaaagggcagaagcggagaagctctgagcctcctgaagaaaagattctcccatagacccgtgcaggagaagttcgtgtgcctgaactgcggcttcgagacacacgcagccgagcaagccgccctgaacatcgccagatcctggctgttcctgcggagccaggagtacaagaaataccagacaaacaagacaaccggcaacaccgataagagagccttcgtcgagacctggcagtccttttaccggaagaagcttaaggaggtgtggaaacctgccgtgcggtctggcggatctggcggaggctccaaggaccagggcagcctgaccctggaggacgtggccgtggacttcacctgggaggagtggcagctgctggcccccgcccagaaggacctgtacagggacgtgatgctggagaactacagcaacctgctgagcatcggctaccaggccagcaagcccgacgccctgagcaggctggagaggggcgagccctggcccgtggaggacgagatccacagccagatctgccccgagatgaggaaggacggcggcccaagcagcggcgcccctcctcccagcggcggcagcccagccggctccccaacctctaccgaggagggcacctctgagtccgccacccccgagagcggccctggcacctccaccgagcccagcgagggcagcgcacccggcagccctgccggcagccccacctccacagaggagggaaccagcaccgagcccagcgaaggcagcgccccaggcaccagcaccgagcctagtgagcaggagattaaacggatcaacaagatcagaagaagacttgtgaaagacagcaacaccaagaaggccggcaagacaggccccatgaaaaccctgctggttagagtgatgacacccgatctgagagagcggctggaaaacctgagaaagaagcctgaaaatatcccccagcccatcagcaatacatctagagccaacctgaataagctgctgaccgattacaccgaaatgaagaaggcgatcctgcatgtgtactgggaagagttccagaaggaccctgtgggcctgatgagccgggtggcccagcctgccagcaagaagatcgatcagaacaagctgaaacctgagatggacgagaagggcaacctgaccaccgccggctttgcctgctctcagtgtggccagcccctgttcgtgtacaagctggagcaggtgtctgagaagggcaaggcttacaccaactacttcggacggtgcaatgtggccgagcacgaaaagctgatcctgctggcccagctgaagcccgagaaggatagcgacgaagccgtgacatatagcctgggaaagtttgggcagagggccctggatttctacagcattcatgtgaccaaggagtccacccaccccgtgaagcccctggcccagatcgccggaaacagatacgcctccggacctgtgggaaaggccctgagcgacgcatgtatgggcacaatcgcctccttcctgtctaagtaccaggacatcatcatcgaacaccagaaggtggtgaagggcaaccagaagagactggagagcctgcgggagctggccggcaaggaaaacctggaataccctagcgtgaccctgccacctcagcctcacaccaaggagggcgttgatgcctacaacgaagtgatcgcccgggtgcgaatgtgggtgaacctgaacctgtggcagaagctgaagctaagcagagatgatgccaagcctctgctgagactgaagggattcccttcctttcctctggtcgagagacaggccaacgaagtggactggtgggacatggtgtgtaacgtgaagaagctgatcaacgagaaaaaggaggatggcaaggtgttttggcagaatctggctggctacaagagacaggaagccctgagaccatacctgagcagcgaggaagatcggaagaagggaaagaaattcgctcggtaccagctgggcgacctgctgctgcacctggaaaagaagcacggcgaggactggggaaaggtgtacgacgaggcctgggagcggattgacaagaaagtggaaggcctgagcaagcacatcaagctggaagaggaacggagaagcgaggacgcccagagcaaggccgccctgaccgactggctgcgggctaaggccagcttcgtgatcgagggcctgaaggaggccgacaaggacgagttctgcagatgcgagctgaagctgcagaagtggtacggggacctgcggggaaagcccttcgccatcgaagccgagaacagcatcctggacatcagcggcttcagcaagcagtacaactgtgccttcatctggcagaaggacggcgtgaagaagctgaacctgtacctgatcatcaactacttcaagggcggcaagctgcggttcaagaagatcaaacctgaagccttcgaagccaacagattctacaccgtgatcaacaaaaagagcggcgagatcgtgcccatggaggtgaacttcaacttcgacgaccccaacctgatcatcctgcctctggcctttggcaagagacagggcagagaattcatctggaacgacctgctgtccctggaaaccggcagcctgaagctggccaacggaagagtgatcgagaagacactgtacaacagaagaacccggcaggatgagcctgccctgttcgtggccctgaccttcgagcggcgggaggtcctggactcctccaatatcaaaccaatgaacctgatcggcgtggcaagaggcgaaaacatccccgccgtgatcgccctgaccgaccccgagggctgcccactgagccggtttaaggatagcctgggaaacccaacccacatcctgagaatcggcgagagctataaggagaagcagcggaccatccaggccaagaaggaggtggagcagcggagagccggcggctacagccggaagtacgccagcaaagccaagaatctggcagacgatatggtgagaaacaccgctagagatctgctgtactacgccgtgacccaggatgccatgctgatcttcgccaacctgagccggggcttcggccggcagggcaagcggaccttcatggccgagagacagtacacacggatggaggactggctgaccgccaagctggcctacgagggcctgagcaagacctacctgtccaagacactggcccagtacacctccaagacatgcagcaactgtgggtttaccatcaccagcgccgactacgacagggtgctggagaagctgaagaagacagcaacaggctggatgaccacaattaacggcaaggagctgaaggtggagggccagattacctactacaacagatacaagagacagaacgtagtcaaggacctgtccgtcgagctggatagactgagcgaagaatctgtgaacaacgacatctcctcctggacaaagggcagaagcggagaagctctgagcctcctgaagaaaagattctcccatagacccgtgcaggagaagttcgtgtgcctgaactgcggcttcgagacacacgcagccgagcaagccgccctgaacatcgccagatcctggctgttcctgcggagccaggagtacaagaaataccagacaaacaagacaaccggcaacaccgataagagagccttcgtcgagacctggcagtccttttaccggaagaagcttaaggaggtgtggaaacctgccgtgcggtctggcggatctggcggaggctcctaaggaccagggcagcctgaccctggaggacgtggccgtggacttcacctgggaggagtggcagctgctggcccccgcccagaaggacctgtacagggacgtgatgctggagaactacagcaacctgctgagcatcggctaccaggccagcaagcccgacgccctgagcaggctggagaggggcgagccctggcccgtggaggacgagatccacagccagatctgccccgagatgaggaaggacggatctggctccggcagcggccccaagaaaaagagaaaagtctaagctgccttctgcggggcttgccttctggccatgcccttcttctctcccttgcacctgtacctcttggtctttgaataaagcctgagtaggaaggctagcaaaaaaaaaaaaaaaaaaaaaaaaaaaaaaaaaaaaaaaaaaaaaaaaaaaaaaaaaaaaaaaaaaaaaaaaaaaaaaaa

SEQ ID NO: 16712 - RNA, 9485 nt, synthetic construct
  source 1..9485: mol_type = other RNA
aggaaataagagagaaaagaagagtaagaagaaatataagagccaccatggcccctaagaagaagcgtaaagtgagccggatggaacgcctcgtctacgaggtgcggcagaagtgcagaaacatcgaggacatctgcatctcctgcggatctctgaacgtgaccctggagcacccactgttcatcggcggcatgtgccagaactgtaaaaactgttttctggagtgtgcctatcaatacgacgatgacggctaccagagctactgcaccatctgttgcggcggaagagaggtgctgatgtgtggaaataacaactgctgccggtgcttctgcgtggaatgcgtggacctgctggtgggccccggcgccgcccaggccgctattaaggaagatccttggaactgctacatgtgcggccacaagggcacatacggcctgctgagacggagagaggactggcctagcagactgcagatgttcttcgccaataaccacgaccaggagttcgacccccctaaggtgtaccctcccgtccccgccgagaagagaaagcccatccgggtcctgagcctgttcgatggcatcgccaccggtctgctggtgctgaaggacctgggcatccaggtggataggtacattgcctccgaggtgtgcgaggactccatcaccgtgggaatggtgcgtcatcagggcaagatcatgtacgtgggcgacgtgcggagcgtgacacagaagcatatccaggagtggggccctttcgacctggtgatcggcggcagcccttgcaatgacctgagcatcgtgaacccagcccggaagggcctgtacgagggaaccggcagactgttcttcgagttttacagactgctgcacgacgcccggcctaaggaaggcgacgaccggcccttcttttggctgttcgagaatgtggtggccatgggagtcagcgacaagcgggatattagccggttcctggagagcaaccccgtgatgatcgatgccaaggaagtgagcgccgcccaccgggccagatacttctggggcaatctgcctggcatgaacagacccctggccagcaccgtgaacgacaagctggagctgcaggagtgcctggagcacggccggatcgccaagttcagcaaggtgagaaccatcaccacccgaagcaacagcatcaaacaaggcaaggaccagcactttcctgtgttcatgaacgagaaggaggacatcctgtggtgtaccgagatggagagagtgttcgggttcccagtccactacacagatgtcagcaacatgtctagactggccagacagagactgctgggaagaagctggtccgtccctgtgatcagacacctgttcgcccctctgaaggagtacttcgcctgcgtgagcagcggcaacagcaacgccaacagccggggccccagcttctctagcggcctggtgccactgtccctgagagggagccacatgggccccatggagatctacaaaaccgtgagcgcctggaagcggcagcctgtgcgcgtgctgagcctgtttcggaatatcgataaagtcctgaaaagcctgggattcctggagagcggctctggctccggcggtggcaccctgaagtacgtggaggatgtgacaaacgtggtcagacgggatgtggagaagtggggccccttcgatctggtgtacggcagcacccaacccctgggcagctcttgtgaccggtgccctggctggtacatgtttcagttccaccggatcctgcagtacgccctgccgagacaggagtcccagcggccattcttttggattttcatggacaacttgctgctgaccgaggatgaccaggaaactaccactcggttcctgcagaccgaagccgtgaccctgcaggacgtgagaggccgggactaccagaacgccatgcgggtgtggtccaacatccctggactgaaaagcaagcacgcacctctgacccctaaagaagaggagtacctgcaggcccaggtgcggagcagaagcaagctggacgcccctaaggtggatctgctggtgaagaattgcctcctgcccctgagagagtacttcaagtatttcagccagaatagtctgcccctgggaggcagcggcggcggcgccctggtgacatttgaggacgtcgccgtgcggttcacccaggaggaatgggctctgctggatccttctcagaaaatcctgtaccgggacgtgatgagagagacataccggaatctgacctccgtgggcatcaactgggaatgttgggaccttgaagcctgcttcagaagcctgggaagaaacctgagagtgcaggtggtgaagagaaagtgcgagctgaccaacagcggcccctgcgccgagggcggcccaagcagcggcgcccctcctcccagcggcggcagcccagccggctccccaacctctaccgaggagggcacctctgagtccgccacccccgagagcggccctggcacctccaccgagcccagcgagggcagcgcacccggcagccctgccggcagccccacctccacagaggagggaaccagcaccgagcccagcgaaggcagcgccccaggcaccagcaccgagcctagtgagcaggagattaaacggatcaacaagatcagaagaagacttgtgaaagacagcaacaccaagaaggccggcaagacaggccccatgaaaaccctgctggttagagtgatgacacccgatctgagagagcggctggaaaacctgagaaagaagcctgaaaatatcccccagcccatcagcaatacatctagagccaacctgaataagctgctgaccgattacaccgaaatgaagaaggcgatcctgcatgtgtactgggaagagttccagaaggaccctgtgggcctgatgagccgggtggcccagcctgccagcaagaagatcgatcagaacaagctgaaacctgagatggacgagaagggcaacctgaccaccgccggctttgcctgctctcagtgtggccagcccctgttcgtgtacaagctggagcaggtgtctgagaagggcaaggcttacaccaactacttcggacggtgcaatgtggccgagcacgaaaagctgatcctgctggcccagctgaagcccgagaaggatagcgacgaagccgtgacatatagcctgggaaagtttgggcagagggccctggatttctacagcattcatgtgaccaaggagtccacccaccccgtgaagcccctggcccagatcgccggaaacagatacgcctccggacctgtgggaaaggccctgagcgacgcatgtatgggcacaatcgcctccttcctgtctaagtaccaggacatcatcatcgaacaccagaaggtggtgaagggcaaccagaagagactggagagcctgcgggagctggccggcaaggaaaacctggaataccctagcgtgaccctgccacctcagcctcacaccaaggagggcgttgatgcctacaacgaagtgatcgcccgggtgcgaatgtgggtgaacctgaacctgtggcagaagctgaagctaagcagagatgatgccaagcctctgctgagactgaagggattcccttcctttcctctggtcgagagacaggccaacgaagtggactggtgggacatggtgtgtaacgtgaagaagctgatcaacgagaaaaaggaggatggcaaggtgttttggcagaatctggctggctacaagagacaggaagccctgagaccatacctgagcagcgaggaagatcggaagaagggaaagaaattcgctcggtaccagctgggcgacctgctgctgcacctggaaaagaagcacggcgaggactggggaaaggtgtacgacgaggcctgggagcggattgacaagaaagtggaaggcctgagcaagcacatcaagctggaagaggaacggagaagcgaggacgcccagagcaaggccgccctgaccgactggctgcgggctaaggccagcttcgtgatcgagggcctgaaggaggccgacaaggacgagttctgcagatgcgagctgaagctgcagaagtggtacggggacctgcggggaaagcccttcgccatcgaagccgagaacagcatcctggacatcagcggcttcagcaagcagtacaactgtgccttcatctggcagaaggacggcgtgaagaagctgaacctgtacctgatcatcaactacttcaagggcggcaagctgcggttcaagaagatcaaacctgaagccttcgaagccaacagattctacaccgtgatcaacaaaaagagcggcgagatcgtgcccatggaggtgaacttcaacttcgacgaccccaacctgatcatcctgcctctggcctttggcaagagacagggcagagaattcatctggaacgacctgctgtccctggaaaccggcagcctgaagctggccaacggaagagtgatcgagaagacactgtacaacagaagaacccggcaggatgagcctgccctgttcgtggccctgaccttcgagcggcgggaggtcctggactcctccaatatcaaaccaatgaacctgatcggcgtggcaagaggcgaaaacatccccgccgtgatcgccctgaccgaccccgagggctgcccactgagccggtttaaggatagcctgggaaacccaacccacatcctgagaatcggcgagagctataaggagaagcagcggaccatccaggccaagaaggaggtggagcagcggagagccggcggctacagccggaagtacgccagcaaagccaagaatctggcagacgatatggtgagaaacaccgctagagatctgctgtactacgccgtgacccaggatgccatgctgatcttcgccaacctgagccggggcttcggccggcagggcaagcggaccttcatggccgagagacagtacacacggatggaggactggctgaccgccaagctggcctacgagggcctgagcaagacctacctgtccaagacactggcccagtacacctccaagacatgcagcaactgtgggtttaccatcaccagcgccgactacgacagggtgctggagaagctgaagaagacagcaacaggctggatgaccacaattaacggcaaggagctgaaggtggagggccagattacctactacaacagatacaagagacagaacgtagtcaaggacctgtccgtcgagctggatagactgagcgaagaatctgtgaacaacgacatctcctcctggacaaagggcagaagcggagaagctctgagcctcctgaagaaaagattctcccatagacccgtgcaggagaagttcgtgtgcctgaactgcggcttcgagacacacgcagccgagcaagccgccctgaacatcgccagatcctggctgttcctgcggagccaggagtacaagaaataccagacaaacaagacaaccggcaacaccgataagagagccttcgtcgagacctggcagtccttttaccggaagaagcttaaggaggtgtggaaacctgccgtgcggtctggcggatctggcggaggctcccagatgaggctgaggttcgaggacatcagcgtgagcttcagccaggaggagtgggcctacctggacgaggagcagaaggagctgtacagggaggtgatgagggacaactaccagaccctgatcagcctgggcatcggcagcccccccgtgacccccgacatcatcagctgcatcgagcagggcgaggagccctacatcagggacgagcccggcagcgaggagaggaagaccggcaggagcagcggcggcccaagcagcggcgcccctcctcccagcggcggcagcccagccggctccccaacctctaccgaggagggcacctctgagtccgccacccccgagagcggccctggcacctccaccgagcccagcgagggcagcgcacccggcagccctgccggcagccccacctccacagaggagggaaccagcaccgagcccagcgaaggcagcgccccaggcaccagcaccgagcctagtgagcaggagattaaacggatcaacaagatcagaagaagacttgtgaaagacagcaacaccaagaaggccggcaagacaggccccatgaaaaccctgctggttagagtgatgacacccgatctgagagagcggctggaaaacctgagaaagaagcctgaaaatatcccccagcccatcagcaatacatctagagccaacctgaataagctgctgaccgattacaccgaaatgaagaaggcgatcctgcatgtgtactgggaagagttccagaaggaccctgtgggcctgatgagccgggtggcccagcctgccagcaagaagatcgatcagaacaagctgaaacctgagatggacgagaagggcaacctgaccaccgccggctttgcctgctctcagtgtggccagcccctgttcgtgtacaagctggagcaggtgtctgagaagggcaaggcttacaccaactacttcggacggtgcaatgtggccgagcacgaaaagctgatcctgctggcccagctgaagcccgagaaggatagcgacgaagccgtgacatatagcctgggaaagtttgggcagagggccctggatttctacagcattcatgtgaccaaggagtccacccaccccgtgaagcccctggcccagatcgccggaaacagatacgcctccggacctgtgggaaaggccctgagcgacgcatgtatgggcacaatcgcctccttcctgtctaagtaccaggacatcatcatcgaacaccagaaggtggtgaagggcaaccagaagagactggagagcctgcgggagctggccggcaaggaaaacctggaataccctagcgtgaccctgccacctcagcctcacaccaaggagggcgttgatgcctacaacgaagtgatcgcccgggtgcgaatgtgggtgaacctgaacctgtggcagaagctgaagctaagcagagatgatgccaagcctctgctgagactgaagggattcccttcctttcctctggtcgagagacaggccaacgaagtggactggtgggacatggtgtgtaacgtgaagaagctgatcaacgagaaaaaggaggatggcaaggtgttttggcagaatctggctggctacaagagacaggaagccctgagaccatacctgagcagcgaggaagatcggaagaagggaaagaaattcgctcggtaccagctgggcgacctgctgctgcacctggaaaagaagcacggcgaggactggggaaaggtgtacgacgaggcctgggagcggattgacaagaaagtggaaggcctgagcaagcacatcaagctggaagaggaacggagaagcgaggacgcccagagcaaggccgccctgaccgactggctgcgggctaaggccagcttcgtgatcgagggcctgaaggaggccgacaaggacgagttctgcagatgcgagctgaagctgcagaagtggtacggggacctgcggggaaagcccttcgccatcgaagccgagaacagcatcctggacatcagcggcttcagcaagcagtacaactgtgccttcatctggcagaaggacggcgtgaagaagctgaacctgtacctgatcatcaactacttcaagggcggcaagctgcggttcaagaagatcaaacctgaagccttcgaagccaacagattctacaccgtgatcaacaaaaagagcggcgagatcgtgcccatggaggtgaacttcaacttcgacgaccccaacctgatcatcctgcctctggcctttggcaagagacagggcagagaattcatctggaacgacctgctgtccctggaaaccggcagcctgaagctggccaacggaagagtgatcgagaagacactgtacaacagaagaacccggcaggatgagcctgccctgttcgtggccctgaccttcgagcggcgggaggtcctggactcctccaatatcaaaccaatgaacctgatcggcgtggcaagaggcgaaaacatccccgccgtgatcgccctgaccgaccccgagggctgcccactgagccggtttaaggatagcctgggaaacccaacccacatcctgagaatcggcgagagctataaggagaagcagcggaccatccaggccaagaaggaggtggagcagcggagagccggcggctacagccggaagtacgccagcaaagccaagaatctggcagacgatatggtgagaaacaccgctagagatctgctgtactacgccgtgacccaggatgccatgctgatcttcgccaacctgagccggggcttcggccggcagggcaagcggaccttcatggccgagagacagtacacacggatggaggactggctgaccgccaagctggcctacgagggcctgagcaagacctacctgtccaagacactggcccagtacacctccaagacatgcagcaactgtgggtttaccatcaccagcgccgactacgacagggtgctggagaagctgaagaagacagcaacaggctggatgaccacaattaacggcaaggagctgaaggtggagggccagattacctactacaacagatacaagagacagaacgtagtcaaggacctgtccgtcgagctggatagactgagcgaagaatctgtgaacaacgacatctcctcctggacaaagggcagaagcggagaagctctgagcctcctgaagaaaagattctcccatagacccgtgcaggagaagttcgtgtgcctgaactgcggcttcgagacacacgcagccgagcaagccgccctgaacatcgccagatcctggctgttcctgcggagccaggagtacaagaaataccagacaaacaagacaaccggcaacaccgataagagagccttcgtcgagacctggcagtccttttaccggaagaagcttaaggaggtgtggaaacctgccgtgcggtctggcggatctggcggaggctcctcagatgaggctgaggttcgaggacatcagcgtgagcttcagccaggaggagtgggcctacctggacgaggagcagaaggagctgtacagggaggtgatgagggacaactaccagaccctgatcagcctgggcatcggcagcccccccgtgacccccgacatcatcagctgcatcgagcagggcgaggagccctacatcagggacgagcccggcagcgaggagaggaagaccggcaggagcagcggatctggctccggcagcggccccaagaaaaagagaaaagtctaagctgccttctgcggggcttgccttctggccatgcccttcttctctcccttgcacctgtacctcttggtctttgaataaagcctgagtaggaaggctagcaaaaaaaaaaaaaaaaaaaaaaaaaaaaaaaaaaaaaaaaaaaaaaaaaaaaaaaaaaaaaaaaaaaaaaaaaaaaaaaa

SEQ ID NO: 16713 - RNA, 9479 nt, synthetic construct
  source 1..9479: mol_type = other RNA
aggaaataagagagaaaagaagagtaagaagaaatataagagccaccatggcccctaagaagaagcgtaaagtgagccggatggaacgcctcgtctacgaggtgcggcagaagtgcagaaacatcgaggacatctgcatctcctgcggatctctgaacgtgaccctggagcacccactgttcatcggcggcatgtgccagaactgtaaaaactgttttctggagtgtgcctatcaatacgacgatgacggctaccagagctactgcaccatctgttgcggcggaagagaggtgctgatgtgtggaaataacaactgctgccggtgcttctgcgtggaatgcgtggacctgctggtgggccccggcgccgcccaggccgctattaaggaagatccttggaactgctacatgtgcggccacaagggcacatacggcctgctgagacggagagaggactggcctagcagactgcagatgttcttcgccaataaccacgaccaggagttcgacccccctaaggtgtaccctcccgtccccgccgagaagagaaagcccatccgggtcctgagcctgttcgatggcatcgccaccggtctgctggtgctgaaggacctgggcatccaggtggataggtacattgcctccgaggtgtgcgaggactccatcaccgtgggaatggtgcgtcatcagggcaagatcatgtacgtgggcgacgtgcggagcgtgacacagaagcatatccaggagtggggccctttcgacctggtgatcggcggcagcccttgcaatgacctgagcatcgtgaacccagcccggaagggcctgtacgagggaaccggcagactgttcttcgagttttacagactgctgcacgacgcccggcctaaggaaggcgacgaccggcccttcttttggctgttcgagaatgtggtggccatgggagtcagcgacaagcgggatattagccggttcctggagagcaaccccgtgatgatcgatgccaaggaagtgagcgccgcccaccgggccagatacttctggggcaatctgcctggcatgaacagacccctggccagcaccgtgaacgacaagctggagctgcaggagtgcctggagcacggccggatcgccaagttcagcaaggtgagaaccatcaccacccgaagcaacagcatcaaacaaggcaaggaccagcactttcctgtgttcatgaacgagaaggaggacatcctgtggtgtaccgagatggagagagtgttcgggttcccagtccactacacagatgtcagcaacatgtctagactggccagacagagactgctgggaagaagctggtccgtccctgtgatcagacacctgttcgcccctctgaaggagtacttcgcctgcgtgagcagcggcaacagcaacgccaacagccggggccccagcttctctagcggcctggtgccactgtccctgagagggagccacatgggccccatggagatctacaaaaccgtgagcgcctggaagcggcagcctgtgcgcgtgctgagcctgtttcggaatatcgataaagtcctgaaaagcctgggattcctggagagcggctctggctccggcggtggcaccctgaagtacgtggaggatgtgacaaacgtggtcagacgggatgtggagaagtggggccccttcgatctggtgtacggcagcacccaacccctgggcagctcttgtgaccggtgccctggctggtacatgtttcagttccaccggatcctgcagtacgccctgccgagacaggagtcccagcggccattcttttggattttcatggacaacttgctgctgaccgaggatgaccaggaaactaccactcggttcctgcagaccgaagccgtgaccctgcaggacgtgagaggccgggactaccagaacgccatgcgggtgtggtccaacatccctggactgaaaagcaagcacgcacctctgacccctaaagaagaggagtacctgcaggcccaggtgcggagcagaagcaagctggacgcccctaaggtggatctgctggtgaagaattgcctcctgcccctgagagagtacttcaagtatttcagccagaatagtctgcccctgggaggcagcggcggcggcgccctggtgacatttgaggacgtcgccgtgcggttcacccaggaggaatgggctctgctggatccttctcagaaaatcctgtaccgggacgtgatgagagagacataccggaatctgacctccgtgggcatcaactgggaatgttgggaccttgaagcctgcttcagaagcctgggaagaaacctgagagtgcaggtggtgaagagaaagtgcgagctgaccaacagcggcccctgcgccgagggcggcccaagcagcggcgcccctcctcccagcggcggcagcccagccggctccccaacctctaccgaggagggcacctctgagtccgccacccccgagagcggccctggcacctccaccgagcccagcgagggcagcgcacccggcagccctgccggcagccccacctccacagaggagggaaccagcaccgagcccagcgaaggcagcgccccaggcaccagcaccgagcctagtgagcaggagattaaacggatcaacaagatcagaagaagacttgtgaaagacagcaacaccaagaaggccggcaagacaggccccatgaaaaccctgctggttagagtgatgacacccgatctgagagagcggctggaaaacctgagaaagaagcctgaaaatatcccccagcccatcagcaatacatctagagccaacctgaataagctgctgaccgattacaccgaaatgaagaaggcgatcctgcatgtgtactgggaagagttccagaaggaccctgtgggcctgatgagccgggtggcccagcctgccagcaagaagatcgatcagaacaagctgaaacctgagatggacgagaagggcaacctgaccaccgccggctttgcctgctctcagtgtggccagcccctgttcgtgtacaagctggagcaggtgtctgagaagggcaaggcttacaccaactacttcggacggtgcaatgtggccgagcacgaaaagctgatcctgctggcccagctgaagcccgagaaggatagcgacgaagccgtgacatatagcctgggaaagtttgggcagagggccctggatttctacagcattcatgtgaccaaggagtccacccaccccgtgaagcccctggcccagatcgccggaaacagatacgcctccggacctgtgggaaaggccctgagcgacgcatgtatgggcacaatcgcctccttcctgtctaagtaccaggacatcatcatcgaacaccagaaggtggtgaagggcaaccagaagagactggagagcctgcgggagctggccggcaaggaaaacctggaataccctagcgtgaccctgccacctcagcctcacaccaaggagggcgttgatgcctacaacgaagtgatcgcccgggtgcgaatgtgggtgaacctgaacctgtggcagaagctgaagctaagcagagatgatgccaagcctctgctgagactgaagggattcccttcctttcctctggtcgagagacaggccaacgaagtggactggtgggacatggtgtgtaacgtgaagaagctgatcaacgagaaaaaggaggatggcaaggtgttttggcagaatctggctggctacaagagacaggaagccctgagaccatacctgagcagcgaggaagatcggaagaagggaaagaaattcgctcggtaccagctgggcgacctgctgctgcacctggaaaagaagcacggcgaggactggggaaaggtgtacgacgaggcctgggagcggattgacaagaaagtggaaggcctgagcaagcacatcaagctggaagaggaacggagaagcgaggacgcccagagcaaggccgccctgaccgactggctgcgggctaaggccagcttcgtgatcgagggcctgaaggaggccgacaaggacgagttctgcagatgcgagctgaagctgcagaagtggtacggggacctgcggggaaagcccttcgccatcgaagccgagaacagcatcctggacatcagcggcttcagcaagcagtacaactgtgccttcatctggcagaaggacggcgtgaagaagctgaacctgtacctgatcatcaactacttcaagggcggcaagctgcggttcaagaagatcaaacctgaagccttcgaagccaacagattctacaccgtgatcaacaaaaagagcggcgagatcgtgcccatggaggtgaacttcaacttcgacgaccccaacctgatcatcctgcctctggcctttggcaagagacagggcagagaattcatctggaacgacctgctgtccctggaaaccggcagcctgaagctggccaacggaagagtgatcgagaagacactgtacaacagaagaacccggcaggatgagcctgccctgttcgtggccctgaccttcgagcggcgggaggtcctggactcctccaatatcaaaccaatgaacctgatcggcgtggcaagaggcgaaaacatccccgccgtgatcgccctgaccgaccccgagggctgcccactgagccggtttaaggatagcctgggaaacccaacccacatcctgagaatcggcgagagctataaggagaagcagcggaccatccaggccaagaaggaggtggagcagcggagagccggcggctacagccggaagtacgccagcaaagccaagaatctggcagacgatatggtgagaaacaccgctagagatctgctgtactacgccgtgacccaggatgccatgctgatcttcgccaacctgagccggggcttcggccggcagggcaagcggaccttcatggccgagagacagtacacacggatggaggactggctgaccgccaagctggcctacgagggcctgagcaagacctacctgtccaagacactggcccagtacacctccaagacatgcagcaactgtgggtttaccatcaccagcgccgactacgacagggtgctggagaagctgaagaagacagcaacaggctggatgaccacaattaacggcaaggagctgaaggtggagggccagattacctactacaacagatacaagagacagaacgtagtcaaggacctgtccgtcgagctggatagactgagcgaagaatctgtgaacaacgacatctcctcctggacaaagggcagaagcggagaagctctgagcctcctgaagaaaagattctcccatagacccgtgcaggagaagttcgtgtgcctgaactgcggcttcgagacacacgcagccgagcaagccgccctgaacatcgccagatcctggctgttcctgcggagccaggagtacaagaaataccagacaaacaagacaaccggcaacaccgataagagagccttcgtcgagacctggcagtccttttaccggaagaagcttaaggaggtgtggaaacctgccgtgcggtctggcggatctggcggaggctccggcccccagggcgccagaagacaggccttcctggccttcggcgacgtgaccgtggacttcacccagaaggagtggagactgctgagccccgcccagagagccctgtacagagaggtgaccctggagaactacagccacctggtgagcctgggcatcctgcacagcaagcccgagctgatcagaagactggagcagggcgaggtgccctggggcgaggagagaagaagaagacccggccccggcggcccaagcagcggcgcccctcctcccagcggcggcagcccagccggctccccaacctctaccgaggagggcacctctgagtccgccacccccgagagcggccctggcacctccaccgagcccagcgagggcagcgcacccggcagccctgccggcagccccacctccacagaggagggaaccagcaccgagcccagcgaaggcagcgccccaggcaccagcaccgagcctagtgagcaggagattaaacggatcaacaagatcagaagaagacttgtgaaagacagcaacaccaagaaggccggcaagacaggccccatgaaaaccctgctggttagagtgatgacacccgatctgagagagcggctggaaaacctgagaaagaagcctgaaaatatcccccagcccatcagcaatacatctagagccaacctgaataagctgctgaccgattacaccgaaatgaagaaggcgatcctgcatgtgtactgggaagagttccagaaggaccctgtgggcctgatgagccgggtggcccagcctgccagcaagaagatcgatcagaacaagctgaaacctgagatggacgagaagggcaacctgaccaccgccggctttgcctgctctcagtgtggccagcccctgttcgtgtacaagctggagcaggtgtctgagaagggcaaggcttacaccaactacttcggacggtgcaatgtggccgagcacgaaaagctgatcctgctggcccagctgaagcccgagaaggatagcgacgaagccgtgacatatagcctgggaaagtttgggcagagggccctggatttctacagcattcatgtgaccaaggagtccacccaccccgtgaagcccctggcccagatcgccggaaacagatacgcctccggacctgtgggaaaggccctgagcgacgcatgtatgggcacaatcgcctccttcctgtctaagtaccaggacatcatcatcgaacaccagaaggtggtgaagggcaaccagaagagactggagagcctgcgggagctggccggcaaggaaaacctggaataccctagcgtgaccctgccacctcagcctcacaccaaggagggcgttgatgcctacaacgaagtgatcgcccgggtgcgaatgtgggtgaacctgaacctgtggcagaagctgaagctaagcagagatgatgccaagcctctgctgagactgaagggattcccttcctttcctctggtcgagagacaggccaacgaagtggactggtgggacatggtgtgtaacgtgaagaagctgatcaacgagaaaaaggaggatggcaaggtgttttggcagaatctggctggctacaagagacaggaagccctgagaccatacctgagcagcgaggaagatcggaagaagggaaagaaattcgctcggtaccagctgggcgacctgctgctgcacctggaaaagaagcacggcgaggactggggaaaggtgtacgacgaggcctgggagcggattgacaagaaagtggaaggcctgagcaagcacatcaagctggaagaggaacggagaagcgaggacgcccagagcaaggccgccctgaccgactggctgcgggctaaggccagcttcgtgatcgagggcctgaaggaggccgacaaggacgagttctgcagatgcgagctgaagctgcagaagtggtacggggacctgcggggaaagcccttcgccatcgaagccgagaacagcatcctggacatcagcggcttcagcaagcagtacaactgtgccttcatctggcagaaggacggcgtgaagaagctgaacctgtacctgatcatcaactacttcaagggcggcaagctgcggttcaagaagatcaaacctgaagccttcgaagccaacagattctacaccgtgatcaacaaaaagagcggcgagatcgtgcccatggaggtgaacttcaacttcgacgaccccaacctgatcatcctgcctctggcctttggcaagagacagggcagagaattcatctggaacgacctgctgtccctggaaaccggcagcctgaagctggccaacggaagagtgatcgagaagacactgtacaacagaagaacccggcaggatgagcctgccctgttcgtggccctgaccttcgagcggcgggaggtcctggactcctccaatatcaaaccaatgaacctgatcggcgtggcaagaggcgaaaacatccccgccgtgatcgccctgaccgaccccgagggctgcccactgagccggtttaaggatagcctgggaaacccaacccacatcctgagaatcggcgagagctataaggagaagcagcggaccatccaggccaagaaggaggtggagcagcggagagccggcggctacagccggaagtacgccagcaaagccaagaatctggcagacgatatggtgagaaacaccgctagagatctgctgtactacgccgtgacccaggatgccatgctgatcttcgccaacctgagccggggcttcggccggcagggcaagcggaccttcatggccgagagacagtacacacggatggaggactggctgaccgccaagctggcctacgagggcctgagcaagacctacctgtccaagacactggcccagtacacctccaagacatgcagcaactgtgggtttaccatcaccagcgccgactacgacagggtgctggagaagctgaagaagacagcaacaggctggatgaccacaattaacggcaaggagctgaaggtggagggccagattacctactacaacagatacaagagacagaacgtagtcaaggacctgtccgtcgagctggatagactgagcgaagaatctgtgaacaacgacatctcctcctggacaaagggcagaagcggagaagctctgagcctcctgaagaaaagattctcccatagacccgtgcaggagaagttcgtgtgcctgaactgcggcttcgagacacacgcagccgagcaagccgccctgaacatcgccagatcctggctgttcctgcggagccaggagtacaagaaataccagacaaacaagacaaccggcaacaccgataagagagccttcgtcgagacctggcagtccttttaccggaagaagcttaaggaggtgtggaaacctgccgtgcggtctggcggatctggcggaggctcctggcccccagggcgccagaagacaggccttcctggccttcggcgacgtgaccgtggacttcacccagaaggagtggagactgctgagccccgcccagagagccctgtacagagaggtgaccctggagaactacagccacctggtgagcctgggcatcctgcacagcaagcccgagctgatcagaagactggagcagggcgaggtgccctggggcgaggagagaagaagaagacccggccccggatctggctccggcagcggccccaagaaaaagagaaaagtctaagctgccttctgcggggcttgccttctggccatgcccttcttctctcccttgcacctgtacctcttggtctttgaataaagcctgagtaggaaggctagcaaaaaaaaaaaaaaaaaaaaaaaaaaaaaaaaaaaaaaaaaaaaaaaaaaaaaaaaaaaaaaaaaaaaaaaaaaaaaaaa

SEQ ID NO: 16714 - RNA, 9485 nt, synthetic construct
  source 1..9485: mol_type = other RNA
aggaaataagagagaaaagaagagtaagaagaaatataagagccaccatggcccctaagaagaagcgtaaagtgagccggatggaacgcctcgtctacgaggtgcggcagaagtgcagaaacatcgaggacatctgcatctcctgcggatctctgaacgtgaccctggagcacccactgttcatcggcggcatgtgccagaactgtaaaaactgttttctggagtgtgcctatcaatacgacgatgacggctaccagagctactgcaccatctgttgcggcggaagagaggtgctgatgtgtggaaataacaactgctgccggtgcttctgcgtggaatgcgtggacctgctggtgggccccggcgccgcccaggccgctattaaggaagatccttggaactgctacatgtgcggccacaagggcacatacggcctgctgagacggagagaggactggcctagcagactgcagatgttcttcgccaataaccacgaccaggagttcgacccccctaaggtgtaccctcccgtccccgccgagaagagaaagcccatccgggtcctgagcctgttcgatggcatcgccaccggtctgctggtgctgaaggacctgggcatccaggtggataggtacattgcctccgaggtgtgcgaggactccatcaccgtgggaatggtgcgtcatcagggcaagatcatgtacgtgggcgacgtgcggagcgtgacacagaagcatatccaggagtggggccctttcgacctggtgatcggcggcagcccttgcaatgacctgagcatcgtgaacccagcccggaagggcctgtacgagggaaccggcagactgttcttcgagttttacagactgctgcacgacgcccggcctaaggaaggcgacgaccggcccttcttttggctgttcgagaatgtggtggccatgggagtcagcgacaagcgggatattagccggttcctggagagcaaccccgtgatgatcgatgccaaggaagtgagcgccgcccaccgggccagatacttctggggcaatctgcctggcatgaacagacccctggccagcaccgtgaacgacaagctggagctgcaggagtgcctggagcacggccggatcgccaagttcagcaaggtgagaaccatcaccacccgaagcaacagcatcaaacaaggcaaggaccagcactttcctgtgttcatgaacgagaaggaggacatcctgtggtgtaccgagatggagagagtgttcgggttcccagtccactacacagatgtcagcaacatgtctagactggccagacagagactgctgggaagaagctggtccgtccctgtgatcagacacctgttcgcccctctgaaggagtacttcgcctgcgtgagcagcggcaacagcaacgccaacagccggggccccagcttctctagcggcctggtgccactgtccctgagagggagccacatgggccccatggagatctacaaaaccgtgagcgcctggaagcggcagcctgtgcgcgtgctgagcctgtttcggaatatcgataaagtcctgaaaagcctgggattcctggagagcggctctggctccggcggtggcaccctgaagtacgtggaggatgtgacaaacgtggtcagacgggatgtggagaagtggggccccttcgatctggtgtacggcagcacccaacccctgggcagctcttgtgaccggtgccctggctggtacatgtttcagttccaccggatcctgcagtacgccctgccgagacaggagtcccagcggccattcttttggattttcatggacaacttgctgctgaccgaggatgaccaggaaactaccactcggttcctgcagaccgaagccgtgaccctgcaggacgtgagaggccgggactaccagaacgccatgcgggtgtggtccaacatccctggactgaaaagcaagcacgcacctctgacccctaaagaagaggagtacctgcaggcccaggtgcggagcagaagcaagctggacgcccctaaggtggatctgctggtgaagaattgcctcctgcccctgagagagtacttcaagtatttcagccagaatagtctgcccctgggaggcagcggcggcggcgccctggtgacatttgaggacgtcgccgtgcggttcacccaggaggaatgggctctgctggatccttctcagaaaatcctgtaccgggacgtgatgagagagacataccggaatctgacctccgtgggcatcaactgggaatgttgggaccttgaagcctgcttcagaagcctgggaagaaacctgagagtgcaggtggtgaagagaaagtgcgagctgaccaacagcggcccctgcgccgagggcggcccaagcagcggcgcccctcctcccagcggcggcagcccagccggctccccaacctctaccgaggagggcacctctgagtccgccacccccgagagcggccctggcacctccaccgagcccagcgagggcagcgcacccggcagccctgccggcagccccacctccacagaggagggaaccagcaccgagcccagcgaaggcagcgccccaggcaccagcaccgagcctagtgagcaggagattaaacggatcaacaagatcagaagaagacttgtgaaagacagcaacaccaagaaggccggcaagacaggccccatgaaaaccctgctggttagagtgatgacacccgatctgagagagcggctggaaaacctgagaaagaagcctgaaaatatcccccagcccatcagcaatacatctagagccaacctgaataagctgctgaccgattacaccgaaatgaagaaggcgatcctgcatgtgtactgggaagagttccagaaggaccctgtgggcctgatgagccgggtggcccagcctgccagcaagaagatcgatcagaacaagctgaaacctgagatggacgagaagggcaacctgaccaccgccggctttgcctgctctcagtgtggccagcccctgttcgtgtacaagctggagcaggtgtctgagaagggcaaggcttacaccaactacttcggacggtgcaatgtggccgagcacgaaaagctgatcctgctggcccagctgaagcccgagaaggatagcgacgaagccgtgacatatagcctgggaaagtttgggcagagggccctggatttctacagcattcatgtgaccaaggagtccacccaccccgtgaagcccctggcccagatcgccggaaacagatacgcctccggacctgtgggaaaggccctgagcgacgcatgtatgggcacaatcgcctccttcctgtctaagtaccaggacatcatcatcgaacaccagaaggtggtgaagggcaaccagaagagactggagagcctgcgggagctggccggcaaggaaaacctggaataccctagcgtgaccctgccacctcagcctcacaccaaggagggcgttgatgcctacaacgaagtgatcgcccgggtgcgaatgtgggtgaacctgaacctgtggcagaagctgaagctaagcagagatgatgccaagcctctgctgagactgaagggattcccttcctttcctctggtcgagagacaggccaacgaagtggactggtgggacatggtgtgtaacgtgaagaagctgatcaacgagaaaaaggaggatggcaaggtgttttggcagaatctggctggctacaagagacaggaagccctgagaccatacctgagcagcgaggaagatcggaagaagggaaagaaattcgctcggtaccagctgggcgacctgctgctgcacctggaaaagaagcacggcgaggactggggaaaggtgtacgacgaggcctgggagcggattgacaagaaagtggaaggcctgagcaagcacatcaagctggaagaggaacggagaagcgaggacgcccagagcaaggccgccctgaccgactggctgcgggctaaggccagcttcgtgatcgagggcctgaaggaggccgacaaggacgagttctgcagatgcgagctgaagctgcagaagtggtacggggacctgcggggaaagcccttcgccatcgaagccgagaacagcatcctggacatcagcggcttcagcaagcagtacaactgtgccttcatctggcagaaggacggcgtgaagaagctgaacctgtacctgatcatcaactacttcaagggcggcaagctgcggttcaagaagatcaaacctgaagccttcgaagccaacagattctacaccgtgatcaacaaaaagagcggcgagatcgtgcccatggaggtgaacttcaacttcgacgaccccaacctgatcatcctgcctctggcctttggcaagagacagggcagagaattcatctggaacgacctgctgtccctggaaaccggcagcctgaagctggccaacggaagagtgatcgagaagacactgtacaacagaagaacccggcaggatgagcctgccctgttcgtggccctgaccttcgagcggcgggaggtcctggactcctccaatatcaaaccaatgaacctgatcggcgtggcaagaggcgaaaacatccccgccgtgatcgccctgaccgaccccgagggctgcccactgagccggtttaaggatagcctgggaaacccaacccacatcctgagaatcggcgagagctataaggagaagcagcggaccatccaggccaagaaggaggtggagcagcggagagccggcggctacagccggaagtacgccagcaaagccaagaatctggcagacgatatggtgagaaacaccgctagagatctgctgtactacgccgtgacccaggatgccatgctgatcttcgccaacctgagccggggcttcggccggcagggcaagcggaccttcatggccgagagacagtacacacggatggaggactggctgaccgccaagctggcctacgagggcctgagcaagacctacctgtccaagacactggcccagtacacctccaagacatgcagcaactgtgggtttaccatcaccagcgccgactacgacagggtgctggagaagctgaagaagacagcaacaggctggatgaccacaattaacggcaaggagctgaaggtggagggccagattacctactacaacagatacaagagacagaacgtagtcaaggacctgtccgtcgagctggatagactgagcgaagaatctgtgaacaacgacatctcctcctggacaaagggcagaagcggagaagctctgagcctcctgaagaaaagattctcccatagacccgtgcaggagaagttcgtgtgcctgaactgcggcttcgagacacacgcagccgagcaagccgccctgaacatcgccagatcctggctgttcctgcggagccaggagtacaagaaataccagacaaacaagacaaccggcaacaccgataagagagccttcgtcgagacctggcagtccttttaccggaagaagcttaaggaggtgtggaaacctgccgtgcggtctggcggatctggcggaggctcctgctaccaggacagcgtgaccttcgacgacgtggccgtggacttcacccaggaggagtggaccctgctggaccccacccagaggagcctgtacagcgacgtgatgctggagaactacaagaacctggccaccgtgggcggccagatcatcaagcccagcctgatcagctggctggagcaggaggagagcaggaccgtgaggggcggcgtgctgcagggcaggaagacccagtggaggggcaccggcggcccaagcagcggcgcccctcctcccagcggcggcagcccagccggctccccaacctctaccgaggagggcacctctgagtccgccacccccgagagcggccctggcacctccaccgagcccagcgagggcagcgcacccggcagccctgccggcagccccacctccacagaggagggaaccagcaccgagcccagcgaaggcagcgccccaggcaccagcaccgagcctagtgagcaggagattaaacggatcaacaagatcagaagaagacttgtgaaagacagcaacaccaagaaggccggcaagacaggccccatgaaaaccctgctggttagagtgatgacacccgatctgagagagcggctggaaaacctgagaaagaagcctgaaaatatcccccagcccatcagcaatacatctagagccaacctgaataagctgctgaccgattacaccgaaatgaagaaggcgatcctgcatgtgtactgggaagagttccagaaggaccctgtgggcctgatgagccgggtggcccagcctgccagcaagaagatcgatcagaacaagctgaaacctgagatggacgagaagggcaacctgaccaccgccggctttgcctgctctcagtgtggccagcccctgttcgtgtacaagctggagcaggtgtctgagaagggcaaggcttacaccaactacttcggacggtgcaatgtggccgagcacgaaaagctgatcctgctggcccagctgaagcccgagaaggatagcgacgaagccgtgacatatagcctgggaaagtttgggcagagggccctggatttctacagcattcatgtgaccaaggagtccacccaccccgtgaagcccctggcccagatcgccggaaacagatacgcctccggacctgtgggaaaggccctgagcgacgcatgtatgggcacaatcgcctccttcctgtctaagtaccaggacatcatcatcgaacaccagaaggtggtgaagggcaaccagaagagactggagagcctgcgggagctggccggcaaggaaaacctggaataccctagcgtgaccctgccacctcagcctcacaccaaggagggcgttgatgcctacaacgaagtgatcgcccgggtgcgaatgtgggtgaacctgaacctgtggcagaagctgaagctaagcagagatgatgccaagcctctgctgagactgaagggattcccttcctttcctctggtcgagagacaggccaacgaagtggactggtgggacatggtgtgtaacgtgaagaagctgatcaacgagaaaaaggaggatggcaaggtgttttggcagaatctggctggctacaagagacaggaagccctgagaccatacctgagcagcgaggaagatcggaagaagggaaagaaattcgctcggtaccagctgggcgacctgctgctgcacctggaaaagaagcacggcgaggactggggaaaggtgtacgacgaggcctgggagcggattgacaagaaagtggaaggcctgagcaagcacatcaagctggaagaggaacggagaagcgaggacgcccagagcaaggccgccctgaccgactggctgcgggctaaggccagcttcgtgatcgagggcctgaaggaggccgacaaggacgagttctgcagatgcgagctgaagctgcagaagtggtacggggacctgcggggaaagcccttcgccatcgaagccgagaacagcatcctggacatcagcggcttcagcaagcagtacaactgtgccttcatctggcagaaggacggcgtgaagaagctgaacctgtacctgatcatcaactacttcaagggcggcaagctgcggttcaagaagatcaaacctgaagccttcgaagccaacagattctacaccgtgatcaacaaaaagagcggcgagatcgtgcccatggaggtgaacttcaacttcgacgaccccaacctgatcatcctgcctctggcctttggcaagagacagggcagagaattcatctggaacgacctgctgtccctggaaaccggcagcctgaagctggccaacggaagagtgatcgagaagacactgtacaacagaagaacccggcaggatgagcctgccctgttcgtggccctgaccttcgagcggcgggaggtcctggactcctccaatatcaaaccaatgaacctgatcggcgtggcaagaggcgaaaacatccccgccgtgatcgccctgaccgaccccgagggctgcccactgagccggtttaaggatagcctgggaaacccaacccacatcctgagaatcggcgagagctataaggagaagcagcggaccatccaggccaagaaggaggtggagcagcggagagccggcggctacagccggaagtacgccagcaaagccaagaatctggcagacgatatggtgagaaacaccgctagagatctgctgtactacgccgtgacccaggatgccatgctgatcttcgccaacctgagccggggcttcggccggcagggcaagcggaccttcatggccgagagacagtacacacggatggaggactggctgaccgccaagctggcctacgagggcctgagcaagacctacctgtccaagacactggcccagtacacctccaagacatgcagcaactgtgggtttaccatcaccagcgccgactacgacagggtgctggagaagctgaagaagacagcaacaggctggatgaccacaattaacggcaaggagctgaaggtggagggccagattacctactacaacagatacaagagacagaacgtagtcaaggacctgtccgtcgagctggatagactgagcgaagaatctgtgaacaacgacatctcctcctggacaaagggcagaagcggagaagctctgagcctcctgaagaaaagattctcccatagacccgtgcaggagaagttcgtgtgcctgaactgcggcttcgagacacacgcagccgagcaagccgccctgaacatcgccagatcctggctgttcctgcggagccaggagtacaagaaataccagacaaacaagacaaccggcaacaccgataagagagccttcgtcgagacctggcagtccttttaccggaagaagcttaaggaggtgtggaaacctgccgtgcggtctggcggatctggcggaggctccttgctaccaggacagcgtgaccttcgacgacgtggccgtggacttcacccaggaggagtggaccctgctggaccccacccagaggagcctgtacagcgacgtgatgctggagaactacaagaacctggccaccgtgggcggccagatcatcaagcccagcctgatcagctggctggagcaggaggagagcaggaccgtgaggggcggcgtgctgcagggcaggaagacccagtggaggggcaccggatctggctccggcagcggccccaagaaaaagagaaaagtctaagctgccttctgcggggcttgccttctggccatgcccttcttctctcccttgcacctgtacctcttggtctttgaataaagcctgagtaggaaggctagcaaaaaaaaaaaaaaaaaaaaaaaaaaaaaaaaaaaaaaaaaaaaaaaaaaaaaaaaaaaaaaaaaaaaaaaaaaaaaaaa

SEQ ID NO: 16715 - RNA, 9485 nt, synthetic construct
  source 1..9485: mol_type = other RNA
aggaaataagagagaaaagaagagtaagaagaaatataagagccaccatggcccctaagaagaagcgtaaagtgagccggatggaacgcctcgtctacgaggtgcggcagaagtgcagaaacatcgaggacatctgcatctcctgcggatctctgaacgtgaccctggagcacccactgttcatcggcggcatgtgccagaactgtaaaaactgttttctggagtgtgcctatcaatacgacgatgacggctaccagagctactgcaccatctgttgcggcggaagagaggtgctgatgtgtggaaataacaactgctgccggtgcttctgcgtggaatgcgtggacctgctggtgggccccggcgccgcccaggccgctattaaggaagatccttggaactgctacatgtgcggccacaagggcacatacggcctgctgagacggagagaggactggcctagcagactgcagatgttcttcgccaataaccacgaccaggagttcgacccccctaaggtgtaccctcccgtccccgccgagaagagaaagcccatccgggtcctgagcctgttcgatggcatcgccaccggtctgctggtgctgaaggacctgggcatccaggtggataggtacattgcctccgaggtgtgcgaggactccatcaccgtgggaatggtgcgtcatcagggcaagatcatgtacgtgggcgacgtgcggagcgtgacacagaagcatatccaggagtggggccctttcgacctggtgatcggcggcagcccttgcaatgacctgagcatcgtgaacccagcccggaagggcctgtacgagggaaccggcagactgttcttcgagttttacagactgctgcacgacgcccggcctaaggaaggcgacgaccggcccttcttttggctgttcgagaatgtggtggccatgggagtcagcgacaagcgggatattagccggttcctggagagcaaccccgtgatgatcgatgccaaggaagtgagcgccgcccaccgggccagatacttctggggcaatctgcctggcatgaacagacccctggccagcaccgtgaacgacaagctggagctgcaggagtgcctggagcacggccggatcgccaagttcagcaaggtgagaaccatcaccacccgaagcaacagcatcaaacaaggcaaggaccagcactttcctgtgttcatgaacgagaaggaggacatcctgtggtgtaccgagatggagagagtgttcgggttcccagtccactacacagatgtcagcaacatgtctagactggccagacagagactgctgggaagaagctggtccgtccctgtgatcagacacctgttcgcccctctgaaggagtacttcgcctgcgtgagcagcggcaacagcaacgccaacagccggggccccagcttctctagcggcctggtgccactgtccctgagagggagccacatgggccccatggagatctacaaaaccgtgagcgcctggaagcggcagcctgtgcgcgtgctgagcctgtttcggaatatcgataaagtcctgaaaagcctgggattcctggagagcggctctggctccggcggtggcaccctgaagtacgtggaggatgtgacaaacgtggtcagacgggatgtggagaagtggggccccttcgatctggtgtacggcagcacccaacccctgggcagctcttgtgaccggtgccctggctggtacatgtttcagttccaccggatcctgcagtacgccctgccgagacaggagtcccagcggccattcttttggattttcatggacaacttgctgctgaccgaggatgaccaggaaactaccactcggttcctgcagaccgaagccgtgaccctgcaggacgtgagaggccgggactaccagaacgccatgcgggtgtggtccaacatccctggactgaaaagcaagcacgcacctctgacccctaaagaagaggagtacctgcaggcccaggtgcggagcagaagcaagctggacgcccctaaggtggatctgctggtgaagaattgcctcctgcccctgagagagtacttcaagtatttcagccagaatagtctgcccctgggaggcagcggcggcggcgccctggtgacatttgaggacgtcgccgtgcggttcacccaggaggaatgggctctgctggatccttctcagaaaatcctgtaccgggacgtgatgagagagacataccggaatctgacctccgtgggcatcaactgggaatgttgggaccttgaagcctgcttcagaagcctgggaagaaacctgagagtgcaggtggtgaagagaaagtgcgagctgaccaacagcggcccctgcgccgagggcggcccaagcagcggcgcccctcctcccagcggcggcagcccagccggctccccaacctctaccgaggagggcacctctgagtccgccacccccgagagcggccctggcacctccaccgagcccagcgagggcagcgcacccggcagccctgccggcagccccacctccacagaggagggaaccagcaccgagcccagcgaaggcagcgccccaggcaccagcaccgagcctagtgagcaggagattaaacggatcaacaagatcagaagaagacttgtgaaagacagcaacaccaagaaggccggcaagacaggccccatgaaaaccctgctggttagagtgatgacacccgatctgagagagcggctggaaaacctgagaaagaagcctgaaaatatcccccagcccatcagcaatacatctagagccaacctgaataagctgctgaccgattacaccgaaatgaagaaggcgatcctgcatgtgtactgggaagagttccagaaggaccctgtgggcctgatgagccgggtggcccagcctgccagcaagaagatcgatcagaacaagctgaaacctgagatggacgagaagggcaacctgaccaccgccggctttgcctgctctcagtgtggccagcccctgttcgtgtacaagctggagcaggtgtctgagaagggcaaggcttacaccaactacttcggacggtgcaatgtggccgagcacgaaaagctgatcctgctggcccagctgaagcccgagaaggatagcgacgaagccgtgacatatagcctgggaaagtttgggcagagggccctggatttctacagcattcatgtgaccaaggagtccacccaccccgtgaagcccctggcccagatcgccggaaacagatacgcctccggacctgtgggaaaggccctgagcgacgcatgtatgggcacaatcgcctccttcctgtctaagtaccaggacatcatcatcgaacaccagaaggtggtgaagggcaaccagaagagactggagagcctgcgggagctggccggcaaggaaaacctggaataccctagcgtgaccctgccacctcagcctcacaccaaggagggcgttgatgcctacaacgaagtgatcgcccgggtgcgaatgtgggtgaacctgaacctgtggcagaagctgaagctaagcagagatgatgccaagcctctgctgagactgaagggattcccttcctttcctctggtcgagagacaggccaacgaagtggactggtgggacatggtgtgtaacgtgaagaagctgatcaacgagaaaaaggaggatggcaaggtgttttggcagaatctggctggctacaagagacaggaagccctgagaccatacctgagcagcgaggaagatcggaagaagggaaagaaattcgctcggtaccagctgggcgacctgctgctgcacctggaaaagaagcacggcgaggactggggaaaggtgtacgacgaggcctgggagcggattgacaagaaagtggaaggcctgagcaagcacatcaagctggaagaggaacggagaagcgaggacgcccagagcaaggccgccctgaccgactggctgcgggctaaggccagcttcgtgatcgagggcctgaaggaggccgacaaggacgagttctgcagatgcgagctgaagctgcagaagtggtacggggacctgcggggaaagcccttcgccatcgaagccgagaacagcatcctggacatcagcggcttcagcaagcagtacaactgtgccttcatctggcagaaggacggcgtgaagaagctgaacctgtacctgatcatcaactacttcaagggcggcaagctgcggttcaagaagatcaaacctgaagccttcgaagccaacagattctacaccgtgatcaacaaaaagagcggcgagatcgtgcccatggaggtgaacttcaacttcgacgaccccaacctgatcatcctgcctctggcctttggcaagagacagggcagagaattcatctggaacgacctgctgtccctggaaaccggcagcctgaagctggccaacggaagagtgatcgagaagacactgtacaacagaagaacccggcaggatgagcctgccctgttcgtggccctgaccttcgagcggcgggaggtcctggactcctccaatatcaaaccaatgaacctgatcggcgtggcaagaggcgaaaacatccccgccgtgatcgccctgaccgaccccgagggctgcccactgagccggtttaaggatagcctgggaaacccaacccacatcctgagaatcggcgagagctataaggagaagcagcggaccatccaggccaagaaggaggtggagcagcggagagccggcggctacagccggaagtacgccagcaaagccaagaatctggcagacgatatggtgagaaacaccgctagagatctgctgtactacgccgtgacccaggatgccatgctgatcttcgccaacctgagccggggcttcggccggcagggcaagcggaccttcatggccgagagacagtacacacggatggaggactggctgaccgccaagctggcctacgagggcctgagcaagacctacctgtccaagacactggcccagtacacctccaagacatgcagcaactgtgggtttaccatcaccagcgccgactacgacagggtgctggagaagctgaagaagacagcaacaggctggatgaccacaattaacggcaaggagctgaaggtggagggccagattacctactacaacagatacaagagacagaacgtagtcaaggacctgtccgtcgagctggatagactgagcgaagaatctgtgaacaacgacatctcctcctggacaaagggcagaagcggagaagctctgagcctcctgaagaaaagattctcccatagacccgtgcaggagaagttcgtgtgcctgaactgcggcttcgagacacacgcagccgagcaagccgccctgaacatcgccagatcctggctgttcctgcggagccaggagtacaagaaataccagacaaacaagacaaccggcaacaccgataagagagccttcgtcgagacctggcagtccttttaccggaagaagcttaaggaggtgtggaaacctgccgtgcggtctggcggatctggcggaggctccttccaggccagcgtgaccttcaaggacgtggccgtggacttcacctgggaggagtggaggctgctggaccccccccagaaggagctgttctgggaggtgatgctggagaactacaggaacctggtgtgcctgggcctggccgacagcaacaaggacgtgatgatcagcgagctggagagcggcgagccccactggatccccaccggcggcgtgctgaggagctgctggcccggctgggagagcggcggcccaagcagcggcgcccctcctcccagcggcggcagcccagccggctccccaacctctaccgaggagggcacctctgagtccgccacccccgagagcggccctggcacctccaccgagcccagcgagggcagcgcacccggcagccctgccggcagccccacctccacagaggagggaaccagcaccgagcccagcgaaggcagcgccccaggcaccagcaccgagcctagtgagcaggagattaaacggatcaacaagatcagaagaagacttgtgaaagacagcaacaccaagaaggccggcaagacaggccccatgaaaaccctgctggttagagtgatgacacccgatctgagagagcggctggaaaacctgagaaagaagcctgaaaatatcccccagcccatcagcaatacatctagagccaacctgaataagctgctgaccgattacaccgaaatgaagaaggcgatcctgcatgtgtactgggaagagttccagaaggaccctgtgggcctgatgagccgggtggcccagcctgccagcaagaagatcgatcagaacaagctgaaacctgagatggacgagaagggcaacctgaccaccgccggctttgcctgctctcagtgtggccagcccctgttcgtgtacaagctggagcaggtgtctgagaagggcaaggcttacaccaactacttcggacggtgcaatgtggccgagcacgaaaagctgatcctgctggcccagctgaagcccgagaaggatagcgacgaagccgtgacatatagcctgggaaagtttgggcagagggccctggatttctacagcattcatgtgaccaaggagtccacccaccccgtgaagcccctggcccagatcgccggaaacagatacgcctccggacctgtgggaaaggccctgagcgacgcatgtatgggcacaatcgcctccttcctgtctaagtaccaggacatcatcatcgaacaccagaaggtggtgaagggcaaccagaagagactggagagcctgcgggagctggccggcaaggaaaacctggaataccctagcgtgaccctgccacctcagcctcacaccaaggagggcgttgatgcctacaacgaagtgatcgcccgggtgcgaatgtgggtgaacctgaacctgtggcagaagctgaagctaagcagagatgatgccaagcctctgctgagactgaagggattcccttcctttcctctggtcgagagacaggccaacgaagtggactggtgggacatggtgtgtaacgtgaagaagctgatcaacgagaaaaaggaggatggcaaggtgttttggcagaatctggctggctacaagagacaggaagccctgagaccatacctgagcagcgaggaagatcggaagaagggaaagaaattcgctcggtaccagctgggcgacctgctgctgcacctggaaaagaagcacggcgaggactggggaaaggtgtacgacgaggcctgggagcggattgacaagaaagtggaaggcctgagcaagcacatcaagctggaagaggaacggagaagcgaggacgcccagagcaaggccgccctgaccgactggctgcgggctaaggccagcttcgtgatcgagggcctgaaggaggccgacaaggacgagttctgcagatgcgagctgaagctgcagaagtggtacggggacctgcggggaaagcccttcgccatcgaagccgagaacagcatcctggacatcagcggcttcagcaagcagtacaactgtgccttcatctggcagaaggacggcgtgaagaagctgaacctgtacctgatcatcaactacttcaagggcggcaagctgcggttcaagaagatcaaacctgaagccttcgaagccaacagattctacaccgtgatcaacaaaaagagcggcgagatcgtgcccatggaggtgaacttcaacttcgacgaccccaacctgatcatcctgcctctggcctttggcaagagacagggcagagaattcatctggaacgacctgctgtccctggaaaccggcagcctgaagctggccaacggaagagtgatcgagaagacactgtacaacagaagaacccggcaggatgagcctgccctgttcgtggccctgaccttcgagcggcgggaggtcctggactcctccaatatcaaaccaatgaacctgatcggcgtggcaagaggcgaaaacatccccgccgtgatcgccctgaccgaccccgagggctgcccactgagccggtttaaggatagcctgggaaacccaacccacatcctgagaatcggcgagagctataaggagaagcagcggaccatccaggccaagaaggaggtggagcagcggagagccggcggctacagccggaagtacgccagcaaagccaagaatctggcagacgatatggtgagaaacaccgctagagatctgctgtactacgccgtgacccaggatgccatgctgatcttcgccaacctgagccggggcttcggccggcagggcaagcggaccttcatggccgagagacagtacacacggatggaggactggctgaccgccaagctggcctacgagggcctgagcaagacctacctgtccaagacactggcccagtacacctccaagacatgcagcaactgtgggtttaccatcaccagcgccgactacgacagggtgctggagaagctgaagaagacagcaacaggctggatgaccacaattaacggcaaggagctgaaggtggagggccagattacctactacaacagatacaagagacagaacgtagtcaaggacctgtccgtcgagctggatagactgagcgaagaatctgtgaacaacgacatctcctcctggacaaagggcagaagcggagaagctctgagcctcctgaagaaaagattctcccatagacccgtgcaggagaagttcgtgtgcctgaactgcggcttcgagacacacgcagccgagcaagccgccctgaacatcgccagatcctggctgttcctgcggagccaggagtacaagaaataccagacaaacaagacaaccggcaacaccgataagagagccttcgtcgagacctggcagtccttttaccggaagaagcttaaggaggtgtggaaacctgccgtgcggtctggcggatctggcggaggctcctttccaggccagcgtgaccttcaaggacgtggccgtggacttcacctgggaggagtggaggctgctggaccccccccagaaggagctgttctgggaggtgatgctggagaactacaggaacctggtgtgcctgggcctggccgacagcaacaaggacgtgatgatcagcgagctggagagcggcgagccccactggatccccaccggcggcgtgctgaggagctgctggcccggctgggagagcggatctggctccggcagcggccccaagaaaaagagaaaagtctaagctgccttctgcggggcttgccttctggccatgcccttcttctctcccttgcacctgtacctcttggtctttgaataaagcctgagtaggaaggctagcaaaaaaaaaaaaaaaaaaaaaaaaaaaaaaaaaaaaaaaaaaaaaaaaaaaaaaaaaaaaaaaaaaaaaaaaaaaaaaaa

SEQ ID NO: 16716 - RNA, 9485 nt, synthetic construct
  source 1..9485: mol_type = other RNA
aggaaataagagagaaaagaagagtaagaagaaatataagagccaccatggcccctaagaagaagcgtaaagtgagccggatggaacgcctcgtctacgaggtgcggcagaagtgcagaaacatcgaggacatctgcatctcctgcggatctctgaacgtgaccctggagcacccactgttcatcggcggcatgtgccagaactgtaaaaactgttttctggagtgtgcctatcaatacgacgatgacggctaccagagctactgcaccatctgttgcggcggaagagaggtgctgatgtgtggaaataacaactgctgccggtgcttctgcgtggaatgcgtggacctgctggtgggccccggcgccgcccaggccgctattaaggaagatccttggaactgctacatgtgcggccacaagggcacatacggcctgctgagacggagagaggactggcctagcagactgcagatgttcttcgccaataaccacgaccaggagttcgacccccctaaggtgtaccctcccgtccccgccgagaagagaaagcccatccgggtcctgagcctgttcgatggcatcgccaccggtctgctggtgctgaaggacctgggcatccaggtggataggtacattgcctccgaggtgtgcgaggactccatcaccgtgggaatggtgcgtcatcagggcaagatcatgtacgtgggcgacgtgcggagcgtgacacagaagcatatccaggagtggggccctttcgacctggtgatcggcggcagcccttgcaatgacctgagcatcgtgaacccagcccggaagggcctgtacgagggaaccggcagactgttcttcgagttttacagactgctgcacgacgcccggcctaaggaaggcgacgaccggcccttcttttggctgttcgagaatgtggtggccatgggagtcagcgacaagcgggatattagccggttcctggagagcaaccccgtgatgatcgatgccaaggaagtgagcgccgcccaccgggccagatacttctggggcaatctgcctggcatgaacagacccctggccagcaccgtgaacgacaagctggagctgcaggagtgcctggagcacggccggatcgccaagttcagcaaggtgagaaccatcaccacccgaagcaacagcatcaaacaaggcaaggaccagcactttcctgtgttcatgaacgagaaggaggacatcctgtggtgtaccgagatggagagagtgttcgggttcccagtccactacacagatgtcagcaacatgtctagactggccagacagagactgctgggaagaagctggtccgtccctgtgatcagacacctgttcgcccctctgaaggagtacttcgcctgcgtgagcagcggcaacagcaacgccaacagccggggccccagcttctctagcggcctggtgccactgtccctgagagggagccacatgggccccatggagatctacaaaaccgtgagcgcctggaagcggcagcctgtgcgcgtgctgagcctgtttcggaatatcgataaagtcctgaaaagcctgggattcctggagagcggctctggctccggcggtggcaccctgaagtacgtggaggatgtgacaaacgtggtcagacgggatgtggagaagtggggccccttcgatctggtgtacggcagcacccaacccctgggcagctcttgtgaccggtgccctggctggtacatgtttcagttccaccggatcctgcagtacgccctgccgagacaggagtcccagcggccattcttttggattttcatggacaacttgctgctgaccgaggatgaccaggaaactaccactcggttcctgcagaccgaagccgtgaccctgcaggacgtgagaggccgggactaccagaacgccatgcgggtgtggtccaacatccctggactgaaaagcaagcacgcacctctgacccctaaagaagaggagtacctgcaggcccaggtgcggagcagaagcaagctggacgcccctaaggtggatctgctggtgaagaattgcctcctgcccctgagagagtacttcaagtatttcagccagaatagtctgcccctgggaggcagcggcggcggcgccctggtgacatttgaggacgtcgccgtgcggttcacccaggaggaatgggctctgctggatccttctcagaaaatcctgtaccgggacgtgatgagagagacataccggaatctgacctccgtgggcatcaactgggaatgttgggaccttgaagcctgcttcagaagcctgggaagaaacctgagagtgcaggtggtgaagagaaagtgcgagctgaccaacagcggcccctgcgccgagggcggcccaagcagcggcgcccctcctcccagcggcggcagcccagccggctccccaacctctaccgaggagggcacctctgagtccgccacccccgagagcggccctggcacctccaccgagcccagcgagggcagcgcacccggcagccctgccggcagccccacctccacagaggagggaaccagcaccgagcccagcgaaggcagcgccccaggcaccagcaccgagcctagtgagcaggagattaaacggatcaacaagatcagaagaagacttgtgaaagacagcaacaccaagaaggccggcaagacaggccccatgaaaaccctgctggttagagtgatgacacccgatctgagagagcggctggaaaacctgagaaagaagcctgaaaatatcccccagcccatcagcaatacatctagagccaacctgaataagctgctgaccgattacaccgaaatgaagaaggcgatcctgcatgtgtactgggaagagttccagaaggaccctgtgggcctgatgagccgggtggcccagcctgccagcaagaagatcgatcagaacaagctgaaacctgagatggacgagaagggcaacctgaccaccgccggctttgcctgctctcagtgtggccagcccctgttcgtgtacaagctggagcaggtgtctgagaagggcaaggcttacaccaactacttcggacggtgcaatgtggccgagcacgaaaagctgatcctgctggcccagctgaagcccgagaaggatagcgacgaagccgtgacatatagcctgggaaagtttgggcagagggccctggatttctacagcattcatgtgaccaaggagtccacccaccccgtgaagcccctggcccagatcgccggaaacagatacgcctccggacctgtgggaaaggccctgagcgacgcatgtatgggcacaatcgcctccttcctgtctaagtaccaggacatcatcatcgaacaccagaaggtggtgaagggcaaccagaagagactggagagcctgcgggagctggccggcaaggaaaacctggaataccctagcgtgaccctgccacctcagcctcacaccaaggagggcgttgatgcctacaacgaagtgatcgcccgggtgcgaatgtgggtgaacctgaacctgtggcagaagctgaagctaagcagagatgatgccaagcctctgctgagactgaagggattcccttcctttcctctggtcgagagacaggccaacgaagtggactggtgggacatggtgtgtaacgtgaagaagctgatcaacgagaaaaaggaggatggcaaggtgttttggcagaatctggctggctacaagagacaggaagccctgagaccatacctgagcagcgaggaagatcggaagaagggaaagaaattcgctcggtaccagctgggcgacctgctgctgcacctggaaaagaagcacggcgaggactggggaaaggtgtacgacgaggcctgggagcggattgacaagaaagtggaaggcctgagcaagcacatcaagctggaagaggaacggagaagcgaggacgcccagagcaaggccgccctgaccgactggctgcgggctaaggccagcttcgtgatcgagggcctgaaggaggccgacaaggacgagttctgcagatgcgagctgaagctgcagaagtggtacggggacctgcggggaaagcccttcgccatcgaagccgagaacagcatcctggacatcagcggcttcagcaagcagtacaactgtgccttcatctggcagaaggacggcgtgaagaagctgaacctgtacctgatcatcaactacttcaagggcggcaagctgcggttcaagaagatcaaacctgaagccttcgaagccaacagattctacaccgtgatcaacaaaaagagcggcgagatcgtgcccatggaggtgaacttcaacttcgacgaccccaacctgatcatcctgcctctggcctttggcaagagacagggcagagaattcatctggaacgacctgctgtccctggaaaccggcagcctgaagctggccaacggaagagtgatcgagaagacactgtacaacagaagaacccggcaggatgagcctgccctgttcgtggccctgaccttcgagcggcgggaggtcctggactcctccaatatcaaaccaatgaacctgatcggcgtggcaagaggcgaaaacatccccgccgtgatcgccctgaccgaccccgagggctgcccactgagccggtttaaggatagcctgggaaacccaacccacatcctgagaatcggcgagagctataaggagaagcagcggaccatccaggccaagaaggaggtggagcagcggagagccggcggctacagccggaagtacgccagcaaagccaagaatctggcagacgatatggtgagaaacaccgctagagatctgctgtactacgccgtgacccaggatgccatgctgatcttcgccaacctgagccggggcttcggccggcagggcaagcggaccttcatggccgagagacagtacacacggatggaggactggctgaccgccaagctggcctacgagggcctgagcaagacctacctgtccaagacactggcccagtacacctccaagacatgcagcaactgtgggtttaccatcaccagcgccgactacgacagggtgctggagaagctgaagaagacagcaacaggctggatgaccacaattaacggcaaggagctgaaggtggagggccagattacctactacaacagatacaagagacagaacgtagtcaaggacctgtccgtcgagctggatagactgagcgaagaatctgtgaacaacgacatctcctcctggacaaagggcagaagcggagaagctctgagcctcctgaagaaaagattctcccatagacccgtgcaggagaagttcgtgtgcctgaactgcggcttcgagacacacgcagccgagcaagccgccctgaacatcgccagatcctggctgttcctgcggagccaggagtacaagaaataccagacaaacaagacaaccggcaacaccgataagagagccttcgtcgagacctggcagtccttttaccggaagaagcttaaggaggtgtggaaacctgccgtgcggtctggcggatctggcggaggctccatgatcaactaccagacccccgtgagcttcaaggacgtggtggtgggcttcacccaggaggagtggcacaggctgaaccccacccagagggccctgtacagggacgtgatgctggagacctacagcaacctggtgagcgtgggctacgagggcaccaagcccgacgtgatcctgaggctggagcaggaggaggccccctggatcggcgaggccgcctgcctgggctgccactgctgggaggacggcggcccaagcagcggcgcccctcctcccagcggcggcagcccagccggctccccaacctctaccgaggagggcacctctgagtccgccacccccgagagcggccctggcacctccaccgagcccagcgagggcagcgcacccggcagccctgccggcagccccacctccacagaggagggaaccagcaccgagcccagcgaaggcagcgccccaggcaccagcaccgagcctagtgagcaggagattaaacggatcaacaagatcagaagaagacttgtgaaagacagcaacaccaagaaggccggcaagacaggccccatgaaaaccctgctggttagagtgatgacacccgatctgagagagcggctggaaaacctgagaaagaagcctgaaaatatcccccagcccatcagcaatacatctagagccaacctgaataagctgctgaccgattacaccgaaatgaagaaggcgatcctgcatgtgtactgggaagagttccagaaggaccctgtgggcctgatgagccgggtggcccagcctgccagcaagaagatcgatcagaacaagctgaaacctgagatggacgagaagggcaacctgaccaccgccggctttgcctgctctcagtgtggccagcccctgttcgtgtacaagctggagcaggtgtctgagaagggcaaggcttacaccaactacttcggacggtgcaatgtggccgagcacgaaaagctgatcctgctggcccagctgaagcccgagaaggatagcgacgaagccgtgacatatagcctgggaaagtttgggcagagggccctggatttctacagcattcatgtgaccaaggagtccacccaccccgtgaagcccctggcccagatcgccggaaacagatacgcctccggacctgtgggaaaggccctgagcgacgcatgtatgggcacaatcgcctccttcctgtctaagtaccaggacatcatcatcgaacaccagaaggtggtgaagggcaaccagaagagactggagagcctgcgggagctggccggcaaggaaaacctggaataccctagcgtgaccctgccacctcagcctcacaccaaggagggcgttgatgcctacaacgaagtgatcgcccgggtgcgaatgtgggtgaacctgaacctgtggcagaagctgaagctaagcagagatgatgccaagcctctgctgagactgaagggattcccttcctttcctctggtcgagagacaggccaacgaagtggactggtgggacatggtgtgtaacgtgaagaagctgatcaacgagaaaaaggaggatggcaaggtgttttggcagaatctggctggctacaagagacaggaagccctgagaccatacctgagcagcgaggaagatcggaagaagggaaagaaattcgctcggtaccagctgggcgacctgctgctgcacctggaaaagaagcacggcgaggactggggaaaggtgtacgacgaggcctgggagcggattgacaagaaagtggaaggcctgagcaagcacatcaagctggaagaggaacggagaagcgaggacgcccagagcaaggccgccctgaccgactggctgcgggctaaggccagcttcgtgatcgagggcctgaaggaggccgacaaggacgagttctgcagatgcgagctgaagctgcagaagtggtacggggacctgcggggaaagcccttcgccatcgaagccgagaacagcatcctggacatcagcggcttcagcaagcagtacaactgtgccttcatctggcagaaggacggcgtgaagaagctgaacctgtacctgatcatcaactacttcaagggcggcaagctgcggttcaagaagatcaaacctgaagccttcgaagccaacagattctacaccgtgatcaacaaaaagagcggcgagatcgtgcccatggaggtgaacttcaacttcgacgaccccaacctgatcatcctgcctctggcctttggcaagagacagggcagagaattcatctggaacgacctgctgtccctggaaaccggcagcctgaagctggccaacggaagagtgatcgagaagacactgtacaacagaagaacccggcaggatgagcctgccctgttcgtggccctgaccttcgagcggcgggaggtcctggactcctccaatatcaaaccaatgaacctgatcggcgtggcaagaggcgaaaacatccccgccgtgatcgccctgaccgaccccgagggctgcccactgagccggtttaaggatagcctgggaaacccaacccacatcctgagaatcggcgagagctataaggagaagcagcggaccatccaggccaagaaggaggtggagcagcggagagccggcggctacagccggaagtacgccagcaaagccaagaatctggcagacgatatggtgagaaacaccgctagagatctgctgtactacgccgtgacccaggatgccatgctgatcttcgccaacctgagccggggcttcggccggcagggcaagcggaccttcatggccgagagacagtacacacggatggaggactggctgaccgccaagctggcctacgagggcctgagcaagacctacctgtccaagacactggcccagtacacctccaagacatgcagcaactgtgggtttaccatcaccagcgccgactacgacagggtgctggagaagctgaagaagacagcaacaggctggatgaccacaattaacggcaaggagctgaaggtggagggccagattacctactacaacagatacaagagacagaacgtagtcaaggacctgtccgtcgagctggatagactgagcgaagaatctgtgaacaacgacatctcctcctggacaaagggcagaagcggagaagctctgagcctcctgaagaaaagattctcccatagacccgtgcaggagaagttcgtgtgcctgaactgcggcttcgagacacacgcagccgagcaagccgccctgaacatcgccagatcctggctgttcctgcggagccaggagtacaagaaataccagacaaacaagacaaccggcaacaccgataagagagccttcgtcgagacctggcagtccttttaccggaagaagcttaaggaggtgtggaaacctgccgtgcggtctggcggatctggcggaggctcctatgatcaactaccagacccccgtgagcttcaaggacgtggtggtgggcttcacccaggaggagtggcacaggctgaaccccacccagagggccctgtacagggacgtgatgctggagacctacagcaacctggtgagcgtgggctacgagggcaccaagcccgacgtgatcctgaggctggagcaggaggaggccccctggatcggcgaggccgcctgcctgggctgccactgctgggaggacggatctggctccggcagcggccccaagaaaaagagaaaagtctaagctgccttctgcggggcttgccttctggccatgcccttcttctctcccttgcacctgtacctcttggtctttgaataaagcctgagtaggaaggctagcaaaaaaaaaaaaaaaaaaaaaaaaaaaaaaaaaaaaaaaaaaaaaaaaaaaaaaaaaaaaaaaaaaaaaaaaaaaaaaaa

SEQ ID NO: 16717 - RNA, 9485 nt, synthetic construct
  source 1..9485: mol_type = other RNA
aggaaataagagagaaaagaagagtaagaagaaatataagagccaccatggcccctaagaagaagcgtaaagtgagccggatggaacgcctcgtctacgaggtgcggcagaagtgcagaaacatcgaggacatctgcatctcctgcggatctctgaacgtgaccctggagcacccactgttcatcggcggcatgtgccagaactgtaaaaactgttttctggagtgtgcctatcaatacgacgatgacggctaccagagctactgcaccatctgttgcggcggaagagaggtgctgatgtgtggaaataacaactgctgccggtgcttctgcgtggaatgcgtggacctgctggtgggccccggcgccgcccaggccgctattaaggaagatccttggaactgctacatgtgcggccacaagggcacatacggcctgctgagacggagagaggactggcctagcagactgcagatgttcttcgccaataaccacgaccaggagttcgacccccctaaggtgtaccctcccgtccccgccgagaagagaaagcccatccgggtcctgagcctgttcgatggcatcgccaccggtctgctggtgctgaaggacctgggcatccaggtggataggtacattgcctccgaggtgtgcgaggactccatcaccgtgggaatggtgcgtcatcagggcaagatcatgtacgtgggcgacgtgcggagcgtgacacagaagcatatccaggagtggggccctttcgacctggtgatcggcggcagcccttgcaatgacctgagcatcgtgaacccagcccggaagggcctgtacgagggaaccggcagactgttcttcgagttttacagactgctgcacgacgcccggcctaaggaaggcgacgaccggcccttcttttggctgttcgagaatgtggtggccatgggagtcagcgacaagcgggatattagccggttcctggagagcaaccccgtgatgatcgatgccaaggaagtgagcgccgcccaccgggccagatacttctggggcaatctgcctggcatgaacagacccctggccagcaccgtgaacgacaagctggagctgcaggagtgcctggagcacggccggatcgccaagttcagcaaggtgagaaccatcaccacccgaagcaacagcatcaaacaaggcaaggaccagcactttcctgtgttcatgaacgagaaggaggacatcctgtggtgtaccgagatggagagagtgttcgggttcccagtccactacacagatgtcagcaacatgtctagactggccagacagagactgctgggaagaagctggtccgtccctgtgatcagacacctgttcgcccctctgaaggagtacttcgcctgcgtgagcagcggcaacagcaacgccaacagccggggccccagcttctctagcggcctggtgccactgtccctgagagggagccacatgggccccatggagatctacaaaaccgtgagcgcctggaagcggcagcctgtgcgcgtgctgagcctgtttcggaatatcgataaagtcctgaaaagcctgggattcctggagagcggctctggctccggcggtggcaccctgaagtacgtggaggatgtgacaaacgtggtcagacgggatgtggagaagtggggccccttcgatctggtgtacggcagcacccaacccctgggcagctcttgtgaccggtgccctggctggtacatgtttcagttccaccggatcctgcagtacgccctgccgagacaggagtcccagcggccattcttttggattttcatggacaacttgctgctgaccgaggatgaccaggaaactaccactcggttcctgcagaccgaagccgtgaccctgcaggacgtgagaggccgggactaccagaacgccatgcgggtgtggtccaacatccctggactgaaaagcaagcacgcacctctgacccctaaagaagaggagtacctgcaggcccaggtgcggagcagaagcaagctggacgcccctaaggtggatctgctggtgaagaattgcctcctgcccctgagagagtacttcaagtatttcagccagaatagtctgcccctgggaggcagcggcggcggcgccctggtgacatttgaggacgtcgccgtgcggttcacccaggaggaatgggctctgctggatccttctcagaaaatcctgtaccgggacgtgatgagagagacataccggaatctgacctccgtgggcatcaactgggaatgttgggaccttgaagcctgcttcagaagcctgggaagaaacctgagagtgcaggtggtgaagagaaagtgcgagctgaccaacagcggcccctgcgccgagggcggcccaagcagcggcgcccctcctcccagcggcggcagcccagccggctccccaacctctaccgaggagggcacctctgagtccgccacccccgagagcggccctggcacctccaccgagcccagcgagggcagcgcacccggcagccctgccggcagccccacctccacagaggagggaaccagcaccgagcccagcgaaggcagcgccccaggcaccagcaccgagcctagtgagcaggagattaaacggatcaacaagatcagaagaagacttgtgaaagacagcaacaccaagaaggccggcaagacaggccccatgaaaaccctgctggttagagtgatgacacccgatctgagagagcggctggaaaacctgagaaagaagcctgaaaatatcccccagcccatcagcaatacatctagagccaacctgaataagctgctgaccgattacaccgaaatgaagaaggcgatcctgcatgtgtactgggaagagttccagaaggaccctgtgggcctgatgagccgggtggcccagcctgccagcaagaagatcgatcagaacaagctgaaacctgagatggacgagaagggcaacctgaccaccgccggctttgcctgctctcagtgtggccagcccctgttcgtgtacaagctggagcaggtgtctgagaagggcaaggcttacaccaactacttcggacggtgcaatgtggccgagcacgaaaagctgatcctgctggcccagctgaagcccgagaaggatagcgacgaagccgtgacatatagcctgggaaagtttgggcagagggccctggatttctacagcattcatgtgaccaaggagtccacccaccccgtgaagcccctggcccagatcgccggaaacagatacgcctccggacctgtgggaaaggccctgagcgacgcatgtatgggcacaatcgcctccttcctgtctaagtaccaggacatcatcatcgaacaccagaaggtggtgaagggcaaccagaagagactggagagcctgcgggagctggccggcaaggaaaacctggaataccctagcgtgaccctgccacctcagcctcacaccaaggagggcgttgatgcctacaacgaagtgatcgcccgggtgcgaatgtgggtgaacctgaacctgtggcagaagctgaagctaagcagagatgatgccaagcctctgctgagactgaagggattcccttcctttcctctggtcgagagacaggccaacgaagtggactggtgggacatggtgtgtaacgtgaagaagctgatcaacgagaaaaaggaggatggcaaggtgttttggcagaatctggctggctacaagagacaggaagccctgagaccatacctgagcagcgaggaagatcggaagaagggaaagaaattcgctcggtaccagctgggcgacctgctgctgcacctggaaaagaagcacggcgaggactggggaaaggtgtacgacgaggcctgggagcggattgacaagaaagtggaaggcctgagcaagcacatcaagctggaagaggaacggagaagcgaggacgcccagagcaaggccgccctgaccgactggctgcgggctaaggccagcttcgtgatcgagggcctgaaggaggccgacaaggacgagttctgcagatgcgagctgaagctgcagaagtggtacggggacctgcggggaaagcccttcgccatcgaagccgagaacagcatcctggacatcagcggcttcagcaagcagtacaactgtgccttcatctggcagaaggacggcgtgaagaagctgaacctgtacctgatcatcaactacttcaagggcggcaagctgcggttcaagaagatcaaacctgaagccttcgaagccaacagattctacaccgtgatcaacaaaaagagcggcgagatcgtgcccatggaggtgaacttcaacttcgacgaccccaacctgatcatcctgcctctggcctttggcaagagacagggcagagaattcatctggaacgacctgctgtccctggaaaccggcagcctgaagctggccaacggaagagtgatcgagaagacactgtacaacagaagaacccggcaggatgagcctgccctgttcgtggccctgaccttcgagcggcgggaggtcctggactcctccaatatcaaaccaatgaacctgatcggcgtggcaagaggcgaaaacatccccgccgtgatcgccctgaccgaccccgagggctgcccactgagccggtttaaggatagcctgggaaacccaacccacatcctgagaatcggcgagagctataaggagaagcagcggaccatccaggccaagaaggaggtggagcagcggagagccggcggctacagccggaagtacgccagcaaagccaagaatctggcagacgatatggtgagaaacaccgctagagatctgctgtactacgccgtgacccaggatgccatgctgatcttcgccaacctgagccggggcttcggccggcagggcaagcggaccttcatggccgagagacagtacacacggatggaggactggctgaccgccaagctggcctacgagggcctgagcaagacctacctgtccaagacactggcccagtacacctccaagacatgcagcaactgtgggtttaccatcaccagcgccgactacgacagggtgctggagaagctgaagaagacagcaacaggctggatgaccacaattaacggcaaggagctgaaggtggagggccagattacctactacaacagatacaagagacagaacgtagtcaaggacctgtccgtcgagctggatagactgagcgaagaatctgtgaacaacgacatctcctcctggacaaagggcagaagcggagaagctctgagcctcctgaagaaaagattctcccatagacccgtgcaggagaagttcgtgtgcctgaactgcggcttcgagacacacgcagccgagcaagccgccctgaacatcgccagatcctggctgttcctgcggagccaggagtacaagaaataccagacaaacaagacaaccggcaacaccgataagagagccttcgtcgagacctggcagtccttttaccggaagaagcttaaggaggtgtggaaacctgccgtgcggtctggcggatctggcggaggctccaccgagggcctggtgatgttcgaggacgtggccgtgtacttcagcagggaggagtggggcctgctgaacgtgacccagaagggcctgtaccaggacgtgatgctggagaacttcgccctggtgagcagcctgggcctggcccccctgaggagccccgtgttcagccagctggagaacgacgagcagctgtgggtgcccagctgggtggacgagacccccgtgagcagggccgaggccaggaggggcggcccaagcagcggcgcccctcctcccagcggcggcagcccagccggctccccaacctctaccgaggagggcacctctgagtccgccacccccgagagcggccctggcacctccaccgagcccagcgagggcagcgcacccggcagccctgccggcagccccacctccacagaggagggaaccagcaccgagcccagcgaaggcagcgccccaggcaccagcaccgagcctagtgagcaggagattaaacggatcaacaagatcagaagaagacttgtgaaagacagcaacaccaagaaggccggcaagacaggccccatgaaaaccctgctggttagagtgatgacacccgatctgagagagcggctggaaaacctgagaaagaagcctgaaaatatcccccagcccatcagcaatacatctagagccaacctgaataagctgctgaccgattacaccgaaatgaagaaggcgatcctgcatgtgtactgggaagagttccagaaggaccctgtgggcctgatgagccgggtggcccagcctgccagcaagaagatcgatcagaacaagctgaaacctgagatggacgagaagggcaacctgaccaccgccggctttgcctgctctcagtgtggccagcccctgttcgtgtacaagctggagcaggtgtctgagaagggcaaggcttacaccaactacttcggacggtgcaatgtggccgagcacgaaaagctgatcctgctggcccagctgaagcccgagaaggatagcgacgaagccgtgacatatagcctgggaaagtttgggcagagggccctggatttctacagcattcatgtgaccaaggagtccacccaccccgtgaagcccctggcccagatcgccggaaacagatacgcctccggacctgtgggaaaggccctgagcgacgcatgtatgggcacaatcgcctccttcctgtctaagtaccaggacatcatcatcgaacaccagaaggtggtgaagggcaaccagaagagactggagagcctgcgggagctggccggcaaggaaaacctggaataccctagcgtgaccctgccacctcagcctcacaccaaggagggcgttgatgcctacaacgaagtgatcgcccgggtgcgaatgtgggtgaacctgaacctgtggcagaagctgaagctaagcagagatgatgccaagcctctgctgagactgaagggattcccttcctttcctctggtcgagagacaggccaacgaagtggactggtgggacatggtgtgtaacgtgaagaagctgatcaacgagaaaaaggaggatggcaaggtgttttggcagaatctggctggctacaagagacaggaagccctgagaccatacctgagcagcgaggaagatcggaagaagggaaagaaattcgctcggtaccagctgggcgacctgctgctgcacctggaaaagaagcacggcgaggactggggaaaggtgtacgacgaggcctgggagcggattgacaagaaagtggaaggcctgagcaagcacatcaagctggaagaggaacggagaagcgaggacgcccagagcaaggccgccctgaccgactggctgcgggctaaggccagcttcgtgatcgagggcctgaaggaggccgacaaggacgagttctgcagatgcgagctgaagctgcagaagtggtacggggacctgcggggaaagcccttcgccatcgaagccgagaacagcatcctggacatcagcggcttcagcaagcagtacaactgtgccttcatctggcagaaggacggcgtgaagaagctgaacctgtacctgatcatcaactacttcaagggcggcaagctgcggttcaagaagatcaaacctgaagccttcgaagccaacagattctacaccgtgatcaacaaaaagagcggcgagatcgtgcccatggaggtgaacttcaacttcgacgaccccaacctgatcatcctgcctctggcctttggcaagagacagggcagagaattcatctggaacgacctgctgtccctggaaaccggcagcctgaagctggccaacggaagagtgatcgagaagacactgtacaacagaagaacccggcaggatgagcctgccctgttcgtggccctgaccttcgagcggcgggaggtcctggactcctccaatatcaaaccaatgaacctgatcggcgtggcaagaggcgaaaacatccccgccgtgatcgccctgaccgaccccgagggctgcccactgagccggtttaaggatagcctgggaaacccaacccacatcctgagaatcggcgagagctataaggagaagcagcggaccatccaggccaagaaggaggtggagcagcggagagccggcggctacagccggaagtacgccagcaaagccaagaatctggcagacgatatggtgagaaacaccgctagagatctgctgtactacgccgtgacccaggatgccatgctgatcttcgccaacctgagccggggcttcggccggcagggcaagcggaccttcatggccgagagacagtacacacggatggaggactggctgaccgccaagctggcctacgagggcctgagcaagacctacctgtccaagacactggcccagtacacctccaagacatgcagcaactgtgggtttaccatcaccagcgccgactacgacagggtgctggagaagctgaagaagacagcaacaggctggatgaccacaattaacggcaaggagctgaaggtggagggccagattacctactacaacagatacaagagacagaacgtagtcaaggacctgtccgtcgagctggatagactgagcgaagaatctgtgaacaacgacatctcctcctggacaaagggcagaagcggagaagctctgagcctcctgaagaaaagattctcccatagacccgtgcaggagaagttcgtgtgcctgaactgcggcttcgagacacacgcagccgagcaagccgccctgaacatcgccagatcctggctgttcctgcggagccaggagtacaagaaataccagacaaacaagacaaccggcaacaccgataagagagccttcgtcgagacctggcagtccttttaccggaagaagcttaaggaggtgtggaaacctgccgtgcggtctggcggatctggcggaggctcctaccgagggcctggtgatgttcgaggacgtggccgtgtacttcagcagggaggagtggggcctgctgaacgtgacccagaagggcctgtaccaggacgtgatgctggagaacttcgccctggtgagcagcctgggcctggcccccctgaggagccccgtgttcagccagctggagaacgacgagcagctgtgggtgcccagctgggtggacgagacccccgtgagcagggccgaggccaggaggggatctggctccggcagcggccccaagaaaaagagaaaagtctaagctgccttctgcggggcttgccttctggccatgcccttcttctctcccttgcacctgtacctcttggtctttgaataaagcctgagtaggaaggctagcaaaaaaaaaaaaaaaaaaaaaaaaaaaaaaaaaaaaaaaaaaaaaaaaaaaaaaaaaaaaaaaaaaaaaaaaaaaaaaaa

SEQ ID NO: 16718 - RNA, 9485 nt, synthetic construct
  source 1..9485: mol_type = other RNA
aggaaataagagagaaaagaagagtaagaagaaatataagagccaccatggcccctaagaagaagcgtaaagtgagccggatggaacgcctcgtctacgaggtgcggcagaagtgcagaaacatcgaggacatctgcatctcctgcggatctctgaacgtgaccctggagcacccactgttcatcggcggcatgtgccagaactgtaaaaactgttttctggagtgtgcctatcaatacgacgatgacggctaccagagctactgcaccatctgttgcggcggaagagaggtgctgatgtgtggaaataacaactgctgccggtgcttctgcgtggaatgcgtggacctgctggtgggccccggcgccgcccaggccgctattaaggaagatccttggaactgctacatgtgcggccacaagggcacatacggcctgctgagacggagagaggactggcctagcagactgcagatgttcttcgccaataaccacgaccaggagttcgacccccctaaggtgtaccctcccgtccccgccgagaagagaaagcccatccgggtcctgagcctgttcgatggcatcgccaccggtctgctggtgctgaaggacctgggcatccaggtggataggtacattgcctccgaggtgtgcgaggactccatcaccgtgggaatggtgcgtcatcagggcaagatcatgtacgtgggcgacgtgcggagcgtgacacagaagcatatccaggagtggggccctttcgacctggtgatcggcggcagcccttgcaatgacctgagcatcgtgaacccagcccggaagggcctgtacgagggaaccggcagactgttcttcgagttttacagactgctgcacgacgcccggcctaaggaaggcgacgaccggcccttcttttggctgttcgagaatgtggtggccatgggagtcagcgacaagcgggatattagccggttcctggagagcaaccccgtgatgatcgatgccaaggaagtgagcgccgcccaccgggccagatacttctggggcaatctgcctggcatgaacagacccctggccagcaccgtgaacgacaagctggagctgcaggagtgcctggagcacggccggatcgccaagttcagcaaggtgagaaccatcaccacccgaagcaacagcatcaaacaaggcaaggaccagcactttcctgtgttcatgaacgagaaggaggacatcctgtggtgtaccgagatggagagagtgttcgggttcccagtccactacacagatgtcagcaacatgtctagactggccagacagagactgctgggaagaagctggtccgtccctgtgatcagacacctgttcgcccctctgaaggagtacttcgcctgcgtgagcagcggcaacagcaacgccaacagccggggccccagcttctctagcggcctggtgccactgtccctgagagggagccacatgggccccatggagatctacaaaaccgtgagcgcctggaagcggcagcctgtgcgcgtgctgagcctgtttcggaatatcgataaagtcctgaaaagcctgggattcctggagagcggctctggctccggcggtggcaccctgaagtacgtggaggatgtgacaaacgtggtcagacgggatgtggagaagtggggccccttcgatctggtgtacggcagcacccaacccctgggcagctcttgtgaccggtgccctggctggtacatgtttcagttccaccggatcctgcagtacgccctgccgagacaggagtcccagcggccattcttttggattttcatggacaacttgctgctgaccgaggatgaccaggaaactaccactcggttcctgcagaccgaagccgtgaccctgcaggacgtgagaggccgggactaccagaacgccatgcgggtgtggtccaacatccctggactgaaaagcaagcacgcacctctgacccctaaagaagaggagtacctgcaggcccaggtgcggagcagaagcaagctggacgcccctaaggtggatctgctggtgaagaattgcctcctgcccctgagagagtacttcaagtatttcagccagaatagtctgcccctgggaggcagcggcggcggcgccctggtgacatttgaggacgtcgccgtgcggttcacccaggaggaatgggctctgctggatccttctcagaaaatcctgtaccgggacgtgatgagagagacataccggaatctgacctccgtgggcatcaactgggaatgttgggaccttgaagcctgcttcagaagcctgggaagaaacctgagagtgcaggtggtgaagagaaagtgcgagctgaccaacagcggcccctgcgccgagggcggcccaagcagcggcgcccctcctcccagcggcggcagcccagccggctccccaacctctaccgaggagggcacctctgagtccgccacccccgagagcggccctggcacctccaccgagcccagcgagggcagcgcacccggcagccctgccggcagccccacctccacagaggagggaaccagcaccgagcccagcgaaggcagcgccccaggcaccagcaccgagcctagtgagcaggagattaaacggatcaacaagatcagaagaagacttgtgaaagacagcaacaccaagaaggccggcaagacaggccccatgaaaaccctgctggttagagtgatgacacccgatctgagagagcggctggaaaacctgagaaagaagcctgaaaatatcccccagcccatcagcaatacatctagagccaacctgaataagctgctgaccgattacaccgaaatgaagaaggcgatcctgcatgtgtactgggaagagttccagaaggaccctgtgggcctgatgagccgggtggcccagcctgccagcaagaagatcgatcagaacaagctgaaacctgagatggacgagaagggcaacctgaccaccgccggctttgcctgctctcagtgtggccagcccctgttcgtgtacaagctggagcaggtgtctgagaagggcaaggcttacaccaactacttcggacggtgcaatgtggccgagcacgaaaagctgatcctgctggcccagctgaagcccgagaaggatagcgacgaagccgtgacatatagcctgggaaagtttgggcagagggccctggatttctacagcattcatgtgaccaaggagtccacccaccccgtgaagcccctggcccagatcgccggaaacagatacgcctccggacctgtgggaaaggccctgagcgacgcatgtatgggcacaatcgcctccttcctgtctaagtaccaggacatcatcatcgaacaccagaaggtggtgaagggcaaccagaagagactggagagcctgcgggagctggccggcaaggaaaacctggaataccctagcgtgaccctgccacctcagcctcacaccaaggagggcgttgatgcctacaacgaagtgatcgcccgggtgcgaatgtgggtgaacctgaacctgtggcagaagctgaagctaagcagagatgatgccaagcctctgctgagactgaagggattcccttcctttcctctggtcgagagacaggccaacgaagtggactggtgggacatggtgtgtaacgtgaagaagctgatcaacgagaaaaaggaggatggcaaggtgttttggcagaatctggctggctacaagagacaggaagccctgagaccatacctgagcagcgaggaagatcggaagaagggaaagaaattcgctcggtaccagctgggcgacctgctgctgcacctggaaaagaagcacggcgaggactggggaaaggtgtacgacgaggcctgggagcggattgacaagaaagtggaaggcctgagcaagcacatcaagctggaagaggaacggagaagcgaggacgcccagagcaaggccgccctgaccgactggctgcgggctaaggccagcttcgtgatcgagggcctgaaggaggccgacaaggacgagttctgcagatgcgagctgaagctgcagaagtggtacggggacctgcggggaaagcccttcgccatcgaagccgagaacagcatcctggacatcagcggcttcagcaagcagtacaactgtgccttcatctggcagaaggacggcgtgaagaagctgaacctgtacctgatcatcaactacttcaagggcggcaagctgcggttcaagaagatcaaacctgaagccttcgaagccaacagattctacaccgtgatcaacaaaaagagcggcgagatcgtgcccatggaggtgaacttcaacttcgacgaccccaacctgatcatcctgcctctggcctttggcaagagacagggcagagaattcatctggaacgacctgctgtccctggaaaccggcagcctgaagctggccaacggaagagtgatcgagaagacactgtacaacagaagaacccggcaggatgagcctgccctgttcgtggccctgaccttcgagcggcgggaggtcctggactcctccaatatcaaaccaatgaacctgatcggcgtggcaagaggcgaaaacatccccgccgtgatcgccctgaccgaccccgagggctgcccactgagccggtttaaggatagcctgggaaacccaacccacatcctgagaatcggcgagagctataaggagaagcagcggaccatccaggccaagaaggaggtggagcagcggagagccggcggctacagccggaagtacgccagcaaagccaagaatctggcagacgatatggtgagaaacaccgctagagatctgctgtactacgccgtgacccaggatgccatgctgatcttcgccaacctgagccggggcttcggccggcagggcaagcggaccttcatggccgagagacagtacacacggatggaggactggctgaccgccaagctggcctacgagggcctgagcaagacctacctgtccaagacactggcccagtacacctccaagacatgcagcaactgtgggtttaccatcaccagcgccgactacgacagggtgctggagaagctgaagaagacagcaacaggctggatgaccacaattaacggcaaggagctgaaggtggagggccagattacctactacaacagatacaagagacagaacgtagtcaaggacctgtccgtcgagctggatagactgagcgaagaatctgtgaacaacgacatctcctcctggacaaagggcagaagcggagaagctctgagcctcctgaagaaaagattctcccatagacccgtgcaggagaagttcgtgtgcctgaactgcggcttcgagacacacgcagccgagcaagccgccctgaacatcgccagatcctggctgttcctgcggagccaggagtacaagaaataccagacaaacaagacaaccggcaacaccgataagagagccttcgtcgagacctggcagtccttttaccggaagaagcttaaggaggtgtggaaacctgccgtgcggtctggcggatctggcggaggctccttccaggagagcgtgaccttcaaggacgtgagcgtggacttcacccagggcgagtggggccagctggaccccgcccagaagaacctgtacagggacgtgatgctggagaactacaggaccctggtgagcctgggcctgcaggtgttcaagcccgaggtgatctacaggctggagaggggcgaggccccctggatcctggagagggagatcagcaggggcccctgccccgactggcccgagaccggcggcccaagcagcggcgcccctcctcccagcggcggcagcccagccggctccccaacctctaccgaggagggcacctctgagtccgccacccccgagagcggccctggcacctccaccgagcccagcgagggcagcgcacccggcagccctgccggcagccccacctccacagaggagggaaccagcaccgagcccagcgaaggcagcgccccaggcaccagcaccgagcctagtgagcaggagattaaacggatcaacaagatcagaagaagacttgtgaaagacagcaacaccaagaaggccggcaagacaggccccatgaaaaccctgctggttagagtgatgacacccgatctgagagagcggctggaaaacctgagaaagaagcctgaaaatatcccccagcccatcagcaatacatctagagccaacctgaataagctgctgaccgattacaccgaaatgaagaaggcgatcctgcatgtgtactgggaagagttccagaaggaccctgtgggcctgatgagccgggtggcccagcctgccagcaagaagatcgatcagaacaagctgaaacctgagatggacgagaagggcaacctgaccaccgccggctttgcctgctctcagtgtggccagcccctgttcgtgtacaagctggagcaggtgtctgagaagggcaaggcttacaccaactacttcggacggtgcaatgtggccgagcacgaaaagctgatcctgctggcccagctgaagcccgagaaggatagcgacgaagccgtgacatatagcctgggaaagtttgggcagagggccctggatttctacagcattcatgtgaccaaggagtccacccaccccgtgaagcccctggcccagatcgccggaaacagatacgcctccggacctgtgggaaaggccctgagcgacgcatgtatgggcacaatcgcctccttcctgtctaagtaccaggacatcatcatcgaacaccagaaggtggtgaagggcaaccagaagagactggagagcctgcgggagctggccggcaaggaaaacctggaataccctagcgtgaccctgccacctcagcctcacaccaaggagggcgttgatgcctacaacgaagtgatcgcccgggtgcgaatgtgggtgaacctgaacctgtggcagaagctgaagctaagcagagatgatgccaagcctctgctgagactgaagggattcccttcctttcctctggtcgagagacaggccaacgaagtggactggtgggacatggtgtgtaacgtgaagaagctgatcaacgagaaaaaggaggatggcaaggtgttttggcagaatctggctggctacaagagacaggaagccctgagaccatacctgagcagcgaggaagatcggaagaagggaaagaaattcgctcggtaccagctgggcgacctgctgctgcacctggaaaagaagcacggcgaggactggggaaaggtgtacgacgaggcctgggagcggattgacaagaaagtggaaggcctgagcaagcacatcaagctggaagaggaacggagaagcgaggacgcccagagcaaggccgccctgaccgactggctgcgggctaaggccagcttcgtgatcgagggcctgaaggaggccgacaaggacgagttctgcagatgcgagctgaagctgcagaagtggtacggggacctgcggggaaagcccttcgccatcgaagccgagaacagcatcctggacatcagcggcttcagcaagcagtacaactgtgccttcatctggcagaaggacggcgtgaagaagctgaacctgtacctgatcatcaactacttcaagggcggcaagctgcggttcaagaagatcaaacctgaagccttcgaagccaacagattctacaccgtgatcaacaaaaagagcggcgagatcgtgcccatggaggtgaacttcaacttcgacgaccccaacctgatcatcctgcctctggcctttggcaagagacagggcagagaattcatctggaacgacctgctgtccctggaaaccggcagcctgaagctggccaacggaagagtgatcgagaagacactgtacaacagaagaacccggcaggatgagcctgccctgttcgtggccctgaccttcgagcggcgggaggtcctggactcctccaatatcaaaccaatgaacctgatcggcgtggcaagaggcgaaaacatccccgccgtgatcgccctgaccgaccccgagggctgcccactgagccggtttaaggatagcctgggaaacccaacccacatcctgagaatcggcgagagctataaggagaagcagcggaccatccaggccaagaaggaggtggagcagcggagagccggcggctacagccggaagtacgccagcaaagccaagaatctggcagacgatatggtgagaaacaccgctagagatctgctgtactacgccgtgacccaggatgccatgctgatcttcgccaacctgagccggggcttcggccggcagggcaagcggaccttcatggccgagagacagtacacacggatggaggactggctgaccgccaagctggcctacgagggcctgagcaagacctacctgtccaagacactggcccagtacacctccaagacatgcagcaactgtgggtttaccatcaccagcgccgactacgacagggtgctggagaagctgaagaagacagcaacaggctggatgaccacaattaacggcaaggagctgaaggtggagggccagattacctactacaacagatacaagagacagaacgtagtcaaggacctgtccgtcgagctggatagactgagcgaagaatctgtgaacaacgacatctcctcctggacaaagggcagaagcggagaagctctgagcctcctgaagaaaagattctcccatagacccgtgcaggagaagttcgtgtgcctgaactgcggcttcgagacacacgcagccgagcaagccgccctgaacatcgccagatcctggctgttcctgcggagccaggagtacaagaaataccagacaaacaagacaaccggcaacaccgataagagagccttcgtcgagacctggcagtccttttaccggaagaagcttaaggaggtgtggaaacctgccgtgcggtctggcggatctggcggaggctcctttccaggagagcgtgaccttcaaggacgtgagcgtggacttcacccagggcgagtggggccagctggaccccgcccagaagaacctgtacagggacgtgatgctggagaactacaggaccctggtgagcctgggcctgcaggtgttcaagcccgaggtgatctacaggctggagaggggcgaggccccctggatcctggagagggagatcagcaggggcccctgccccgactggcccgagaccggatctggctccggcagcggccccaagaaaaagagaaaagtctaagctgccttctgcggggcttgccttctggccatgcccttcttctctcccttgcacctgtacctcttggtctttgaataaagcctgagtaggaaggctagcaaaaaaaaaaaaaaaaaaaaaaaaaaaaaaaaaaaaaaaaaaaaaaaaaaaaaaaaaaaaaaaaaaaaaaaaaaaaaaaa

SEQ ID NO: 16719 - RNA, 9485 nt, synthetic construct
  source 1..9485: mol_type = other RNA
aggaaataagagagaaaagaagagtaagaagaaatataagagccaccatggcccctaagaagaagcgtaaagtgagccggatggaacgcctcgtctacgaggtgcggcagaagtgcagaaacatcgaggacatctgcatctcctgcggatctctgaacgtgaccctggagcacccactgttcatcggcggcatgtgccagaactgtaaaaactgttttctggagtgtgcctatcaatacgacgatgacggctaccagagctactgcaccatctgttgcggcggaagagaggtgctgatgtgtggaaataacaactgctgccggtgcttctgcgtggaatgcgtggacctgctggtgggccccggcgccgcccaggccgctattaaggaagatccttggaactgctacatgtgcggccacaagggcacatacggcctgctgagacggagagaggactggcctagcagactgcagatgttcttcgccaataaccacgaccaggagttcgacccccctaaggtgtaccctcccgtccccgccgagaagagaaagcccatccgggtcctgagcctgttcgatggcatcgccaccggtctgctggtgctgaaggacctgggcatccaggtggataggtacattgcctccgaggtgtgcgaggactccatcaccgtgggaatggtgcgtcatcagggcaagatcatgtacgtgggcgacgtgcggagcgtgacacagaagcatatccaggagtggggccctttcgacctggtgatcggcggcagcccttgcaatgacctgagcatcgtgaacccagcccggaagggcctgtacgagggaaccggcagactgttcttcgagttttacagactgctgcacgacgcccggcctaaggaaggcgacgaccggcccttcttttggctgttcgagaatgtggtggccatgggagtcagcgacaagcgggatattagccggttcctggagagcaaccccgtgatgatcgatgccaaggaagtgagcgccgcccaccgggccagatacttctggggcaatctgcctggcatgaacagacccctggccagcaccgtgaacgacaagctggagctgcaggagtgcctggagcacggccggatcgccaagttcagcaaggtgagaaccatcaccacccgaagcaacagcatcaaacaaggcaaggaccagcactttcctgtgttcatgaacgagaaggaggacatcctgtggtgtaccgagatggagagagtgttcgggttcccagtccactacacagatgtcagcaacatgtctagactggccagacagagactgctgggaagaagctggtccgtccctgtgatcagacacctgttcgcccctctgaaggagtacttcgcctgcgtgagcagcggcaacagcaacgccaacagccggggccccagcttctctagcggcctggtgccactgtccctgagagggagccacatgggccccatggagatctacaaaaccgtgagcgcctggaagcggcagcctgtgcgcgtgctgagcctgtttcggaatatcgataaagtcctgaaaagcctgggattcctggagagcggctctggctccggcggtggcaccctgaagtacgtggaggatgtgacaaacgtggtcagacgggatgtggagaagtggggccccttcgatctggtgtacggcagcacccaacccctgggcagctcttgtgaccggtgccctggctggtacatgtttcagttccaccggatcctgcagtacgccctgccgagacaggagtcccagcggccattcttttggattttcatggacaacttgctgctgaccgaggatgaccaggaaactaccactcggttcctgcagaccgaagccgtgaccctgcaggacgtgagaggccgggactaccagaacgccatgcgggtgtggtccaacatccctggactgaaaagcaagcacgcacctctgacccctaaagaagaggagtacctgcaggcccaggtgcggagcagaagcaagctggacgcccctaaggtggatctgctggtgaagaattgcctcctgcccctgagagagtacttcaagtatttcagccagaatagtctgcccctgggaggcagcggcggcggcgccctggtgacatttgaggacgtcgccgtgcggttcacccaggaggaatgggctctgctggatccttctcagaaaatcctgtaccgggacgtgatgagagagacataccggaatctgacctccgtgggcatcaactgggaatgttgggaccttgaagcctgcttcagaagcctgggaagaaacctgagagtgcaggtggtgaagagaaagtgcgagctgaccaacagcggcccctgcgccgagggcggcccaagcagcggcgcccctcctcccagcggcggcagcccagccggctccccaacctctaccgaggagggcacctctgagtccgccacccccgagagcggccctggcacctccaccgagcccagcgagggcagcgcacccggcagccctgccggcagccccacctccacagaggagggaaccagcaccgagcccagcgaaggcagcgccccaggcaccagcaccgagcctagtgagcaggagattaaacggatcaacaagatcagaagaagacttgtgaaagacagcaacaccaagaaggccggcaagacaggccccatgaaaaccctgctggttagagtgatgacacccgatctgagagagcggctggaaaacctgagaaagaagcctgaaaatatcccccagcccatcagcaatacatctagagccaacctgaataagctgctgaccgattacaccgaaatgaagaaggcgatcctgcatgtgtactgggaagagttccagaaggaccctgtgggcctgatgagccgggtggcccagcctgccagcaagaagatcgatcagaacaagctgaaacctgagatggacgagaagggcaacctgaccaccgccggctttgcctgctctcagtgtggccagcccctgttcgtgtacaagctggagcaggtgtctgagaagggcaaggcttacaccaactacttcggacggtgcaatgtggccgagcacgaaaagctgatcctgctggcccagctgaagcccgagaaggatagcgacgaagccgtgacatatagcctgggaaagtttgggcagagggccctggatttctacagcattcatgtgaccaaggagtccacccaccccgtgaagcccctggcccagatcgccggaaacagatacgcctccggacctgtgggaaaggccctgagcgacgcatgtatgggcacaatcgcctccttcctgtctaagtaccaggacatcatcatcgaacaccagaaggtggtgaagggcaaccagaagagactggagagcctgcgggagctggccggcaaggaaaacctggaataccctagcgtgaccctgccacctcagcctcacaccaaggagggcgttgatgcctacaacgaagtgatcgcccgggtgcgaatgtgggtgaacctgaacctgtggcagaagctgaagctaagcagagatgatgccaagcctctgctgagactgaagggattcccttcctttcctctggtcgagagacaggccaacgaagtggactggtgggacatggtgtgtaacgtgaagaagctgatcaacgagaaaaaggaggatggcaaggtgttttggcagaatctggctggctacaagagacaggaagccctgagaccatacctgagcagcgaggaagatcggaagaagggaaagaaattcgctcggtaccagctgggcgacctgctgctgcacctggaaaagaagcacggcgaggactggggaaaggtgtacgacgaggcctgggagcggattgacaagaaagtggaaggcctgagcaagcacatcaagctggaagaggaacggagaagcgaggacgcccagagcaaggccgccctgaccgactggctgcgggctaaggccagcttcgtgatcgagggcctgaaggaggccgacaaggacgagttctgcagatgcgagctgaagctgcagaagtggtacggggacctgcggggaaagcccttcgccatcgaagccgagaacagcatcctggacatcagcggcttcagcaagcagtacaactgtgccttcatctggcagaaggacggcgtgaagaagctgaacctgtacctgatcatcaactacttcaagggcggcaagctgcggttcaagaagatcaaacctgaagccttcgaagccaacagattctacaccgtgatcaacaaaaagagcggcgagatcgtgcccatggaggtgaacttcaacttcgacgaccccaacctgatcatcctgcctctggcctttggcaagagacagggcagagaattcatctggaacgacctgctgtccctggaaaccggcagcctgaagctggccaacggaagagtgatcgagaagacactgtacaacagaagaacccggcaggatgagcctgccctgttcgtggccctgaccttcgagcggcgggaggtcctggactcctccaatatcaaaccaatgaacctgatcggcgtggcaagaggcgaaaacatccccgccgtgatcgccctgaccgaccccgagggctgcccactgagccggtttaaggatagcctgggaaacccaacccacatcctgagaatcggcgagagctataaggagaagcagcggaccatccaggccaagaaggaggtggagcagcggagagccggcggctacagccggaagtacgccagcaaagccaagaatctggcagacgatatggtgagaaacaccgctagagatctgctgtactacgccgtgacccaggatgccatgctgatcttcgccaacctgagccggggcttcggccggcagggcaagcggaccttcatggccgagagacagtacacacggatggaggactggctgaccgccaagctggcctacgagggcctgagcaagacctacctgtccaagacactggcccagtacacctccaagacatgcagcaactgtgggtttaccatcaccagcgccgactacgacagggtgctggagaagctgaagaagacagcaacaggctggatgaccacaattaacggcaaggagctgaaggtggagggccagattacctactacaacagatacaagagacagaacgtagtcaaggacctgtccgtcgagctggatagactgagcgaagaatctgtgaacaacgacatctcctcctggacaaagggcagaagcggagaagctctgagcctcctgaagaaaagattctcccatagacccgtgcaggagaagttcgtgtgcctgaactgcggcttcgagacacacgcagccgagcaagccgccctgaacatcgccagatcctggctgttcctgcggagccaggagtacaagaaataccagacaaacaagacaaccggcaacaccgataagagagccttcgtcgagacctggcagtccttttaccggaagaagcttaaggaggtgtggaaacctgccgtgcggtctggcggatctggcggaggctccatctgggacctggtgatgttcagggacgtggccgtggacttcagccaggaggagtgggagtgcctgaacagctaccagaggaacctgtacagggacgtgatcctggagaactacagcaacctggtgagcctgggctgcagcatcagcaagcccgacgtgatcaccctgctggagcagggcaaggagccctggatggtgatgagggacgagaagaggaggtggaccctggacctggagagcaggggcggcccaagcagcggcgcccctcctcccagcggcggcagcccagccggctccccaacctctaccgaggagggcacctctgagtccgccacccccgagagcggccctggcacctccaccgagcccagcgagggcagcgcacccggcagccctgccggcagccccacctccacagaggagggaaccagcaccgagcccagcgaaggcagcgccccaggcaccagcaccgagcctagtgagcaggagattaaacggatcaacaagatcagaagaagacttgtgaaagacagcaacaccaagaaggccggcaagacaggccccatgaaaaccctgctggttagagtgatgacacccgatctgagagagcggctggaaaacctgagaaagaagcctgaaaatatcccccagcccatcagcaatacatctagagccaacctgaataagctgctgaccgattacaccgaaatgaagaaggcgatcctgcatgtgtactgggaagagttccagaaggaccctgtgggcctgatgagccgggtggcccagcctgccagcaagaagatcgatcagaacaagctgaaacctgagatggacgagaagggcaacctgaccaccgccggctttgcctgctctcagtgtggccagcccctgttcgtgtacaagctggagcaggtgtctgagaagggcaaggcttacaccaactacttcggacggtgcaatgtggccgagcacgaaaagctgatcctgctggcccagctgaagcccgagaaggatagcgacgaagccgtgacatatagcctgggaaagtttgggcagagggccctggatttctacagcattcatgtgaccaaggagtccacccaccccgtgaagcccctggcccagatcgccggaaacagatacgcctccggacctgtgggaaaggccctgagcgacgcatgtatgggcacaatcgcctccttcctgtctaagtaccaggacatcatcatcgaacaccagaaggtggtgaagggcaaccagaagagactggagagcctgcgggagctggccggcaaggaaaacctggaataccctagcgtgaccctgccacctcagcctcacaccaaggagggcgttgatgcctacaacgaagtgatcgcccgggtgcgaatgtgggtgaacctgaacctgtggcagaagctgaagctaagcagagatgatgccaagcctctgctgagactgaagggattcccttcctttcctctggtcgagagacaggccaacgaagtggactggtgggacatggtgtgtaacgtgaagaagctgatcaacgagaaaaaggaggatggcaaggtgttttggcagaatctggctggctacaagagacaggaagccctgagaccatacctgagcagcgaggaagatcggaagaagggaaagaaattcgctcggtaccagctgggcgacctgctgctgcacctggaaaagaagcacggcgaggactggggaaaggtgtacgacgaggcctgggagcggattgacaagaaagtggaaggcctgagcaagcacatcaagctggaagaggaacggagaagcgaggacgcccagagcaaggccgccctgaccgactggctgcgggctaaggccagcttcgtgatcgagggcctgaaggaggccgacaaggacgagttctgcagatgcgagctgaagctgcagaagtggtacggggacctgcggggaaagcccttcgccatcgaagccgagaacagcatcctggacatcagcggcttcagcaagcagtacaactgtgccttcatctggcagaaggacggcgtgaagaagctgaacctgtacctgatcatcaactacttcaagggcggcaagctgcggttcaagaagatcaaacctgaagccttcgaagccaacagattctacaccgtgatcaacaaaaagagcggcgagatcgtgcccatggaggtgaacttcaacttcgacgaccccaacctgatcatcctgcctctggcctttggcaagagacagggcagagaattcatctggaacgacctgctgtccctggaaaccggcagcctgaagctggccaacggaagagtgatcgagaagacactgtacaacagaagaacccggcaggatgagcctgccctgttcgtggccctgaccttcgagcggcgggaggtcctggactcctccaatatcaaaccaatgaacctgatcggcgtggcaagaggcgaaaacatccccgccgtgatcgccctgaccgaccccgagggctgcccactgagccggtttaaggatagcctgggaaacccaacccacatcctgagaatcggcgagagctataaggagaagcagcggaccatccaggccaagaaggaggtggagcagcggagagccggcggctacagccggaagtacgccagcaaagccaagaatctggcagacgatatggtgagaaacaccgctagagatctgctgtactacgccgtgacccaggatgccatgctgatcttcgccaacctgagccggggcttcggccggcagggcaagcggaccttcatggccgagagacagtacacacggatggaggactggctgaccgccaagctggcctacgagggcctgagcaagacctacctgtccaagacactggcccagtacacctccaagacatgcagcaactgtgggtttaccatcaccagcgccgactacgacagggtgctggagaagctgaagaagacagcaacaggctggatgaccacaattaacggcaaggagctgaaggtggagggccagattacctactacaacagatacaagagacagaacgtagtcaaggacctgtccgtcgagctggatagactgagcgaagaatctgtgaacaacgacatctcctcctggacaaagggcagaagcggagaagctctgagcctcctgaagaaaagattctcccatagacccgtgcaggagaagttcgtgtgcctgaactgcggcttcgagacacacgcagccgagcaagccgccctgaacatcgccagatcctggctgttcctgcggagccaggagtacaagaaataccagacaaacaagacaaccggcaacaccgataagagagccttcgtcgagacctggcagtccttttaccggaagaagcttaaggaggtgtggaaacctgccgtgcggtctggcggatctggcggaggctcctatctgggacctggtgatgttcagggacgtggccgtggacttcagccaggaggagtgggagtgcctgaacagctaccagaggaacctgtacagggacgtgatcctggagaactacagcaacctggtgagcctgggctgcagcatcagcaagcccgacgtgatcaccctgctggagcagggcaaggagccctggatggtgatgagggacgagaagaggaggtggaccctggacctggagagcaggggatctggctccggcagcggccccaagaaaaagagaaaagtctaagctgccttctgcggggcttgccttctggccatgcccttcttctctcccttgcacctgtacctcttggtctttgaataaagcctgagtaggaaggctagcaaaaaaaaaaaaaaaaaaaaaaaaaaaaaaaaaaaaaaaaaaaaaaaaaaaaaaaaaaaaaaaaaaaaaaaaaaaaaaaa

SEQ ID NO: 16720 - RNA, 9485 nt, synthetic construct
  source 1..9485: mol_type = other RNA
aggaaataagagagaaaagaagagtaagaagaaatataagagccaccatggcccctaagaagaagcgtaaagtgagccggatggaacgcctcgtctacgaggtgcggcagaagtgcagaaacatcgaggacatctgcatctcctgcggatctctgaacgtgaccctggagcacccactgttcatcggcggcatgtgccagaactgtaaaaactgttttctggagtgtgcctatcaatacgacgatgacggctaccagagctactgcaccatctgttgcggcggaagagaggtgctgatgtgtggaaataacaactgctgccggtgcttctgcgtggaatgcgtggacctgctggtgggccccggcgccgcccaggccgctattaaggaagatccttggaactgctacatgtgcggccacaagggcacatacggcctgctgagacggagagaggactggcctagcagactgcagatgttcttcgccaataaccacgaccaggagttcgacccccctaaggtgtaccctcccgtccccgccgagaagagaaagcccatccgggtcctgagcctgttcgatggcatcgccaccggtctgctggtgctgaaggacctgggcatccaggtggataggtacattgcctccgaggtgtgcgaggactccatcaccgtgggaatggtgcgtcatcagggcaagatcatgtacgtgggcgacgtgcggagcgtgacacagaagcatatccaggagtggggccctttcgacctggtgatcggcggcagcccttgcaatgacctgagcatcgtgaacccagcccggaagggcctgtacgagggaaccggcagactgttcttcgagttttacagactgctgcacgacgcccggcctaaggaaggcgacgaccggcccttcttttggctgttcgagaatgtggtggccatgggagtcagcgacaagcgggatattagccggttcctggagagcaaccccgtgatgatcgatgccaaggaagtgagcgccgcccaccgggccagatacttctggggcaatctgcctggcatgaacagacccctggccagcaccgtgaacgacaagctggagctgcaggagtgcctggagcacggccggatcgccaagttcagcaaggtgagaaccatcaccacccgaagcaacagcatcaaacaaggcaaggaccagcactttcctgtgttcatgaacgagaaggaggacatcctgtggtgtaccgagatggagagagtgttcgggttcccagtccactacacagatgtcagcaacatgtctagactggccagacagagactgctgggaagaagctggtccgtccctgtgatcagacacctgttcgcccctctgaaggagtacttcgcctgcgtgagcagcggcaacagcaacgccaacagccggggccccagcttctctagcggcctggtgccactgtccctgagagggagccacatgggccccatggagatctacaaaaccgtgagcgcctggaagcggcagcctgtgcgcgtgctgagcctgtttcggaatatcgataaagtcctgaaaagcctgggattcctggagagcggctctggctccggcggtggcaccctgaagtacgtggaggatgtgacaaacgtggtcagacgggatgtggagaagtggggccccttcgatctggtgtacggcagcacccaacccctgggcagctcttgtgaccggtgccctggctggtacatgtttcagttccaccggatcctgcagtacgccctgccgagacaggagtcccagcggccattcttttggattttcatggacaacttgctgctgaccgaggatgaccaggaaactaccactcggttcctgcagaccgaagccgtgaccctgcaggacgtgagaggccgggactaccagaacgccatgcgggtgtggtccaacatccctggactgaaaagcaagcacgcacctctgacccctaaagaagaggagtacctgcaggcccaggtgcggagcagaagcaagctggacgcccctaaggtggatctgctggtgaagaattgcctcctgcccctgagagagtacttcaagtatttcagccagaatagtctgcccctgggaggcagcggcggcggcgccctggtgacatttgaggacgtcgccgtgcggttcacccaggaggaatgggctctgctggatccttctcagaaaatcctgtaccgggacgtgatgagagagacataccggaatctgacctccgtgggcatcaactgggaatgttgggaccttgaagcctgcttcagaagcctgggaagaaacctgagagtgcaggtggtgaagagaaagtgcgagctgaccaacagcggcccctgcgccgagggcggcccaagcagcggcgcccctcctcccagcggcggcagcccagccggctccccaacctctaccgaggagggcacctctgagtccgccacccccgagagcggccctggcacctccaccgagcccagcgagggcagcgcacccggcagccctgccggcagccccacctccacagaggagggaaccagcaccgagcccagcgaaggcagcgccccaggcaccagcaccgagcctagtgagcaggagattaaacggatcaacaagatcagaagaagacttgtgaaagacagcaacaccaagaaggccggcaagacaggccccatgaaaaccctgctggttagagtgatgacacccgatctgagagagcggctggaaaacctgagaaagaagcctgaaaatatcccccagcccatcagcaatacatctagagccaacctgaataagctgctgaccgattacaccgaaatgaagaaggcgatcctgcatgtgtactgggaagagttccagaaggaccctgtgggcctgatgagccgggtggcccagcctgccagcaagaagatcgatcagaacaagctgaaacctgagatggacgagaagggcaacctgaccaccgccggctttgcctgctctcagtgtggccagcccctgttcgtgtacaagctggagcaggtgtctgagaagggcaaggcttacaccaactacttcggacggtgcaatgtggccgagcacgaaaagctgatcctgctggcccagctgaagcccgagaaggatagcgacgaagccgtgacatatagcctgggaaagtttgggcagagggccctggatttctacagcattcatgtgaccaaggagtccacccaccccgtgaagcccctggcccagatcgccggaaacagatacgcctccggacctgtgggaaaggccctgagcgacgcatgtatgggcacaatcgcctccttcctgtctaagtaccaggacatcatcatcgaacaccagaaggtggtgaagggcaaccagaagagactggagagcctgcgggagctggccggcaaggaaaacctggaataccctagcgtgaccctgccacctcagcctcacaccaaggagggcgttgatgcctacaacgaagtgatcgcccgggtgcgaatgtgggtgaacctgaacctgtggcagaagctgaagctaagcagagatgatgccaagcctctgctgagactgaagggattcccttcctttcctctggtcgagagacaggccaacgaagtggactggtgggacatggtgtgtaacgtgaagaagctgatcaacgagaaaaaggaggatggcaaggtgttttggcagaatctggctggctacaagagacaggaagccctgagaccatacctgagcagcgaggaagatcggaagaagggaaagaaattcgctcggtaccagctgggcgacctgctgctgcacctggaaaagaagcacggcgaggactggggaaaggtgtacgacgaggcctgggagcggattgacaagaaagtggaaggcctgagcaagcacatcaagctggaagaggaacggagaagcgaggacgcccagagcaaggccgccctgaccgactggctgcgggctaaggccagcttcgtgatcgagggcctgaaggaggccgacaaggacgagttctgcagatgcgagctgaagctgcagaagtggtacggggacctgcggggaaagcccttcgccatcgaagccgagaacagcatcctggacatcagcggcttcagcaagcagtacaactgtgccttcatctggcagaaggacggcgtgaagaagctgaacctgtacctgatcatcaactacttcaagggcggcaagctgcggttcaagaagatcaaacctgaagccttcgaagccaacagattctacaccgtgatcaacaaaaagagcggcgagatcgtgcccatggaggtgaacttcaacttcgacgaccccaacctgatcatcctgcctctggcctttggcaagagacagggcagagaattcatctggaacgacctgctgtccctggaaaccggcagcctgaagctggccaacggaagagtgatcgagaagacactgtacaacagaagaacccggcaggatgagcctgccctgttcgtggccctgaccttcgagcggcgggaggtcctggactcctccaatatcaaaccaatgaacctgatcggcgtggcaagaggcgaaaacatccccgccgtgatcgccctgaccgaccccgagggctgcccactgagccggtttaaggatagcctgggaaacccaacccacatcctgagaatcggcgagagctataaggagaagcagcggaccatccaggccaagaaggaggtggagcagcggagagccggcggctacagccggaagtacgccagcaaagccaagaatctggcagacgatatggtgagaaacaccgctagagatctgctgtactacgccgtgacccaggatgccatgctgatcttcgccaacctgagccggggcttcggccggcagggcaagcggaccttcatggccgagagacagtacacacggatggaggactggctgaccgccaagctggcctacgagggcctgagcaagacctacctgtccaagacactggcccagtacacctccaagacatgcagcaactgtgggtttaccatcaccagcgccgactacgacagggtgctggagaagctgaagaagacagcaacaggctggatgaccacaattaacggcaaggagctgaaggtggagggccagattacctactacaacagatacaagagacagaacgtagtcaaggacctgtccgtcgagctggatagactgagcgaagaatctgtgaacaacgacatctcctcctggacaaagggcagaagcggagaagctctgagcctcctgaagaaaagattctcccatagacccgtgcaggagaagttcgtgtgcctgaactgcggcttcgagacacacgcagccgagcaagccgccctgaacatcgccagatcctggctgttcctgcggagccaggagtacaagaaataccagacaaacaagacaaccggcaacaccgataagagagccttcgtcgagacctggcagtccttttaccggaagaagcttaaggaggtgtggaaacctgccgtgcggtctggcggatctggcggaggctccaggcccagggccgtgaagttcggcgacgtggccctgtacttcagcagggaggagtggggctgcctgaggcccgcccagagggccctgtacagggacgtgatgcaggagacctacggccacctgggcgccctgggctgcgccggccccaagcccgccctgatcagctggctggagaggaacaccgacgactgggagcccgccgccctggacccccagcagtgccccaagggcgtggccgtgcagggcggcccaagcagcggcgcccctcctcccagcggcggcagcccagccggctccccaacctctaccgaggagggcacctctgagtccgccacccccgagagcggccctggcacctccaccgagcccagcgagggcagcgcacccggcagccctgccggcagccccacctccacagaggagggaaccagcaccgagcccagcgaaggcagcgccccaggcaccagcaccgagcctagtgagcaggagattaaacggatcaacaagatcagaagaagacttgtgaaagacagcaacaccaagaaggccggcaagacaggccccatgaaaaccctgctggttagagtgatgacacccgatctgagagagcggctggaaaacctgagaaagaagcctgaaaatatcccccagcccatcagcaatacatctagagccaacctgaataagctgctgaccgattacaccgaaatgaagaaggcgatcctgcatgtgtactgggaagagttccagaaggaccctgtgggcctgatgagccgggtggcccagcctgccagcaagaagatcgatcagaacaagctgaaacctgagatggacgagaagggcaacctgaccaccgccggctttgcctgctctcagtgtggccagcccctgttcgtgtacaagctggagcaggtgtctgagaagggcaaggcttacaccaactacttcggacggtgcaatgtggccgagcacgaaaagctgatcctgctggcccagctgaagcccgagaaggatagcgacgaagccgtgacatatagcctgggaaagtttgggcagagggccctggatttctacagcattcatgtgaccaaggagtccacccaccccgtgaagcccctggcccagatcgccggaaacagatacgcctccggacctgtgggaaaggccctgagcgacgcatgtatgggcacaatcgcctccttcctgtctaagtaccaggacatcatcatcgaacaccagaaggtggtgaagggcaaccagaagagactggagagcctgcgggagctggccggcaaggaaaacctggaataccctagcgtgaccctgccacctcagcctcacaccaaggagggcgttgatgcctacaacgaagtgatcgcccgggtgcgaatgtgggtgaacctgaacctgtggcagaagctgaagctaagcagagatgatgccaagcctctgctgagactgaagggattcccttcctttcctctggtcgagagacaggccaacgaagtggactggtgggacatggtgtgtaacgtgaagaagctgatcaacgagaaaaaggaggatggcaaggtgttttggcagaatctggctggctacaagagacaggaagccctgagaccatacctgagcagcgaggaagatcggaagaagggaaagaaattcgctcggtaccagctgggcgacctgctgctgcacctggaaaagaagcacggcgaggactggggaaaggtgtacgacgaggcctgggagcggattgacaagaaagtggaaggcctgagcaagcacatcaagctggaagaggaacggagaagcgaggacgcccagagcaaggccgccctgaccgactggctgcgggctaaggccagcttcgtgatcgagggcctgaaggaggccgacaaggacgagttctgcagatgcgagctgaagctgcagaagtggtacggggacctgcggggaaagcccttcgccatcgaagccgagaacagcatcctggacatcagcggcttcagcaagcagtacaactgtgccttcatctggcagaaggacggcgtgaagaagctgaacctgtacctgatcatcaactacttcaagggcggcaagctgcggttcaagaagatcaaacctgaagccttcgaagccaacagattctacaccgtgatcaacaaaaagagcggcgagatcgtgcccatggaggtgaacttcaacttcgacgaccccaacctgatcatcctgcctctggcctttggcaagagacagggcagagaattcatctggaacgacctgctgtccctggaaaccggcagcctgaagctggccaacggaagagtgatcgagaagacactgtacaacagaagaacccggcaggatgagcctgccctgttcgtggccctgaccttcgagcggcgggaggtcctggactcctccaatatcaaaccaatgaacctgatcggcgtggcaagaggcgaaaacatccccgccgtgatcgccctgaccgaccccgagggctgcccactgagccggtttaaggatagcctgggaaacccaacccacatcctgagaatcggcgagagctataaggagaagcagcggaccatccaggccaagaaggaggtggagcagcggagagccggcggctacagccggaagtacgccagcaaagccaagaatctggcagacgatatggtgagaaacaccgctagagatctgctgtactacgccgtgacccaggatgccatgctgatcttcgccaacctgagccggggcttcggccggcagggcaagcggaccttcatggccgagagacagtacacacggatggaggactggctgaccgccaagctggcctacgagggcctgagcaagacctacctgtccaagacactggcccagtacacctccaagacatgcagcaactgtgggtttaccatcaccagcgccgactacgacagggtgctggagaagctgaagaagacagcaacaggctggatgaccacaattaacggcaaggagctgaaggtggagggccagattacctactacaacagatacaagagacagaacgtagtcaaggacctgtccgtcgagctggatagactgagcgaagaatctgtgaacaacgacatctcctcctggacaaagggcagaagcggagaagctctgagcctcctgaagaaaagattctcccatagacccgtgcaggagaagttcgtgtgcctgaactgcggcttcgagacacacgcagccgagcaagccgccctgaacatcgccagatcctggctgttcctgcggagccaggagtacaagaaataccagacaaacaagacaaccggcaacaccgataagagagccttcgtcgagacctggcagtccttttaccggaagaagcttaaggaggtgtggaaacctgccgtgcggtctggcggatctggcggaggctcctaggcccagggccgtgaagttcggcgacgtggccctgtacttcagcagggaggagtggggctgcctgaggcccgcccagagggccctgtacagggacgtgatgcaggagacctacggccacctgggcgccctgggctgcgccggccccaagcccgccctgatcagctggctggagaggaacaccgacgactgggagcccgccgccctggacccccagcagtgccccaagggcgtggccgtgcagggatctggctccggcagcggccccaagaaaaagagaaaagtctaagctgccttctgcggggcttgccttctggccatgcccttcttctctcccttgcacctgtacctcttggtctttgaataaagcctgagtaggaaggctagcaaaaaaaaaaaaaaaaaaaaaaaaaaaaaaaaaaaaaaaaaaaaaaaaaaaaaaaaaaaaaaaaaaaaaaaaaaaaaaaa

SEQ ID NO: 16721 - RNA, 9485 nt, synthetic construct
  source 1..9485: mol_type = other RNA
aggaaataagagagaaaagaagagtaagaagaaatataagagccaccatggcccctaagaagaagcgtaaagtgagccggatggaacgcctcgtctacgaggtgcggcagaagtgcagaaacatcgaggacatctgcatctcctgcggatctctgaacgtgaccctggagcacccactgttcatcggcggcatgtgccagaactgtaaaaactgttttctggagtgtgcctatcaatacgacgatgacggctaccagagctactgcaccatctgttgcggcggaagagaggtgctgatgtgtggaaataacaactgctgccggtgcttctgcgtggaatgcgtggacctgctggtgggccccggcgccgcccaggccgctattaaggaagatccttggaactgctacatgtgcggccacaagggcacatacggcctgctgagacggagagaggactggcctagcagactgcagatgttcttcgccaataaccacgaccaggagttcgacccccctaaggtgtaccctcccgtccccgccgagaagagaaagcccatccgggtcctgagcctgttcgatggcatcgccaccggtctgctggtgctgaaggacctgggcatccaggtggataggtacattgcctccgaggtgtgcgaggactccatcaccgtgggaatggtgcgtcatcagggcaagatcatgtacgtgggcgacgtgcggagcgtgacacagaagcatatccaggagtggggccctttcgacctggtgatcggcggcagcccttgcaatgacctgagcatcgtgaacccagcccggaagggcctgtacgagggaaccggcagactgttcttcgagttttacagactgctgcacgacgcccggcctaaggaaggcgacgaccggcccttcttttggctgttcgagaatgtggtggccatgggagtcagcgacaagcgggatattagccggttcctggagagcaaccccgtgatgatcgatgccaaggaagtgagcgccgcccaccgggccagatacttctggggcaatctgcctggcatgaacagacccctggccagcaccgtgaacgacaagctggagctgcaggagtgcctggagcacggccggatcgccaagttcagcaaggtgagaaccatcaccacccgaagcaacagcatcaaacaaggcaaggaccagcactttcctgtgttcatgaacgagaaggaggacatcctgtggtgtaccgagatggagagagtgttcgggttcccagtccactacacagatgtcagcaacatgtctagactggccagacagagactgctgggaagaagctggtccgtccctgtgatcagacacctgttcgcccctctgaaggagtacttcgcctgcgtgagcagcggcaacagcaacgccaacagccggggccccagcttctctagcggcctggtgccactgtccctgagagggagccacatgggccccatggagatctacaaaaccgtgagcgcctggaagcggcagcctgtgcgcgtgctgagcctgtttcggaatatcgataaagtcctgaaaagcctgggattcctggagagcggctctggctccggcggtggcaccctgaagtacgtggaggatgtgacaaacgtggtcagacgggatgtggagaagtggggccccttcgatctggtgtacggcagcacccaacccctgggcagctcttgtgaccggtgccctggctggtacatgtttcagttccaccggatcctgcagtacgccctgccgagacaggagtcccagcggccattcttttggattttcatggacaacttgctgctgaccgaggatgaccaggaaactaccactcggttcctgcagaccgaagccgtgaccctgcaggacgtgagaggccgggactaccagaacgccatgcgggtgtggtccaacatccctggactgaaaagcaagcacgcacctctgacccctaaagaagaggagtacctgcaggcccaggtgcggagcagaagcaagctggacgcccctaaggtggatctgctggtgaagaattgcctcctgcccctgagagagtacttcaagtatttcagccagaatagtctgcccctgggaggcagcggcggcggcgccctggtgacatttgaggacgtcgccgtgcggttcacccaggaggaatgggctctgctggatccttctcagaaaatcctgtaccgggacgtgatgagagagacataccggaatctgacctccgtgggcatcaactgggaatgttgggaccttgaagcctgcttcagaagcctgggaagaaacctgagagtgcaggtggtgaagagaaagtgcgagctgaccaacagcggcccctgcgccgagggcggcccaagcagcggcgcccctcctcccagcggcggcagcccagccggctccccaacctctaccgaggagggcacctctgagtccgccacccccgagagcggccctggcacctccaccgagcccagcgagggcagcgcacccggcagccctgccggcagccccacctccacagaggagggaaccagcaccgagcccagcgaaggcagcgccccaggcaccagcaccgagcctagtgagcaggagattaaacggatcaacaagatcagaagaagacttgtgaaagacagcaacaccaagaaggccggcaagacaggccccatgaaaaccctgctggttagagtgatgacacccgatctgagagagcggctggaaaacctgagaaagaagcctgaaaatatcccccagcccatcagcaatacatctagagccaacctgaataagctgctgaccgattacaccgaaatgaagaaggcgatcctgcatgtgtactgggaagagttccagaaggaccctgtgggcctgatgagccgggtggcccagcctgccagcaagaagatcgatcagaacaagctgaaacctgagatggacgagaagggcaacctgaccaccgccggctttgcctgctctcagtgtggccagcccctgttcgtgtacaagctggagcaggtgtctgagaagggcaaggcttacaccaactacttcggacggtgcaatgtggccgagcacgaaaagctgatcctgctggcccagctgaagcccgagaaggatagcgacgaagccgtgacatatagcctgggaaagtttgggcagagggccctggatttctacagcattcatgtgaccaaggagtccacccaccccgtgaagcccctggcccagatcgccggaaacagatacgcctccggacctgtgggaaaggccctgagcgacgcatgtatgggcacaatcgcctccttcctgtctaagtaccaggacatcatcatcgaacaccagaaggtggtgaagggcaaccagaagagactggagagcctgcgggagctggccggcaaggaaaacctggaataccctagcgtgaccctgccacctcagcctcacaccaaggagggcgttgatgcctacaacgaagtgatcgcccgggtgcgaatgtgggtgaacctgaacctgtggcagaagctgaagctaagcagagatgatgccaagcctctgctgagactgaagggattcccttcctttcctctggtcgagagacaggccaacgaagtggactggtgggacatggtgtgtaacgtgaagaagctgatcaacgagaaaaaggaggatggcaaggtgttttggcagaatctggctggctacaagagacaggaagccctgagaccatacctgagcagcgaggaagatcggaagaagggaaagaaattcgctcggtaccagctgggcgacctgctgctgcacctggaaaagaagcacggcgaggactggggaaaggtgtacgacgaggcctgggagcggattgacaagaaagtggaaggcctgagcaagcacatcaagctggaagaggaacggagaagcgaggacgcccagagcaaggccgccctgaccgactggctgcgggctaaggccagcttcgtgatcgagggcctgaaggaggccgacaaggacgagttctgcagatgcgagctgaagctgcagaagtggtacggggacctgcggggaaagcccttcgccatcgaagccgagaacagcatcctggacatcagcggcttcagcaagcagtacaactgtgccttcatctggcagaaggacggcgtgaagaagctgaacctgtacctgatcatcaactacttcaagggcggcaagctgcggttcaagaagatcaaacctgaagccttcgaagccaacagattctacaccgtgatcaacaaaaagagcggcgagatcgtgcccatggaggtgaacttcaacttcgacgaccccaacctgatcatcctgcctctggcctttggcaagagacagggcagagaattcatctggaacgacctgctgtccctggaaaccggcagcctgaagctggccaacggaagagtgatcgagaagacactgtacaacagaagaacccggcaggatgagcctgccctgttcgtggccctgaccttcgagcggcgggaggtcctggactcctccaatatcaaaccaatgaacctgatcggcgtggcaagaggcgaaaacatccccgccgtgatcgccctgaccgaccccgagggctgcccactgagccggtttaaggatagcctgggaaacccaacccacatcctgagaatcggcgagagctataaggagaagcagcggaccatccaggccaagaaggaggtggagcagcggagagccggcggctacagccggaagtacgccagcaaagccaagaatctggcagacgatatggtgagaaacaccgctagagatctgctgtactacgccgtgacccaggatgccatgctgatcttcgccaacctgagccggggcttcggccggcagggcaagcggaccttcatggccgagagacagtacacacggatggaggactggctgaccgccaagctggcctacgagggcctgagcaagacctacctgtccaagacactggcccagtacacctccaagacatgcagcaactgtgggtttaccatcaccagcgccgactacgacagggtgctggagaagctgaagaagacagcaacaggctggatgaccacaattaacggcaaggagctgaaggtggagggccagattacctactacaacagatacaagagacagaacgtagtcaaggacctgtccgtcgagctggatagactgagcgaagaatctgtgaacaacgacatctcctcctggacaaagggcagaagcggagaagctctgagcctcctgaagaaaagattctcccatagacccgtgcaggagaagttcgtgtgcctgaactgcggcttcgagacacacgcagccgagcaagccgccctgaacatcgccagatcctggctgttcctgcggagccaggagtacaagaaataccagacaaacaagacaaccggcaacaccgataagagagccttcgtcgagacctggcagtccttttaccggaagaagcttaaggaggtgtggaaacctgccgtgcggtctggcggatctggcggaggctccgtgcacggcagcgtgaccttcagggacgtggccatcgacttcagccaggaggagtgggagtgcctgcagcccgcccagaagaccctgtacagggacgtgatgctggagaactacagccacctgatcagcctgggcagcagcatcagcaagcccgacgtgatcaccctgctggagcaggagaaggagccctggatggtgaggaggaaggagaccaacaggtggtaccccgacctggagagcaagggcggcccaagcagcggcgcccctcctcccagcggcggcagcccagccggctccccaacctctaccgaggagggcacctctgagtccgccacccccgagagcggccctggcacctccaccgagcccagcgagggcagcgcacccggcagccctgccggcagccccacctccacagaggagggaaccagcaccgagcccagcgaaggcagcgccccaggcaccagcaccgagcctagtgagcaggagattaaacggatcaacaagatcagaagaagacttgtgaaagacagcaacaccaagaaggccggcaagacaggccccatgaaaaccctgctggttagagtgatgacacccgatctgagagagcggctggaaaacctgagaaagaagcctgaaaatatcccccagcccatcagcaatacatctagagccaacctgaataagctgctgaccgattacaccgaaatgaagaaggcgatcctgcatgtgtactgggaagagttccagaaggaccctgtgggcctgatgagccgggtggcccagcctgccagcaagaagatcgatcagaacaagctgaaacctgagatggacgagaagggcaacctgaccaccgccggctttgcctgctctcagtgtggccagcccctgttcgtgtacaagctggagcaggtgtctgagaagggcaaggcttacaccaactacttcggacggtgcaatgtggccgagcacgaaaagctgatcctgctggcccagctgaagcccgagaaggatagcgacgaagccgtgacatatagcctgggaaagtttgggcagagggccctggatttctacagcattcatgtgaccaaggagtccacccaccccgtgaagcccctggcccagatcgccggaaacagatacgcctccggacctgtgggaaaggccctgagcgacgcatgtatgggcacaatcgcctccttcctgtctaagtaccaggacatcatcatcgaacaccagaaggtggtgaagggcaaccagaagagactggagagcctgcgggagctggccggcaaggaaaacctggaataccctagcgtgaccctgccacctcagcctcacaccaaggagggcgttgatgcctacaacgaagtgatcgcccgggtgcgaatgtgggtgaacctgaacctgtggcagaagctgaagctaagcagagatgatgccaagcctctgctgagactgaagggattcccttcctttcctctggtcgagagacaggccaacgaagtggactggtgggacatggtgtgtaacgtgaagaagctgatcaacgagaaaaaggaggatggcaaggtgttttggcagaatctggctggctacaagagacaggaagccctgagaccatacctgagcagcgaggaagatcggaagaagggaaagaaattcgctcggtaccagctgggcgacctgctgctgcacctggaaaagaagcacggcgaggactggggaaaggtgtacgacgaggcctgggagcggattgacaagaaagtggaaggcctgagcaagcacatcaagctggaagaggaacggagaagcgaggacgcccagagcaaggccgccctgaccgactggctgcgggctaaggccagcttcgtgatcgagggcctgaaggaggccgacaaggacgagttctgcagatgcgagctgaagctgcagaagtggtacggggacctgcggggaaagcccttcgccatcgaagccgagaacagcatcctggacatcagcggcttcagcaagcagtacaactgtgccttcatctggcagaaggacggcgtgaagaagctgaacctgtacctgatcatcaactacttcaagggcggcaagctgcggttcaagaagatcaaacctgaagccttcgaagccaacagattctacaccgtgatcaacaaaaagagcggcgagatcgtgcccatggaggtgaacttcaacttcgacgaccccaacctgatcatcctgcctctggcctttggcaagagacagggcagagaattcatctggaacgacctgctgtccctggaaaccggcagcctgaagctggccaacggaagagtgatcgagaagacactgtacaacagaagaacccggcaggatgagcctgccctgttcgtggccctgaccttcgagcggcgggaggtcctggactcctccaatatcaaaccaatgaacctgatcggcgtggcaagaggcgaaaacatccccgccgtgatcgccctgaccgaccccgagggctgcccactgagccggtttaaggatagcctgggaaacccaacccacatcctgagaatcggcgagagctataaggagaagcagcggaccatccaggccaagaaggaggtggagcagcggagagccggcggctacagccggaagtacgccagcaaagccaagaatctggcagacgatatggtgagaaacaccgctagagatctgctgtactacgccgtgacccaggatgccatgctgatcttcgccaacctgagccggggcttcggccggcagggcaagcggaccttcatggccgagagacagtacacacggatggaggactggctgaccgccaagctggcctacgagggcctgagcaagacctacctgtccaagacactggcccagtacacctccaagacatgcagcaactgtgggtttaccatcaccagcgccgactacgacagggtgctggagaagctgaagaagacagcaacaggctggatgaccacaattaacggcaaggagctgaaggtggagggccagattacctactacaacagatacaagagacagaacgtagtcaaggacctgtccgtcgagctggatagactgagcgaagaatctgtgaacaacgacatctcctcctggacaaagggcagaagcggagaagctctgagcctcctgaagaaaagattctcccatagacccgtgcaggagaagttcgtgtgcctgaactgcggcttcgagacacacgcagccgagcaagccgccctgaacatcgccagatcctggctgttcctgcggagccaggagtacaagaaataccagacaaacaagacaaccggcaacaccgataagagagccttcgtcgagacctggcagtccttttaccggaagaagcttaaggaggtgtggaaacctgccgtgcggtctggcggatctggcggaggctcctgtgcacggcagcgtgaccttcagggacgtggccatcgacttcagccaggaggagtgggagtgcctgcagcccgcccagaagaccctgtacagggacgtgatgctggagaactacagccacctgatcagcctgggcagcagcatcagcaagcccgacgtgatcaccctgctggagcaggagaaggagccctggatggtgaggaggaaggagaccaacaggtggtaccccgacctggagagcaagggatctggctccggcagcggccccaagaaaaagagaaaagtctaagctgccttctgcggggcttgccttctggccatgcccttcttctctcccttgcacctgtacctcttggtctttgaataaagcctgagtaggaaggctagcaaaaaaaaaaaaaaaaaaaaaaaaaaaaaaaaaaaaaaaaaaaaaaaaaaaaaaaaaaaaaaaaaaaaaaaaaaaaaaaa

SEQ ID NO: 16722 - RNA, 9479 nt, synthetic construct
  source 1..9479: mol_type = other RNA
aggaaataagagagaaaagaagagtaagaagaaatataagagccaccatggcccctaagaagaagcgtaaagtgagccggatggaacgcctcgtctacgaggtgcggcagaagtgcagaaacatcgaggacatctgcatctcctgcggatctctgaacgtgaccctggagcacccactgttcatcggcggcatgtgccagaactgtaaaaactgttttctggagtgtgcctatcaatacgacgatgacggctaccagagctactgcaccatctgttgcggcggaagagaggtgctgatgtgtggaaataacaactgctgccggtgcttctgcgtggaatgcgtggacctgctggtgggccccggcgccgcccaggccgctattaaggaagatccttggaactgctacatgtgcggccacaagggcacatacggcctgctgagacggagagaggactggcctagcagactgcagatgttcttcgccaataaccacgaccaggagttcgacccccctaaggtgtaccctcccgtccccgccgagaagagaaagcccatccgggtcctgagcctgttcgatggcatcgccaccggtctgctggtgctgaaggacctgggcatccaggtggataggtacattgcctccgaggtgtgcgaggactccatcaccgtgggaatggtgcgtcatcagggcaagatcatgtacgtgggcgacgtgcggagcgtgacacagaagcatatccaggagtggggccctttcgacctggtgatcggcggcagcccttgcaatgacctgagcatcgtgaacccagcccggaagggcctgtacgagggaaccggcagactgttcttcgagttttacagactgctgcacgacgcccggcctaaggaaggcgacgaccggcccttcttttggctgttcgagaatgtggtggccatgggagtcagcgacaagcgggatattagccggttcctggagagcaaccccgtgatgatcgatgccaaggaagtgagcgccgcccaccgggccagatacttctggggcaatctgcctggcatgaacagacccctggccagcaccgtgaacgacaagctggagctgcaggagtgcctggagcacggccggatcgccaagttcagcaaggtgagaaccatcaccacccgaagcaacagcatcaaacaaggcaaggaccagcactttcctgtgttcatgaacgagaaggaggacatcctgtggtgtaccgagatggagagagtgttcgggttcccagtccactacacagatgtcagcaacatgtctagactggccagacagagactgctgggaagaagctggtccgtccctgtgatcagacacctgttcgcccctctgaaggagtacttcgcctgcgtgagcagcggcaacagcaacgccaacagccggggccccagcttctctagcggcctggtgccactgtccctgagagggagccacatgggccccatggagatctacaaaaccgtgagcgcctggaagcggcagcctgtgcgcgtgctgagcctgtttcggaatatcgataaagtcctgaaaagcctgggattcctggagagcggctctggctccggcggtggcaccctgaagtacgtggaggatgtgacaaacgtggtcagacgggatgtggagaagtggggccccttcgatctggtgtacggcagcacccaacccctgggcagctcttgtgaccggtgccctggctggtacatgtttcagttccaccggatcctgcagtacgccctgccgagacaggagtcccagcggccattcttttggattttcatggacaacttgctgctgaccgaggatgaccaggaaactaccactcggttcctgcagaccgaagccgtgaccctgcaggacgtgagaggccgggactaccagaacgccatgcgggtgtggtccaacatccctggactgaaaagcaagcacgcacctctgacccctaaagaagaggagtacctgcaggcccaggtgcggagcagaagcaagctggacgcccctaaggtggatctgctggtgaagaattgcctcctgcccctgagagagtacttcaagtatttcagccagaatagtctgcccctgggaggcagcggcggcggcgccctggtgacatttgaggacgtcgccgtgcggttcacccaggaggaatgggctctgctggatccttctcagaaaatcctgtaccgggacgtgatgagagagacataccggaatctgacctccgtgggcatcaactgggaatgttgggaccttgaagcctgcttcagaagcctgggaagaaacctgagagtgcaggtggtgaagagaaagtgcgagctgaccaacagcggcccctgcgccgagggcggcccaagcagcggcgcccctcctcccagcggcggcagcccagccggctccccaacctctaccgaggagggcacctctgagtccgccacccccgagagcggccctggcacctccaccgagcccagcgagggcagcgcacccggcagccctgccggcagccccacctccacagaggagggaaccagcaccgagcccagcgaaggcagcgccccaggcaccagcaccgagcctagtgagcaggagattaaacggatcaacaagatcagaagaagacttgtgaaagacagcaacaccaagaaggccggcaagacaggccccatgaaaaccctgctggttagagtgatgacacccgatctgagagagcggctggaaaacctgagaaagaagcctgaaaatatcccccagcccatcagcaatacatctagagccaacctgaataagctgctgaccgattacaccgaaatgaagaaggcgatcctgcatgtgtactgggaagagttccagaaggaccctgtgggcctgatgagccgggtggcccagcctgccagcaagaagatcgatcagaacaagctgaaacctgagatggacgagaagggcaacctgaccaccgccggctttgcctgctctcagtgtggccagcccctgttcgtgtacaagctggagcaggtgtctgagaagggcaaggcttacaccaactacttcggacggtgcaatgtggccgagcacgaaaagctgatcctgctggcccagctgaagcccgagaaggatagcgacgaagccgtgacatatagcctgggaaagtttgggcagagggccctggatttctacagcattcatgtgaccaaggagtccacccaccccgtgaagcccctggcccagatcgccggaaacagatacgcctccggacctgtgggaaaggccctgagcgacgcatgtatgggcacaatcgcctccttcctgtctaagtaccaggacatcatcatcgaacaccagaaggtggtgaagggcaaccagaagagactggagagcctgcgggagctggccggcaaggaaaacctggaataccctagcgtgaccctgccacctcagcctcacaccaaggagggcgttgatgcctacaacgaagtgatcgcccgggtgcgaatgtgggtgaacctgaacctgtggcagaagctgaagctaagcagagatgatgccaagcctctgctgagactgaagggattcccttcctttcctctggtcgagagacaggccaacgaagtggactggtgggacatggtgtgtaacgtgaagaagctgatcaacgagaaaaaggaggatggcaaggtgttttggcagaatctggctggctacaagagacaggaagccctgagaccatacctgagcagcgaggaagatcggaagaagggaaagaaattcgctcggtaccagctgggcgacctgctgctgcacctggaaaagaagcacggcgaggactggggaaaggtgtacgacgaggcctgggagcggattgacaagaaagtggaaggcctgagcaagcacatcaagctggaagaggaacggagaagcgaggacgcccagagcaaggccgccctgaccgactggctgcgggctaaggccagcttcgtgatcgagggcctgaaggaggccgacaaggacgagttctgcagatgcgagctgaagctgcagaagtggtacggggacctgcggggaaagcccttcgccatcgaagccgagaacagcatcctggacatcagcggcttcagcaagcagtacaactgtgccttcatctggcagaaggacggcgtgaagaagctgaacctgtacctgatcatcaactacttcaagggcggcaagctgcggttcaagaagatcaaacctgaagccttcgaagccaacagattctacaccgtgatcaacaaaaagagcggcgagatcgtgcccatggaggtgaacttcaacttcgacgaccccaacctgatcatcctgcctctggcctttggcaagagacagggcagagaattcatctggaacgacctgctgtccctggaaaccggcagcctgaagctggccaacggaagagtgatcgagaagacactgtacaacagaagaacccggcaggatgagcctgccctgttcgtggccctgaccttcgagcggcgggaggtcctggactcctccaatatcaaaccaatgaacctgatcggcgtggcaagaggcgaaaacatccccgccgtgatcgccctgaccgaccccgagggctgcccactgagccggtttaaggatagcctgggaaacccaacccacatcctgagaatcggcgagagctataaggagaagcagcggaccatccaggccaagaaggaggtggagcagcggagagccggcggctacagccggaagtacgccagcaaagccaagaatctggcagacgatatggtgagaaacaccgctagagatctgctgtactacgccgtgacccaggatgccatgctgatcttcgccaacctgagccggggcttcggccggcagggcaagcggaccttcatggccgagagacagtacacacggatggaggactggctgaccgccaagctggcctacgagggcctgagcaagacctacctgtccaagacactggcccagtacacctccaagacatgcagcaactgtgggtttaccatcaccagcgccgactacgacagggtgctggagaagctgaagaagacagcaacaggctggatgaccacaattaacggcaaggagctgaaggtggagggccagattacctactacaacagatacaagagacagaacgtagtcaaggacctgtccgtcgagctggatagactgagcgaagaatctgtgaacaacgacatctcctcctggacaaagggcagaagcggagaagctctgagcctcctgaagaaaagattctcccatagacccgtgcaggagaagttcgtgtgcctgaactgcggcttcgagacacacgcagccgagcaagccgccctgaacatcgccagatcctggctgttcctgcggagccaggagtacaagaaataccagacaaacaagacaaccggcaacaccgataagagagccttcgtcgagacctggcagtccttttaccggaagaagcttaaggaggtgtggaaacctgccgtgcggtctggcggatctggcggaggctccatggtgctggtgagcttcgaggacgtggccgtggacttcacctgggaggagtggcaggccctggacgccgcccagaggaccctgtacagggacgtgatgctggagacctacagcagcctggtgagcctgggccactgcatggccaagcccgagctgatcttcaacctggagcagggcctgggccccaggagcaccgccggcgccagcgtgtggaacctgagcggcaggaccgaggacagcggcggcccaagcagcggcgcccctcctcccagcggcggcagcccagccggctccccaacctctaccgaggagggcacctctgagtccgccacccccgagagcggccctggcacctccaccgagcccagcgagggcagcgcacccggcagccctgccggcagccccacctccacagaggagggaaccagcaccgagcccagcgaaggcagcgccccaggcaccagcaccgagcctagtgagcaggagattaaacggatcaacaagatcagaagaagacttgtgaaagacagcaacaccaagaaggccggcaagacaggccccatgaaaaccctgctggttagagtgatgacacccgatctgagagagcggctggaaaacctgagaaagaagcctgaaaatatcccccagcccatcagcaatacatctagagccaacctgaataagctgctgaccgattacaccgaaatgaagaaggcgatcctgcatgtgtactgggaagagttccagaaggaccctgtgggcctgatgagccgggtggcccagcctgccagcaagaagatcgatcagaacaagctgaaacctgagatggacgagaagggcaacctgaccaccgccggctttgcctgctctcagtgtggccagcccctgttcgtgtacaagctggagcaggtgtctgagaagggcaaggcttacaccaactacttcggacggtgcaatgtggccgagcacgaaaagctgatcctgctggcccagctgaagcccgagaaggatagcgacgaagccgtgacatatagcctgggaaagtttgggcagagggccctggatttctacagcattcatgtgaccaaggagtccacccaccccgtgaagcccctggcccagatcgccggaaacagatacgcctccggacctgtgggaaaggccctgagcgacgcatgtatgggcacaatcgcctccttcctgtctaagtaccaggacatcatcatcgaacaccagaaggtggtgaagggcaaccagaagagactggagagcctgcgggagctggccggcaaggaaaacctggaataccctagcgtgaccctgccacctcagcctcacaccaaggagggcgttgatgcctacaacgaagtgatcgcccgggtgcgaatgtgggtgaacctgaacctgtggcagaagctgaagctaagcagagatgatgccaagcctctgctgagactgaagggattcccttcctttcctctggtcgagagacaggccaacgaagtggactggtgggacatggtgtgtaacgtgaagaagctgatcaacgagaaaaaggaggatggcaaggtgttttggcagaatctggctggctacaagagacaggaagccctgagaccatacctgagcagcgaggaagatcggaagaagggaaagaaattcgctcggtaccagctgggcgacctgctgctgcacctggaaaagaagcacggcgaggactggggaaaggtgtacgacgaggcctgggagcggattgacaagaaagtggaaggcctgagcaagcacatcaagctggaagaggaacggagaagcgaggacgcccagagcaaggccgccctgaccgactggctgcgggctaaggccagcttcgtgatcgagggcctgaaggaggccgacaaggacgagttctgcagatgcgagctgaagctgcagaagtggtacggggacctgcggggaaagcccttcgccatcgaagccgagaacagcatcctggacatcagcggcttcagcaagcagtacaactgtgccttcatctggcagaaggacggcgtgaagaagctgaacctgtacctgatcatcaactacttcaagggcggcaagctgcggttcaagaagatcaaacctgaagccttcgaagccaacagattctacaccgtgatcaacaaaaagagcggcgagatcgtgcccatggaggtgaacttcaacttcgacgaccccaacctgatcatcctgcctctggcctttggcaagagacagggcagagaattcatctggaacgacctgctgtccctggaaaccggcagcctgaagctggccaacggaagagtgatcgagaagacactgtacaacagaagaacccggcaggatgagcctgccctgttcgtggccctgaccttcgagcggcgggaggtcctggactcctccaatatcaaaccaatgaacctgatcggcgtggcaagaggcgaaaacatccccgccgtgatcgccctgaccgaccccgagggctgcccactgagccggtttaaggatagcctgggaaacccaacccacatcctgagaatcggcgagagctataaggagaagcagcggaccatccaggccaagaaggaggtggagcagcggagagccggcggctacagccggaagtacgccagcaaagccaagaatctggcagacgatatggtgagaaacaccgctagagatctgctgtactacgccgtgacccaggatgccatgctgatcttcgccaacctgagccggggcttcggccggcagggcaagcggaccttcatggccgagagacagtacacacggatggaggactggctgaccgccaagctggcctacgagggcctgagcaagacctacctgtccaagacactggcccagtacacctccaagacatgcagcaactgtgggtttaccatcaccagcgccgactacgacagggtgctggagaagctgaagaagacagcaacaggctggatgaccacaattaacggcaaggagctgaaggtggagggccagattacctactacaacagatacaagagacagaacgtagtcaaggacctgtccgtcgagctggatagactgagcgaagaatctgtgaacaacgacatctcctcctggacaaagggcagaagcggagaagctctgagcctcctgaagaaaagattctcccatagacccgtgcaggagaagttcgtgtgcctgaactgcggcttcgagacacacgcagccgagcaagccgccctgaacatcgccagatcctggctgttcctgcggagccaggagtacaagaaataccagacaaacaagacaaccggcaacaccgataagagagccttcgtcgagacctggcagtccttttaccggaagaagcttaaggaggtgtggaaacctgccgtgcggtctggcggatctggcggaggctcctatggtgctggtgagcttcgaggacgtggccgtggacttcacctgggaggagtggcaggccctggacgccgcccagaggaccctgtacagggacgtgatgctggagacctacagcagcctggtgagcctgggccactgcatggccaagcccgagctgatcttcaacctggagcagggcctgggccccaggagcaccgccggcgccagcgtgtggaacctgagcggcaggaccgaggacagcggatctggctccggcagcggccccaagaaaaagagaaaagtctaagctgccttctgcggggcttgccttctggccatgcccttcttctctcccttgcacctgtacctcttggtctttgaataaagcctgagtaggaaggctagcaaaaaaaaaaaaaaaaaaaaaaaaaaaaaaaaaaaaaaaaaaaaaaaaaaaaaaaaaaaaaaaaaaaaaaaaaaaaaaaa

SEQ ID NO: 16723 - RNA, 9485 nt, synthetic construct
  source 1..9485: mol_type = other RNA
aggaaataagagagaaaagaagagtaagaagaaatataagagccaccatggcccctaagaagaagcgtaaagtgagccggatggaacgcctcgtctacgaggtgcggcagaagtgcagaaacatcgaggacatctgcatctcctgcggatctctgaacgtgaccctggagcacccactgttcatcggcggcatgtgccagaactgtaaaaactgttttctggagtgtgcctatcaatacgacgatgacggctaccagagctactgcaccatctgttgcggcggaagagaggtgctgatgtgtggaaataacaactgctgccggtgcttctgcgtggaatgcgtggacctgctggtgggccccggcgccgcccaggccgctattaaggaagatccttggaactgctacatgtgcggccacaagggcacatacggcctgctgagacggagagaggactggcctagcagactgcagatgttcttcgccaataaccacgaccaggagttcgacccccctaaggtgtaccctcccgtccccgccgagaagagaaagcccatccgggtcctgagcctgttcgatggcatcgccaccggtctgctggtgctgaaggacctgggcatccaggtggataggtacattgcctccgaggtgtgcgaggactccatcaccgtgggaatggtgcgtcatcagggcaagatcatgtacgtgggcgacgtgcggagcgtgacacagaagcatatccaggagtggggccctttcgacctggtgatcggcggcagcccttgcaatgacctgagcatcgtgaacccagcccggaagggcctgtacgagggaaccggcagactgttcttcgagttttacagactgctgcacgacgcccggcctaaggaaggcgacgaccggcccttcttttggctgttcgagaatgtggtggccatgggagtcagcgacaagcgggatattagccggttcctggagagcaaccccgtgatgatcgatgccaaggaagtgagcgccgcccaccgggccagatacttctggggcaatctgcctggcatgaacagacccctggccagcaccgtgaacgacaagctggagctgcaggagtgcctggagcacggccggatcgccaagttcagcaaggtgagaaccatcaccacccgaagcaacagcatcaaacaaggcaaggaccagcactttcctgtgttcatgaacgagaaggaggacatcctgtggtgtaccgagatggagagagtgttcgggttcccagtccactacacagatgtcagcaacatgtctagactggccagacagagactgctgggaagaagctggtccgtccctgtgatcagacacctgttcgcccctctgaaggagtacttcgcctgcgtgagcagcggcaacagcaacgccaacagccggggccccagcttctctagcggcctggtgccactgtccctgagagggagccacatgggccccatggagatctacaaaaccgtgagcgcctggaagcggcagcctgtgcgcgtgctgagcctgtttcggaatatcgataaagtcctgaaaagcctgggattcctggagagcggctctggctccggcggtggcaccctgaagtacgtggaggatgtgacaaacgtggtcagacgggatgtggagaagtggggccccttcgatctggtgtacggcagcacccaacccctgggcagctcttgtgaccggtgccctggctggtacatgtttcagttccaccggatcctgcagtacgccctgccgagacaggagtcccagcggccattcttttggattttcatggacaacttgctgctgaccgaggatgaccaggaaactaccactcggttcctgcagaccgaagccgtgaccctgcaggacgtgagaggccgggactaccagaacgccatgcgggtgtggtccaacatccctggactgaaaagcaagcacgcacctctgacccctaaagaagaggagtacctgcaggcccaggtgcggagcagaagcaagctggacgcccctaaggtggatctgctggtgaagaattgcctcctgcccctgagagagtacttcaagtatttcagccagaatagtctgcccctgggaggcagcggcggcggcgccctggtgacatttgaggacgtcgccgtgcggttcacccaggaggaatgggctctgctggatccttctcagaaaatcctgtaccgggacgtgatgagagagacataccggaatctgacctccgtgggcatcaactgggaatgttgggaccttgaagcctgcttcagaagcctgggaagaaacctgagagtgcaggtggtgaagagaaagtgcgagctgaccaacagcggcccctgcgccgagggcggcccaagcagcggcgcccctcctcccagcggcggcagcccagccggctccccaacctctaccgaggagggcacctctgagtccgccacccccgagagcggccctggcacctccaccgagcccagcgagggcagcgcacccggcagccctgccggcagccccacctccacagaggagggaaccagcaccgagcccagcgaaggcagcgccccaggcaccagcaccgagcctagtgagcaggagattaaacggatcaacaagatcagaagaagacttgtgaaagacagcaacaccaagaaggccggcaagacaggccccatgaaaaccctgctggttagagtgatgacacccgatctgagagagcggctggaaaacctgagaaagaagcctgaaaatatcccccagcccatcagcaatacatctagagccaacctgaataagctgctgaccgattacaccgaaatgaagaaggcgatcctgcatgtgtactgggaagagttccagaaggaccctgtgggcctgatgagccgggtggcccagcctgccagcaagaagatcgatcagaacaagctgaaacctgagatggacgagaagggcaacctgaccaccgccggctttgcctgctctcagtgtggccagcccctgttcgtgtacaagctggagcaggtgtctgagaagggcaaggcttacaccaactacttcggacggtgcaatgtggccgagcacgaaaagctgatcctgctggcccagctgaagcccgagaaggatagcgacgaagccgtgacatatagcctgggaaagtttgggcagagggccctggatttctacagcattcatgtgaccaaggagtccacccaccccgtgaagcccctggcccagatcgccggaaacagatacgcctccggacctgtgggaaaggccctgagcgacgcatgtatgggcacaatcgcctccttcctgtctaagtaccaggacatcatcatcgaacaccagaaggtggtgaagggcaaccagaagagactggagagcctgcgggagctggccggcaaggaaaacctggaataccctagcgtgaccctgccacctcagcctcacaccaaggagggcgttgatgcctacaacgaagtgatcgcccgggtgcgaatgtgggtgaacctgaacctgtggcagaagctgaagctaagcagagatgatgccaagcctctgctgagactgaagggattcccttcctttcctctggtcgagagacaggccaacgaagtggactggtgggacatggtgtgtaacgtgaagaagctgatcaacgagaaaaaggaggatggcaaggtgttttggcagaatctggctggctacaagagacaggaagccctgagaccatacctgagcagcgaggaagatcggaagaagggaaagaaattcgctcggtaccagctgggcgacctgctgctgcacctggaaaagaagcacggcgaggactggggaaaggtgtacgacgaggcctgggagcggattgacaagaaagtggaaggcctgagcaagcacatcaagctggaagaggaacggagaagcgaggacgcccagagcaaggccgccctgaccgactggctgcgggctaaggccagcttcgtgatcgagggcctgaaggaggccgacaaggacgagttctgcagatgcgagctgaagctgcagaagtggtacggggacctgcggggaaagcccttcgccatcgaagccgagaacagcatcctggacatcagcggcttcagcaagcagtacaactgtgccttcatctggcagaaggacggcgtgaagaagctgaacctgtacctgatcatcaactacttcaagggcggcaagctgcggttcaagaagatcaaacctgaagccttcgaagccaacagattctacaccgtgatcaacaaaaagagcggcgagatcgtgcccatggaggtgaacttcaacttcgacgaccccaacctgatcatcctgcctctggcctttggcaagagacagggcagagaattcatctggaacgacctgctgtccctggaaaccggcagcctgaagctggccaacggaagagtgatcgagaagacactgtacaacagaagaacccggcaggatgagcctgccctgttcgtggccctgaccttcgagcggcgggaggtcctggactcctccaatatcaaaccaatgaacctgatcggcgtggcaagaggcgaaaacatccccgccgtgatcgccctgaccgaccccgagggctgcccactgagccggtttaaggatagcctgggaaacccaacccacatcctgagaatcggcgagagctataaggagaagcagcggaccatccaggccaagaaggaggtggagcagcggagagccggcggctacagccggaagtacgccagcaaagccaagaatctggcagacgatatggtgagaaacaccgctagagatctgctgtactacgccgtgacccaggatgccatgctgatcttcgccaacctgagccggggcttcggccggcagggcaagcggaccttcatggccgagagacagtacacacggatggaggactggctgaccgccaagctggcctacgagggcctgagcaagacctacctgtccaagacactggcccagtacacctccaagacatgcagcaactgtgggtttaccatcaccagcgccgactacgacagggtgctggagaagctgaagaagacagcaacaggctggatgaccacaattaacggcaaggagctgaaggtggagggccagattacctactacaacagatacaagagacagaacgtagtcaaggacctgtccgtcgagctggatagactgagcgaagaatctgtgaacaacgacatctcctcctggacaaagggcagaagcggagaagctctgagcctcctgaagaaaagattctcccatagacccgtgcaggagaagttcgtgtgcctgaactgcggcttcgagacacacgcagccgagcaagccgccctgaacatcgccagatcctggctgttcctgcggagccaggagtacaagaaataccagacaaacaagacaaccggcaacaccgataagagagccttcgtcgagacctggcagtccttttaccggaagaagcttaaggaggtgtggaaacctgccgtgcggtctggcggatctggcggaggctccatggacaccgtggccctggaggacgtggccgtgaacttcacccaggaggagtgggccctgctgggccccagccagaagaagctgtacagggacgtgatgcaggagaccatcaggaacctggactgcatcaagatgatcagcgaggaccagaacatcgaggaccagtacaagaaccccaagaagaacctgaggtgcaggatggccgagaggctgagcgagagcaaggacaacagccagtgcggcggcggcccaagcagcggcgcccctcctcccagcggcggcagcccagccggctccccaacctctaccgaggagggcacctctgagtccgccacccccgagagcggccctggcacctccaccgagcccagcgagggcagcgcacccggcagccctgccggcagccccacctccacagaggagggaaccagcaccgagcccagcgaaggcagcgccccaggcaccagcaccgagcctagtgagcaggagattaaacggatcaacaagatcagaagaagacttgtgaaagacagcaacaccaagaaggccggcaagacaggccccatgaaaaccctgctggttagagtgatgacacccgatctgagagagcggctggaaaacctgagaaagaagcctgaaaatatcccccagcccatcagcaatacatctagagccaacctgaataagctgctgaccgattacaccgaaatgaagaaggcgatcctgcatgtgtactgggaagagttccagaaggaccctgtgggcctgatgagccgggtggcccagcctgccagcaagaagatcgatcagaacaagctgaaacctgagatggacgagaagggcaacctgaccaccgccggctttgcctgctctcagtgtggccagcccctgttcgtgtacaagctggagcaggtgtctgagaagggcaaggcttacaccaactacttcggacggtgcaatgtggccgagcacgaaaagctgatcctgctggcccagctgaagcccgagaaggatagcgacgaagccgtgacatatagcctgggaaagtttgggcagagggccctggatttctacagcattcatgtgaccaaggagtccacccaccccgtgaagcccctggcccagatcgccggaaacagatacgcctccggacctgtgggaaaggccctgagcgacgcatgtatgggcacaatcgcctccttcctgtctaagtaccaggacatcatcatcgaacaccagaaggtggtgaagggcaaccagaagagactggagagcctgcgggagctggccggcaaggaaaacctggaataccctagcgtgaccctgccacctcagcctcacaccaaggagggcgttgatgcctacaacgaagtgatcgcccgggtgcgaatgtgggtgaacctgaacctgtggcagaagctgaagctaagcagagatgatgccaagcctctgctgagactgaagggattcccttcctttcctctggtcgagagacaggccaacgaagtggactggtgggacatggtgtgtaacgtgaagaagctgatcaacgagaaaaaggaggatggcaaggtgttttggcagaatctggctggctacaagagacaggaagccctgagaccatacctgagcagcgaggaagatcggaagaagggaaagaaattcgctcggtaccagctgggcgacctgctgctgcacctggaaaagaagcacggcgaggactggggaaaggtgtacgacgaggcctgggagcggattgacaagaaagtggaaggcctgagcaagcacatcaagctggaagaggaacggagaagcgaggacgcccagagcaaggccgccctgaccgactggctgcgggctaaggccagcttcgtgatcgagggcctgaaggaggccgacaaggacgagttctgcagatgcgagctgaagctgcagaagtggtacggggacctgcggggaaagcccttcgccatcgaagccgagaacagcatcctggacatcagcggcttcagcaagcagtacaactgtgccttcatctggcagaaggacggcgtgaagaagctgaacctgtacctgatcatcaactacttcaagggcggcaagctgcggttcaagaagatcaaacctgaagccttcgaagccaacagattctacaccgtgatcaacaaaaagagcggcgagatcgtgcccatggaggtgaacttcaacttcgacgaccccaacctgatcatcctgcctctggcctttggcaagagacagggcagagaattcatctggaacgacctgctgtccctggaaaccggcagcctgaagctggccaacggaagagtgatcgagaagacactgtacaacagaagaacccggcaggatgagcctgccctgttcgtggccctgaccttcgagcggcgggaggtcctggactcctccaatatcaaaccaatgaacctgatcggcgtggcaagaggcgaaaacatccccgccgtgatcgccctgaccgaccccgagggctgcccactgagccggtttaaggatagcctgggaaacccaacccacatcctgagaatcggcgagagctataaggagaagcagcggaccatccaggccaagaaggaggtggagcagcggagagccggcggctacagccggaagtacgccagcaaagccaagaatctggcagacgatatggtgagaaacaccgctagagatctgctgtactacgccgtgacccaggatgccatgctgatcttcgccaacctgagccggggcttcggccggcagggcaagcggaccttcatggccgagagacagtacacacggatggaggactggctgaccgccaagctggcctacgagggcctgagcaagacctacctgtccaagacactggcccagtacacctccaagacatgcagcaactgtgggtttaccatcaccagcgccgactacgacagggtgctggagaagctgaagaagacagcaacaggctggatgaccacaattaacggcaaggagctgaaggtggagggccagattacctactacaacagatacaagagacagaacgtagtcaaggacctgtccgtcgagctggatagactgagcgaagaatctgtgaacaacgacatctcctcctggacaaagggcagaagcggagaagctctgagcctcctgaagaaaagattctcccatagacccgtgcaggagaagttcgtgtgcctgaactgcggcttcgagacacacgcagccgagcaagccgccctgaacatcgccagatcctggctgttcctgcggagccaggagtacaagaaataccagacaaacaagacaaccggcaacaccgataagagagccttcgtcgagacctggcagtccttttaccggaagaagcttaaggaggtgtggaaacctgccgtgcggtctggcggatctggcggaggctcctatggacaccgtggccctggaggacgtggccgtgaacttcacccaggaggagtgggccctgctgggccccagccagaagaagctgtacagggacgtgatgcaggagaccatcaggaacctggactgcatcaagatgatcagcgaggaccagaacatcgaggaccagtacaagaaccccaagaagaacctgaggtgcaggatggccgagaggctgagcgagagcaaggacaacagccagtgcggcggatctggctccggcagcggccccaagaaaaagagaaaagtctaagctgccttctgcggggcttgccttctggccatgcccttcttctctcccttgcacctgtacctcttggtctttgaataaagcctgagtaggaaggctagcaaaaaaaaaaaaaaaaaaaaaaaaaaaaaaaaaaaaaaaaaaaaaaaaaaaaaaaaaaaaaaaaaaaaaaaaaaaaaaaa

SEQ ID NO: 16724 - RNA, 9485 nt, synthetic construct
  source 1..9485: mol_type = other RNA
aggaaataagagagaaaagaagagtaagaagaaatataagagccaccatggcccctaagaagaagcgtaaagtgagccggatggaacgcctcgtctacgaggtgcggcagaagtgcagaaacatcgaggacatctgcatctcctgcggatctctgaacgtgaccctggagcacccactgttcatcggcggcatgtgccagaactgtaaaaactgttttctggagtgtgcctatcaatacgacgatgacggctaccagagctactgcaccatctgttgcggcggaagagaggtgctgatgtgtggaaataacaactgctgccggtgcttctgcgtggaatgcgtggacctgctggtgggccccggcgccgcccaggccgctattaaggaagatccttggaactgctacatgtgcggccacaagggcacatacggcctgctgagacggagagaggactggcctagcagactgcagatgttcttcgccaataaccacgaccaggagttcgacccccctaaggtgtaccctcccgtccccgccgagaagagaaagcccatccgggtcctgagcctgttcgatggcatcgccaccggtctgctggtgctgaaggacctgggcatccaggtggataggtacattgcctccgaggtgtgcgaggactccatcaccgtgggaatggtgcgtcatcagggcaagatcatgtacgtgggcgacgtgcggagcgtgacacagaagcatatccaggagtggggccctttcgacctggtgatcggcggcagcccttgcaatgacctgagcatcgtgaacccagcccggaagggcctgtacgagggaaccggcagactgttcttcgagttttacagactgctgcacgacgcccggcctaaggaaggcgacgaccggcccttcttttggctgttcgagaatgtggtggccatgggagtcagcgacaagcgggatattagccggttcctggagagcaaccccgtgatgatcgatgccaaggaagtgagcgccgcccaccgggccagatacttctggggcaatctgcctggcatgaacagacccctggccagcaccgtgaacgacaagctggagctgcaggagtgcctggagcacggccggatcgccaagttcagcaaggtgagaaccatcaccacccgaagcaacagcatcaaacaaggcaaggaccagcactttcctgtgttcatgaacgagaaggaggacatcctgtggtgtaccgagatggagagagtgttcgggttcccagtccactacacagatgtcagcaacatgtctagactggccagacagagactgctgggaagaagctggtccgtccctgtgatcagacacctgttcgcccctctgaaggagtacttcgcctgcgtgagcagcggcaacagcaacgccaacagccggggccccagcttctctagcggcctggtgccactgtccctgagagggagccacatgggccccatggagatctacaaaaccgtgagcgcctggaagcggcagcctgtgcgcgtgctgagcctgtttcggaatatcgataaagtcctgaaaagcctgggattcctggagagcggctctggctccggcggtggcaccctgaagtacgtggaggatgtgacaaacgtggtcagacgggatgtggagaagtggggccccttcgatctggtgtacggcagcacccaacccctgggcagctcttgtgaccggtgccctggctggtacatgtttcagttccaccggatcctgcagtacgccctgccgagacaggagtcccagcggccattcttttggattttcatggacaacttgctgctgaccgaggatgaccaggaaactaccactcggttcctgcagaccgaagccgtgaccctgcaggacgtgagaggccgggactaccagaacgccatgcgggtgtggtccaacatccctggactgaaaagcaagcacgcacctctgacccctaaagaagaggagtacctgcaggcccaggtgcggagcagaagcaagctggacgcccctaaggtggatctgctggtgaagaattgcctcctgcccctgagagagtacttcaagtatttcagccagaatagtctgcccctgggaggcagcggcggcggcgccctggtgacatttgaggacgtcgccgtgcggttcacccaggaggaatgggctctgctggatccttctcagaaaatcctgtaccgggacgtgatgagagagacataccggaatctgacctccgtgggcatcaactgggaatgttgggaccttgaagcctgcttcagaagcctgggaagaaacctgagagtgcaggtggtgaagagaaagtgcgagctgaccaacagcggcccctgcgccgagggcggcccaagcagcggcgcccctcctcccagcggcggcagcccagccggctccccaacctctaccgaggagggcacctctgagtccgccacccccgagagcggccctggcacctccaccgagcccagcgagggcagcgcacccggcagccctgccggcagccccacctccacagaggagggaaccagcaccgagcccagcgaaggcagcgccccaggcaccagcaccgagcctagtgagcaggagattaaacggatcaacaagatcagaagaagacttgtgaaagacagcaacaccaagaaggccggcaagacaggccccatgaaaaccctgctggttagagtgatgacacccgatctgagagagcggctggaaaacctgagaaagaagcctgaaaatatcccccagcccatcagcaatacatctagagccaacctgaataagctgctgaccgattacaccgaaatgaagaaggcgatcctgcatgtgtactgggaagagttccagaaggaccctgtgggcctgatgagccgggtggcccagcctgccagcaagaagatcgatcagaacaagctgaaacctgagatggacgagaagggcaacctgaccaccgccggctttgcctgctctcagtgtggccagcccctgttcgtgtacaagctggagcaggtgtctgagaagggcaaggcttacaccaactacttcggacggtgcaatgtggccgagcacgaaaagctgatcctgctggcccagctgaagcccgagaaggatagcgacgaagccgtgacatatagcctgggaaagtttgggcagagggccctggatttctacagcattcatgtgaccaaggagtccacccaccccgtgaagcccctggcccagatcgccggaaacagatacgcctccggacctgtgggaaaggccctgagcgacgcatgtatgggcacaatcgcctccttcctgtctaagtaccaggacatcatcatcgaacaccagaaggtggtgaagggcaaccagaagagactggagagcctgcgggagctggccggcaaggaaaacctggaataccctagcgtgaccctgccacctcagcctcacaccaaggagggcgttgatgcctacaacgaagtgatcgcccgggtgcgaatgtgggtgaacctgaacctgtggcagaagctgaagctaagcagagatgatgccaagcctctgctgagactgaagggattcccttcctttcctctggtcgagagacaggccaacgaagtggactggtgggacatggtgtgtaacgtgaagaagctgatcaacgagaaaaaggaggatggcaaggtgttttggcagaatctggctggctacaagagacaggaagccctgagaccatacctgagcagcgaggaagatcggaagaagggaaagaaattcgctcggtaccagctgggcgacctgctgctgcacctggaaaagaagcacggcgaggactggggaaaggtgtacgacgaggcctgggagcggattgacaagaaagtggaaggcctgagcaagcacatcaagctggaagaggaacggagaagcgaggacgcccagagcaaggccgccctgaccgactggctgcgggctaaggccagcttcgtgatcgagggcctgaaggaggccgacaaggacgagttctgcagatgcgagctgaagctgcagaagtggtacggggacctgcggggaaagcccttcgccatcgaagccgagaacagcatcctggacatcagcggcttcagcaagcagtacaactgtgccttcatctggcagaaggacggcgtgaagaagctgaacctgtacctgatcatcaactacttcaagggcggcaagctgcggttcaagaagatcaaacctgaagccttcgaagccaacagattctacaccgtgatcaacaaaaagagcggcgagatcgtgcccatggaggtgaacttcaacttcgacgaccccaacctgatcatcctgcctctggcctttggcaagagacagggcagagaattcatctggaacgacctgctgtccctggaaaccggcagcctgaagctggccaacggaagagtgatcgagaagacactgtacaacagaagaacccggcaggatgagcctgccctgttcgtggccctgaccttcgagcggcgggaggtcctggactcctccaatatcaaaccaatgaacctgatcggcgtggcaagaggcgaaaacatccccgccgtgatcgccctgaccgaccccgagggctgcccactgagccggtttaaggatagcctgggaaacccaacccacatcctgagaatcggcgagagctataaggagaagcagcggaccatccaggccaagaaggaggtggagcagcggagagccggcggctacagccggaagtacgccagcaaagccaagaatctggcagacgatatggtgagaaacaccgctagagatctgctgtactacgccgtgacccaggatgccatgctgatcttcgccaacctgagccggggcttcggccggcagggcaagcggaccttcatggccgagagacagtacacacggatggaggactggctgaccgccaagctggcctacgagggcctgagcaagacctacctgtccaagacactggcccagtacacctccaagacatgcagcaactgtgggtttaccatcaccagcgccgactacgacagggtgctggagaagctgaagaagacagcaacaggctggatgaccacaattaacggcaaggagctgaaggtggagggccagattacctactacaacagatacaagagacagaacgtagtcaaggacctgtccgtcgagctggatagactgagcgaagaatctgtgaacaacgacatctcctcctggacaaagggcagaagcggagaagctctgagcctcctgaagaaaagattctcccatagacccgtgcaggagaagttcgtgtgcctgaactgcggcttcgagacacacgcagccgagcaagccgccctgaacatcgccagatcctggctgttcctgcggagccaggagtacaagaaataccagacaaacaagacaaccggcaacaccgataagagagccttcgtcgagacctggcagtccttttaccggaagaagcttaaggaggtgtggaaacctgccgtgcggtctggcggatctggcggaggctccgcccaggtgtgcgtgaccttcgacgacgtggccgtgaccttcacccaggaggagtggggccacctggaccccgcccagaggaccctgtaccaggaggtgatgctggagacctgcggcctgctgatgagcctgggctgccccgtgcccaggcccgagctgatctaccagctggagcacggccaggagctgtggaccgtgaagagggacctgagcggcagcacctgccccgtggacaagggcaagggcggcccaagcagcggcgcccctcctcccagcggcggcagcccagccggctccccaacctctaccgaggagggcacctctgagtccgccacccccgagagcggccctggcacctccaccgagcccagcgagggcagcgcacccggcagccctgccggcagccccacctccacagaggagggaaccagcaccgagcccagcgaaggcagcgccccaggcaccagcaccgagcctagtgagcaggagattaaacggatcaacaagatcagaagaagacttgtgaaagacagcaacaccaagaaggccggcaagacaggccccatgaaaaccctgctggttagagtgatgacacccgatctgagagagcggctggaaaacctgagaaagaagcctgaaaatatcccccagcccatcagcaatacatctagagccaacctgaataagctgctgaccgattacaccgaaatgaagaaggcgatcctgcatgtgtactgggaagagttccagaaggaccctgtgggcctgatgagccgggtggcccagcctgccagcaagaagatcgatcagaacaagctgaaacctgagatggacgagaagggcaacctgaccaccgccggctttgcctgctctcagtgtggccagcccctgttcgtgtacaagctggagcaggtgtctgagaagggcaaggcttacaccaactacttcggacggtgcaatgtggccgagcacgaaaagctgatcctgctggcccagctgaagcccgagaaggatagcgacgaagccgtgacatatagcctgggaaagtttgggcagagggccctggatttctacagcattcatgtgaccaaggagtccacccaccccgtgaagcccctggcccagatcgccggaaacagatacgcctccggacctgtgggaaaggccctgagcgacgcatgtatgggcacaatcgcctccttcctgtctaagtaccaggacatcatcatcgaacaccagaaggtggtgaagggcaaccagaagagactggagagcctgcgggagctggccggcaaggaaaacctggaataccctagcgtgaccctgccacctcagcctcacaccaaggagggcgttgatgcctacaacgaagtgatcgcccgggtgcgaatgtgggtgaacctgaacctgtggcagaagctgaagctaagcagagatgatgccaagcctctgctgagactgaagggattcccttcctttcctctggtcgagagacaggccaacgaagtggactggtgggacatggtgtgtaacgtgaagaagctgatcaacgagaaaaaggaggatggcaaggtgttttggcagaatctggctggctacaagagacaggaagccctgagaccatacctgagcagcgaggaagatcggaagaagggaaagaaattcgctcggtaccagctgggcgacctgctgctgcacctggaaaagaagcacggcgaggactggggaaaggtgtacgacgaggcctgggagcggattgacaagaaagtggaaggcctgagcaagcacatcaagctggaagaggaacggagaagcgaggacgcccagagcaaggccgccctgaccgactggctgcgggctaaggccagcttcgtgatcgagggcctgaaggaggccgacaaggacgagttctgcagatgcgagctgaagctgcagaagtggtacggggacctgcggggaaagcccttcgccatcgaagccgagaacagcatcctggacatcagcggcttcagcaagcagtacaactgtgccttcatctggcagaaggacggcgtgaagaagctgaacctgtacctgatcatcaactacttcaagggcggcaagctgcggttcaagaagatcaaacctgaagccttcgaagccaacagattctacaccgtgatcaacaaaaagagcggcgagatcgtgcccatggaggtgaacttcaacttcgacgaccccaacctgatcatcctgcctctggcctttggcaagagacagggcagagaattcatctggaacgacctgctgtccctggaaaccggcagcctgaagctggccaacggaagagtgatcgagaagacactgtacaacagaagaacccggcaggatgagcctgccctgttcgtggccctgaccttcgagcggcgggaggtcctggactcctccaatatcaaaccaatgaacctgatcggcgtggcaagaggcgaaaacatccccgccgtgatcgccctgaccgaccccgagggctgcccactgagccggtttaaggatagcctgggaaacccaacccacatcctgagaatcggcgagagctataaggagaagcagcggaccatccaggccaagaaggaggtggagcagcggagagccggcggctacagccggaagtacgccagcaaagccaagaatctggcagacgatatggtgagaaacaccgctagagatctgctgtactacgccgtgacccaggatgccatgctgatcttcgccaacctgagccggggcttcggccggcagggcaagcggaccttcatggccgagagacagtacacacggatggaggactggctgaccgccaagctggcctacgagggcctgagcaagacctacctgtccaagacactggcccagtacacctccaagacatgcagcaactgtgggtttaccatcaccagcgccgactacgacagggtgctggagaagctgaagaagacagcaacaggctggatgaccacaattaacggcaaggagctgaaggtggagggccagattacctactacaacagatacaagagacagaacgtagtcaaggacctgtccgtcgagctggatagactgagcgaagaatctgtgaacaacgacatctcctcctggacaaagggcagaagcggagaagctctgagcctcctgaagaaaagattctcccatagacccgtgcaggagaagttcgtgtgcctgaactgcggcttcgagacacacgcagccgagcaagccgccctgaacatcgccagatcctggctgttcctgcggagccaggagtacaagaaataccagacaaacaagacaaccggcaacaccgataagagagccttcgtcgagacctggcagtccttttaccggaagaagcttaaggaggtgtggaaacctgccgtgcggtctggcggatctggcggaggctcctgcccaggtgtgcgtgaccttcgacgacgtggccgtgaccttcacccaggaggagtggggccacctggaccccgcccagaggaccctgtaccaggaggtgatgctggagacctgcggcctgctgatgagcctgggctgccccgtgcccaggcccgagctgatctaccagctggagcacggccaggagctgtggaccgtgaagagggacctgagcggcagcacctgccccgtggacaagggcaagggatctggctccggcagcggccccaagaaaaagagaaaagtctaagctgccttctgcggggcttgccttctggccatgcccttcttctctcccttgcacctgtacctcttggtctttgaataaagcctgagtaggaaggctagcaaaaaaaaaaaaaaaaaaaaaaaaaaaaaaaaaaaaaaaaaaaaaaaaaaaaaaaaaaaaaaaaaaaaaaaaaaaaaaaa

SEQ ID NO: 16725 - RNA, 9503 nt, synthetic construct
  source 1..9503: mol_type = other RNA
aggaaataagagagaaaagaagagtaagaagaaatataagagccaccatggcccctaagaagaagcgtaaagtgagccggatggaacgcctcgtctacgaggtgcggcagaagtgcagaaacatcgaggacatctgcatctcctgcggatctctgaacgtgaccctggagcacccactgttcatcggcggcatgtgccagaactgtaaaaactgttttctggagtgtgcctatcaatacgacgatgacggctaccagagctactgcaccatctgttgcggcggaagagaggtgctgatgtgtggaaataacaactgctgccggtgcttctgcgtggaatgcgtggacctgctggtgggccccggcgccgcccaggccgctattaaggaagatccttggaactgctacatgtgcggccacaagggcacatacggcctgctgagacggagagaggactggcctagcagactgcagatgttcttcgccaataaccacgaccaggagttcgacccccctaaggtgtaccctcccgtccccgccgagaagagaaagcccatccgggtcctgagcctgttcgatggcatcgccaccggtctgctggtgctgaaggacctgggcatccaggtggataggtacattgcctccgaggtgtgcgaggactccatcaccgtgggaatggtgcgtcatcagggcaagatcatgtacgtgggcgacgtgcggagcgtgacacagaagcatatccaggagtggggccctttcgacctggtgatcggcggcagcccttgcaatgacctgagcatcgtgaacccagcccggaagggcctgtacgagggaaccggcagactgttcttcgagttttacagactgctgcacgacgcccggcctaaggaaggcgacgaccggcccttcttttggctgttcgagaatgtggtggccatgggagtcagcgacaagcgggatattagccggttcctggagagcaaccccgtgatgatcgatgccaaggaagtgagcgccgcccaccgggccagatacttctggggcaatctgcctggcatgaacagacccctggccagcaccgtgaacgacaagctggagctgcaggagtgcctggagcacggccggatcgccaagttcagcaaggtgagaaccatcaccacccgaagcaacagcatcaaacaaggcaaggaccagcactttcctgtgttcatgaacgagaaggaggacatcctgtggtgtaccgagatggagagagtgttcgggttcccagtccactacacagatgtcagcaacatgtctagactggccagacagagactgctgggaagaagctggtccgtccctgtgatcagacacctgttcgcccctctgaaggagtacttcgcctgcgtgagcagcggcaacagcaacgccaacagccggggccccagcttctctagcggcctggtgccactgtccctgagagggagccacatgggccccatggagatctacaaaaccgtgagcgcctggaagcggcagcctgtgcgcgtgctgagcctgtttcggaatatcgataaagtcctgaaaagcctgggattcctggagagcggctctggctccggcggtggcaccctgaagtacgtggaggatgtgacaaacgtggtcagacgggatgtggagaagtggggccccttcgatctggtgtacggcagcacccaacccctgggcagctcttgtgaccggtgccctggctggtacatgtttcagttccaccggatcctgcagtacgccctgccgagacaggagtcccagcggccattcttttggattttcatggacaacttgctgctgaccgaggatgaccaggaaactaccactcggttcctgcagaccgaagccgtgaccctgcaggacgtgagaggccgggactaccagaacgccatgcgggtgtggtccaacatccctggactgaaaagcaagcacgcacctctgacccctaaagaagaggagtacctgcaggcccaggtgcggagcagaagcaagctggacgcccctaaggtggatctgctggtgaagaattgcctcctgcccctgagagagtacttcaagtatttcagccagaatagtctgcccctgggaggcagcggcggcggcgccctggtgacatttgaggacgtcgccgtgcggttcacccaggaggaatgggctctgctggatccttctcagaaaatcctgtaccgggacgtgatgagagagacataccggaatctgacctccgtgggcatcaactgggaatgttgggaccttgaagcctgcttcagaagcctgggaagaaacctgagagtgcaggtggtgaagagaaagtgcgagctgaccaacagcggcccctgcgccgagggcggcccaagcagcggcgcccctcctcccagcggcggcagcccagccggctccccaacctctaccgaggagggcacctctgagtccgccacccccgagagcggccctggcacctccaccgagcccagcgagggcagcgcacccggcagccctgccggcagccccacctccacagaggagggaaccagcaccgagcccagcgaaggcagcgccccaggcaccagcaccgagcctagtgagcaggagattaaacggatcaacaagatcagaagaagacttgtgaaagacagcaacaccaagaaggccggcaagacaggccccatgaaaaccctgctggttagagtgatgacacccgatctgagagagcggctggaaaacctgagaaagaagcctgaaaatatcccccagcccatcagcaatacatctagagccaacctgaataagctgctgaccgattacaccgaaatgaagaaggcgatcctgcatgtgtactgggaagagttccagaaggaccctgtgggcctgatgagccgggtggcccagcctgccagcaagaagatcgatcagaacaagctgaaacctgagatggacgagaagggcaacctgaccaccgccggctttgcctgctctcagtgtggccagcccctgttcgtgtacaagctggagcaggtgtctgagaagggcaaggcttacaccaactacttcggacggtgcaatgtggccgagcacgaaaagctgatcctgctggcccagctgaagcccgagaaggatagcgacgaagccgtgacatatagcctgggaaagtttgggcagagggccctggatttctacagcattcatgtgaccaaggagtccacccaccccgtgaagcccctggcccagatcgccggaaacagatacgcctccggacctgtgggaaaggccctgagcgacgcatgtatgggcacaatcgcctccttcctgtctaagtaccaggacatcatcatcgaacaccagaaggtggtgaagggcaaccagaagagactggagagcctgcgggagctggccggcaaggaaaacctggaataccctagcgtgaccctgccacctcagcctcacaccaaggagggcgttgatgcctacaacgaagtgatcgcccgggtgcgaatgtgggtgaacctgaacctgtggcagaagctgaagctaagcagagatgatgccaagcctctgctgagactgaagggattcccttcctttcctctggtcgagagacaggccaacgaagtggactggtgggacatggtgtgtaacgtgaagaagctgatcaacgagaaaaaggaggatggcaaggtgttttggcagaatctggctggctacaagagacaggaagccctgagaccatacctgagcagcgaggaagatcggaagaagggaaagaaattcgctcggtaccagctgggcgacctgctgctgcacctggaaaagaagcacggcgaggactggggaaaggtgtacgacgaggcctgggagcggattgacaagaaagtggaaggcctgagcaagcacatcaagctggaagaggaacggagaagcgaggacgcccagagcaaggccgccctgaccgactggctgcgggctaaggccagcttcgtgatcgagggcctgaaggaggccgacaaggacgagttctgcagatgcgagctgaagctgcagaagtggtacggggacctgcggggaaagcccttcgccatcgaagccgagaacagcatcctggacatcagcggcttcagcaagcagtacaactgtgccttcatctggcagaaggacggcgtgaagaagctgaacctgtacctgatcatcaactacttcaagggcggcaagctgcggttcaagaagatcaaacctgaagccttcgaagccaacagattctacaccgtgatcaacaaaaagagcggcgagatcgtgcccatggaggtgaacttcaacttcgacgaccccaacctgatcatcctgcctctggcctttggcaagagacagggcagagaattcatctggaacgacctgctgtccctggaaaccggcagcctgaagctggccaacggaagagtgatcgagaagacactgtacaacagaagaacccggcaggatgagcctgccctgttcgtggccctgaccttcgagcggcgggaggtcctggactcctccaatatcaaaccaatgaacctgatcggcgtggcaagaggcgaaaacatccccgccgtgatcgccctgaccgaccccgagggctgcccactgagccggtttaaggatagcctgggaaacccaacccacatcctgagaatcggcgagagctataaggagaagcagcggaccatccaggccaagaaggaggtggagcagcggagagccggcggctacagccggaagtacgccagcaaagccaagaatctggcagacgatatggtgagaaacaccgctagagatctgctgtactacgccgtgacccaggatgccatgctgatcttcgccaacctgagccggggcttcggccggcagggcaagcggaccttcatggccgagagacagtacacacggatggaggactggctgaccgccaagctggcctacgagggcctgagcaagacctacctgtccaagacactggcccagtacacctccaagacatgcagcaactgtgggtttaccatcaccagcgccgactacgacagggtgctggagaagctgaagaagacagcaacaggctggatgaccacaattaacggcaaggagctgaaggtggagggccagattacctactacaacagatacaagagacagaacgtagtcaaggacctgtccgtcgagctggatagactgagcgaagaatctgtgaacaacgacatctcctcctggacaaagggcagaagcggagaagctctgagcctcctgaagaaaagattctcccatagacccgtgcaggagaagttcgtgtgcctgaactgcggcttcgagacacacgcagccgagcaagccgccctgaacatcgccagatcctggctgttcctgcggagccaggagtacaagaaataccagacaaacaagacaaccggcaacaccgataagagagccttcgtcgagacctggcagtccttttaccggaagaagcttaaggaggtgtggaaacctgccgtgcggtctggcggatctggcggaggctccgtgagcttcgaggacgtggccgtgcacttcacccaggaggagtgggccctgctggaccccagccagaagagcctgtacagggacgtgatgctggagacctgcaggaacctggccgccatcggctacatctgggaggagcagaccatcgaggacgactgcaagaacttcggcaggtaccagaggcacaccatcagccacagcgagtacaccccctacgagcacgaggagtgcggcaacatgccctgcgaccccggcggcccaagcagcggcgcccctcctcccagcggcggcagcccagccggctccccaacctctaccgaggagggcacctctgagtccgccacccccgagagcggccctggcacctccaccgagcccagcgagggcagcgcacccggcagccctgccggcagccccacctccacagaggagggaaccagcaccgagcccagcgaaggcagcgccccaggcaccagcaccgagcctagtgagcaggagattaaacggatcaacaagatcagaagaagacttgtgaaagacagcaacaccaagaaggccggcaagacaggccccatgaaaaccctgctggttagagtgatgacacccgatctgagagagcggctggaaaacctgagaaagaagcctgaaaatatcccccagcccatcagcaatacatctagagccaacctgaataagctgctgaccgattacaccgaaatgaagaaggcgatcctgcatgtgtactgggaagagttccagaaggaccctgtgggcctgatgagccgggtggcccagcctgccagcaagaagatcgatcagaacaagctgaaacctgagatggacgagaagggcaacctgaccaccgccggctttgcctgctctcagtgtggccagcccctgttcgtgtacaagctggagcaggtgtctgagaagggcaaggcttacaccaactacttcggacggtgcaatgtggccgagcacgaaaagctgatcctgctggcccagctgaagcccgagaaggatagcgacgaagccgtgacatatagcctgggaaagtttgggcagagggccctggatttctacagcattcatgtgaccaaggagtccacccaccccgtgaagcccctggcccagatcgccggaaacagatacgcctccggacctgtgggaaaggccctgagcgacgcatgtatgggcacaatcgcctccttcctgtctaagtaccaggacatcatcatcgaacaccagaaggtggtgaagggcaaccagaagagactggagagcctgcgggagctggccggcaaggaaaacctggaataccctagcgtgaccctgccacctcagcctcacaccaaggagggcgttgatgcctacaacgaagtgatcgcccgggtgcgaatgtgggtgaacctgaacctgtggcagaagctgaagctaagcagagatgatgccaagcctctgctgagactgaagggattcccttcctttcctctggtcgagagacaggccaacgaagtggactggtgggacatggtgtgtaacgtgaagaagctgatcaacgagaaaaaggaggatggcaaggtgttttggcagaatctggctggctacaagagacaggaagccctgagaccatacctgagcagcgaggaagatcggaagaagggaaagaaattcgctcggtaccagctgggcgacctgctgctgcacctggaaaagaagcacggcgaggactggggaaaggtgtacgacgaggcctgggagcggattgacaagaaagtggaaggcctgagcaagcacatcaagctggaagaggaacggagaagcgaggacgcccagagcaaggccgccctgaccgactggctgcgggctaaggccagcttcgtgatcgagggcctgaaggaggccgacaaggacgagttctgcagatgcgagctgaagctgcagaagtggtacggggacctgcggggaaagcccttcgccatcgaagccgagaacagcatcctggacatcagcggcttcagcaagcagtacaactgtgccttcatctggcagaaggacggcgtgaagaagctgaacctgtacctgatcatcaactacttcaagggcggcaagctgcggttcaagaagatcaaacctgaagccttcgaagccaacagattctacaccgtgatcaacaaaaagagcggcgagatcgtgcccatggaggtgaacttcaacttcgacgaccccaacctgatcatcctgcctctggcctttggcaagagacagggcagagaattcatctggaacgacctgctgtccctggaaaccggcagcctgaagctggccaacggaagagtgatcgagaagacactgtacaacagaagaacccggcaggatgagcctgccctgttcgtggccctgaccttcgagcggcgggaggtcctggactcctccaatatcaaaccaatgaacctgatcggcgtggcaagaggcgaaaacatccccgccgtgatcgccctgaccgaccccgagggctgcccactgagccggtttaaggatagcctgggaaacccaacccacatcctgagaatcggcgagagctataaggagaagcagcggaccatccaggccaagaaggaggtggagcagcggagagccggcggctacagccggaagtacgccagcaaagccaagaatctggcagacgatatggtgagaaacaccgctagagatctgctgtactacgccgtgacccaggatgccatgctgatcttcgccaacctgagccggggcttcggccggcagggcaagcggaccttcatggccgagagacagtacacacggatggaggactggctgaccgccaagctggcctacgagggcctgagcaagacctacctgtccaagacactggcccagtacacctccaagacatgcagcaactgtgggtttaccatcaccagcgccgactacgacagggtgctggagaagctgaagaagacagcaacaggctggatgaccacaattaacggcaaggagctgaaggtggagggccagattacctactacaacagatacaagagacagaacgtagtcaaggacctgtccgtcgagctggatagactgagcgaagaatctgtgaacaacgacatctcctcctggacaaagggcagaagcggagaagctctgagcctcctgaagaaaagattctcccatagacccgtgcaggagaagttcgtgtgcctgaactgcggcttcgagacacacgcagccgagcaagccgccctgaacatcgccagatcctggctgttcctgcggagccaggagtacaagaaataccagacaaacaagacaaccggcaacaccgataagagagccttcgtcgagacctggcagtccttttaccggaagaagcttaaggaggtgtggaaacctgccgtgcggtctggcggatctggcggaggctcctgtgagcttcgaggacgtggccgtgcacttcacccaggaggagtgggccctgctggaccccagccagaagagcctgtacagggacgtgatgctggagacctgcaggaacctggccgccatcggctacatctgggaggagcagaccatcgaggacgactgcaagaacttcggcaggtaccagaggcacaccatcagccacagcgagtacaccccctacgagcacgaggagtgcggcaacatgccctgcgaccccggatctggctccggcagcggccccaagaaaaagagaaaagtctaagctgccttctgcggggcttgccttctggccatgcccttcttctctcccttgcacctgtacctcttggtctttgaataaagcctgagtaggaaggctagcaaaaaaaaaaaaaaaaaaaaaaaaaaaaaaaaaaaaaaaaaaaaaaaaaaaaaaaaaaaaaaaaaaaaaaaaaaaaaaaa

SEQ ID NO: 16726 - RNA, 9485 nt, synthetic construct
  source 1..9485: mol_type = other RNA
aggaaataagagagaaaagaagagtaagaagaaatataagagccaccatggcccctaagaagaagcgtaaagtgagccggatggaacgcctcgtctacgaggtgcggcagaagtgcagaaacatcgaggacatctgcatctcctgcggatctctgaacgtgaccctggagcacccactgttcatcggcggcatgtgccagaactgtaaaaactgttttctggagtgtgcctatcaatacgacgatgacggctaccagagctactgcaccatctgttgcggcggaagagaggtgctgatgtgtggaaataacaactgctgccggtgcttctgcgtggaatgcgtggacctgctggtgggccccggcgccgcccaggccgctattaaggaagatccttggaactgctacatgtgcggccacaagggcacatacggcctgctgagacggagagaggactggcctagcagactgcagatgttcttcgccaataaccacgaccaggagttcgacccccctaaggtgtaccctcccgtccccgccgagaagagaaagcccatccgggtcctgagcctgttcgatggcatcgccaccggtctgctggtgctgaaggacctgggcatccaggtggataggtacattgcctccgaggtgtgcgaggactccatcaccgtgggaatggtgcgtcatcagggcaagatcatgtacgtgggcgacgtgcggagcgtgacacagaagcatatccaggagtggggccctttcgacctggtgatcggcggcagcccttgcaatgacctgagcatcgtgaacccagcccggaagggcctgtacgagggaaccggcagactgttcttcgagttttacagactgctgcacgacgcccggcctaaggaaggcgacgaccggcccttcttttggctgttcgagaatgtggtggccatgggagtcagcgacaagcgggatattagccggttcctggagagcaaccccgtgatgatcgatgccaaggaagtgagcgccgcccaccgggccagatacttctggggcaatctgcctggcatgaacagacccctggccagcaccgtgaacgacaagctggagctgcaggagtgcctggagcacggccggatcgccaagttcagcaaggtgagaaccatcaccacccgaagcaacagcatcaaacaaggcaaggaccagcactttcctgtgttcatgaacgagaaggaggacatcctgtggtgtaccgagatggagagagtgttcgggttcccagtccactacacagatgtcagcaacatgtctagactggccagacagagactgctgggaagaagctggtccgtccctgtgatcagacacctgttcgcccctctgaaggagtacttcgcctgcgtgagcagcggcaacagcaacgccaacagccggggccccagcttctctagcggcctggtgccactgtccctgagagggagccacatgggccccatggagatctacaaaaccgtgagcgcctggaagcggcagcctgtgcgcgtgctgagcctgtttcggaatatcgataaagtcctgaaaagcctgggattcctggagagcggctctggctccggcggtggcaccctgaagtacgtggaggatgtgacaaacgtggtcagacgggatgtggagaagtggggccccttcgatctggtgtacggcagcacccaacccctgggcagctcttgtgaccggtgccctggctggtacatgtttcagttccaccggatcctgcagtacgccctgccgagacaggagtcccagcggccattcttttggattttcatggacaacttgctgctgaccgaggatgaccaggaaactaccactcggttcctgcagaccgaagccgtgaccctgcaggacgtgagaggccgggactaccagaacgccatgcgggtgtggtccaacatccctggactgaaaagcaagcacgcacctctgacccctaaagaagaggagtacctgcaggcccaggtgcggagcagaagcaagctggacgcccctaaggtggatctgctggtgaagaattgcctcctgcccctgagagagtacttcaagtatttcagccagaatagtctgcccctgggaggcagcggcggcggcgccctggtgacatttgaggacgtcgccgtgcggttcacccaggaggaatgggctctgctggatccttctcagaaaatcctgtaccgggacgtgatgagagagacataccggaatctgacctccgtgggcatcaactgggaatgttgggaccttgaagcctgcttcagaagcctgggaagaaacctgagagtgcaggtggtgaagagaaagtgcgagctgaccaacagcggcccctgcgccgagggcggcccaagcagcggcgcccctcctcccagcggcggcagcccagccggctccccaacctctaccgaggagggcacctctgagtccgccacccccgagagcggccctggcacctccaccgagcccagcgagggcagcgcacccggcagccctgccggcagccccacctccacagaggagggaaccagcaccgagcccagcgaaggcagcgccccaggcaccagcaccgagcctagtgagcaggagattaaacggatcaacaagatcagaagaagacttgtgaaagacagcaacaccaagaaggccggcaagacaggccccatgaaaaccctgctggttagagtgatgacacccgatctgagagagcggctggaaaacctgagaaagaagcctgaaaatatcccccagcccatcagcaatacatctagagccaacctgaataagctgctgaccgattacaccgaaatgaagaaggcgatcctgcatgtgtactgggaagagttccagaaggaccctgtgggcctgatgagccgggtggcccagcctgccagcaagaagatcgatcagaacaagctgaaacctgagatggacgagaagggcaacctgaccaccgccggctttgcctgctctcagtgtggccagcccctgttcgtgtacaagctggagcaggtgtctgagaagggcaaggcttacaccaactacttcggacggtgcaatgtggccgagcacgaaaagctgatcctgctggcccagctgaagcccgagaaggatagcgacgaagccgtgacatatagcctgggaaagtttgggcagagggccctggatttctacagcattcatgtgaccaaggagtccacccaccccgtgaagcccctggcccagatcgccggaaacagatacgcctccggacctgtgggaaaggccctgagcgacgcatgtatgggcacaatcgcctccttcctgtctaagtaccaggacatcatcatcgaacaccagaaggtggtgaagggcaaccagaagagactggagagcctgcgggagctggccggcaaggaaaacctggaataccctagcgtgaccctgccacctcagcctcacaccaaggagggcgttgatgcctacaacgaagtgatcgcccgggtgcgaatgtgggtgaacctgaacctgtggcagaagctgaagctaagcagagatgatgccaagcctctgctgagactgaagggattcccttcctttcctctggtcgagagacaggccaacgaagtggactggtgggacatggtgtgtaacgtgaagaagctgatcaacgagaaaaaggaggatggcaaggtgttttggcagaatctggctggctacaagagacaggaagccctgagaccatacctgagcagcgaggaagatcggaagaagggaaagaaattcgctcggtaccagctgggcgacctgctgctgcacctggaaaagaagcacggcgaggactggggaaaggtgtacgacgaggcctgggagcggattgacaagaaagtggaaggcctgagcaagcacatcaagctggaagaggaacggagaagcgaggacgcccagagcaaggccgccctgaccgactggctgcgggctaaggccagcttcgtgatcgagggcctgaaggaggccgacaaggacgagttctgcagatgcgagctgaagctgcagaagtggtacggggacctgcggggaaagcccttcgccatcgaagccgagaacagcatcctggacatcagcggcttcagcaagcagtacaactgtgccttcatctggcagaaggacggcgtgaagaagctgaacctgtacctgatcatcaactacttcaagggcggcaagctgcggttcaagaagatcaaacctgaagccttcgaagccaacagattctacaccgtgatcaacaaaaagagcggcgagatcgtgcccatggaggtgaacttcaacttcgacgaccccaacctgatcatcctgcctctggcctttggcaagagacagggcagagaattcatctggaacgacctgctgtccctggaaaccggcagcctgaagctggccaacggaagagtgatcgagaagacactgtacaacagaagaacccggcaggatgagcctgccctgttcgtggccctgaccttcgagcggcgggaggtcctggactcctccaatatcaaaccaatgaacctgatcggcgtggcaagaggcgaaaacatccccgccgtgatcgccctgaccgaccccgagggctgcccactgagccggtttaaggatagcctgggaaacccaacccacatcctgagaatcggcgagagctataaggagaagcagcggaccatccaggccaagaaggaggtggagcagcggagagccggcggctacagccggaagtacgccagcaaagccaagaatctggcagacgatatggtgagaaacaccgctagagatctgctgtactacgccgtgacccaggatgccatgctgatcttcgccaacctgagccggggcttcggccggcagggcaagcggaccttcatggccgagagacagtacacacggatggaggactggctgaccgccaagctggcctacgagggcctgagcaagacctacctgtccaagacactggcccagtacacctccaagacatgcagcaactgtgggtttaccatcaccagcgccgactacgacagggtgctggagaagctgaagaagacagcaacaggctggatgaccacaattaacggcaaggagctgaaggtggagggccagattacctactacaacagatacaagagacagaacgtagtcaaggacctgtccgtcgagctggatagactgagcgaagaatctgtgaacaacgacatctcctcctggacaaagggcagaagcggagaagctctgagcctcctgaagaaaagattctcccatagacccgtgcaggagaagttcgtgtgcctgaactgcggcttcgagacacacgcagccgagcaagccgccctgaacatcgccagatcctggctgttcctgcggagccaggagtacaagaaataccagacaaacaagacaaccggcaacaccgataagagagccttcgtcgagacctggcagtccttttaccggaagaagcttaaggaggtgtggaaacctgccgtgcggtctggcggatctggcggaggctccgccgaggagctggtgaccttcgaggacgtggccgtgcacttcagccccgaggagctgccctacctgagcgccagccagaggaacctgtacagggaggtgatgctggagaactacaggaacctggtgagcctgggctaccagttccccaagcccgacatcatcagccagctggaggaggaggagagccacgccagggaggaggacggcagcaccgtgacctgccaggactgggaggagcagagcggcggcccaagcagcggcgcccctcctcccagcggcggcagcccagccggctccccaacctctaccgaggagggcacctctgagtccgccacccccgagagcggccctggcacctccaccgagcccagcgagggcagcgcacccggcagccctgccggcagccccacctccacagaggagggaaccagcaccgagcccagcgaaggcagcgccccaggcaccagcaccgagcctagtgagcaggagattaaacggatcaacaagatcagaagaagacttgtgaaagacagcaacaccaagaaggccggcaagacaggccccatgaaaaccctgctggttagagtgatgacacccgatctgagagagcggctggaaaacctgagaaagaagcctgaaaatatcccccagcccatcagcaatacatctagagccaacctgaataagctgctgaccgattacaccgaaatgaagaaggcgatcctgcatgtgtactgggaagagttccagaaggaccctgtgggcctgatgagccgggtggcccagcctgccagcaagaagatcgatcagaacaagctgaaacctgagatggacgagaagggcaacctgaccaccgccggctttgcctgctctcagtgtggccagcccctgttcgtgtacaagctggagcaggtgtctgagaagggcaaggcttacaccaactacttcggacggtgcaatgtggccgagcacgaaaagctgatcctgctggcccagctgaagcccgagaaggatagcgacgaagccgtgacatatagcctgggaaagtttgggcagagggccctggatttctacagcattcatgtgaccaaggagtccacccaccccgtgaagcccctggcccagatcgccggaaacagatacgcctccggacctgtgggaaaggccctgagcgacgcatgtatgggcacaatcgcctccttcctgtctaagtaccaggacatcatcatcgaacaccagaaggtggtgaagggcaaccagaagagactggagagcctgcgggagctggccggcaaggaaaacctggaataccctagcgtgaccctgccacctcagcctcacaccaaggagggcgttgatgcctacaacgaagtgatcgcccgggtgcgaatgtgggtgaacctgaacctgtggcagaagctgaagctaagcagagatgatgccaagcctctgctgagactgaagggattcccttcctttcctctggtcgagagacaggccaacgaagtggactggtgggacatggtgtgtaacgtgaagaagctgatcaacgagaaaaaggaggatggcaaggtgttttggcagaatctggctggctacaagagacaggaagccctgagaccatacctgagcagcgaggaagatcggaagaagggaaagaaattcgctcggtaccagctgggcgacctgctgctgcacctggaaaagaagcacggcgaggactggggaaaggtgtacgacgaggcctgggagcggattgacaagaaagtggaaggcctgagcaagcacatcaagctggaagaggaacggagaagcgaggacgcccagagcaaggccgccctgaccgactggctgcgggctaaggccagcttcgtgatcgagggcctgaaggaggccgacaaggacgagttctgcagatgcgagctgaagctgcagaagtggtacggggacctgcggggaaagcccttcgccatcgaagccgagaacagcatcctggacatcagcggcttcagcaagcagtacaactgtgccttcatctggcagaaggacggcgtgaagaagctgaacctgtacctgatcatcaactacttcaagggcggcaagctgcggttcaagaagatcaaacctgaagccttcgaagccaacagattctacaccgtgatcaacaaaaagagcggcgagatcgtgcccatggaggtgaacttcaacttcgacgaccccaacctgatcatcctgcctctggcctttggcaagagacagggcagagaattcatctggaacgacctgctgtccctggaaaccggcagcctgaagctggccaacggaagagtgatcgagaagacactgtacaacagaagaacccggcaggatgagcctgccctgttcgtggccctgaccttcgagcggcgggaggtcctggactcctccaatatcaaaccaatgaacctgatcggcgtggcaagaggcgaaaacatccccgccgtgatcgccctgaccgaccccgagggctgcccactgagccggtttaaggatagcctgggaaacccaacccacatcctgagaatcggcgagagctataaggagaagcagcggaccatccaggccaagaaggaggtggagcagcggagagccggcggctacagccggaagtacgccagcaaagccaagaatctggcagacgatatggtgagaaacaccgctagagatctgctgtactacgccgtgacccaggatgccatgctgatcttcgccaacctgagccggggcttcggccggcagggcaagcggaccttcatggccgagagacagtacacacggatggaggactggctgaccgccaagctggcctacgagggcctgagcaagacctacctgtccaagacactggcccagtacacctccaagacatgcagcaactgtgggtttaccatcaccagcgccgactacgacagggtgctggagaagctgaagaagacagcaacaggctggatgaccacaattaacggcaaggagctgaaggtggagggccagattacctactacaacagatacaagagacagaacgtagtcaaggacctgtccgtcgagctggatagactgagcgaagaatctgtgaacaacgacatctcctcctggacaaagggcagaagcggagaagctctgagcctcctgaagaaaagattctcccatagacccgtgcaggagaagttcgtgtgcctgaactgcggcttcgagacacacgcagccgagcaagccgccctgaacatcgccagatcctggctgttcctgcggagccaggagtacaagaaataccagacaaacaagacaaccggcaacaccgataagagagccttcgtcgagacctggcagtccttttaccggaagaagcttaaggaggtgtggaaacctgccgtgcggtctggcggatctggcggaggctcctgccgaggagctggtgaccttcgaggacgtggccgtgcacttcagccccgaggagctgccctacctgagcgccagccagaggaacctgtacagggaggtgatgctggagaactacaggaacctggtgagcctgggctaccagttccccaagcccgacatcatcagccagctggaggaggaggagagccacgccagggaggaggacggcagcaccgtgacctgccaggactgggaggagcagagcggatctggctccggcagcggccccaagaaaaagagaaaagtctaagctgccttctgcggggcttgccttctggccatgcccttcttctctcccttgcacctgtacctcttggtctttgaataaagcctgagtaggaaggctagcaaaaaaaaaaaaaaaaaaaaaaaaaaaaaaaaaaaaaaaaaaaaaaaaaaaaaaaaaaaaaaaaaaaaaaaaaaaaaaaa

SEQ ID NO: 16727 - RNA, 9479 nt, synthetic construct
  source 1..9479: mol_type = other RNA
aggaaataagagagaaaagaagagtaagaagaaatataagagccaccatggcccctaagaagaagcgtaaagtgagccggatggaacgcctcgtctacgaggtgcggcagaagtgcagaaacatcgaggacatctgcatctcctgcggatctctgaacgtgaccctggagcacccactgttcatcggcggcatgtgccagaactgtaaaaactgttttctggagtgtgcctatcaatacgacgatgacggctaccagagctactgcaccatctgttgcggcggaagagaggtgctgatgtgtggaaataacaactgctgccggtgcttctgcgtggaatgcgtggacctgctggtgggccccggcgccgcccaggccgctattaaggaagatccttggaactgctacatgtgcggccacaagggcacatacggcctgctgagacggagagaggactggcctagcagactgcagatgttcttcgccaataaccacgaccaggagttcgacccccctaaggtgtaccctcccgtccccgccgagaagagaaagcccatccgggtcctgagcctgttcgatggcatcgccaccggtctgctggtgctgaaggacctgggcatccaggtggataggtacattgcctccgaggtgtgcgaggactccatcaccgtgggaatggtgcgtcatcagggcaagatcatgtacgtgggcgacgtgcggagcgtgacacagaagcatatccaggagtggggccctttcgacctggtgatcggcggcagcccttgcaatgacctgagcatcgtgaacccagcccggaagggcctgtacgagggaaccggcagactgttcttcgagttttacagactgctgcacgacgcccggcctaaggaaggcgacgaccggcccttcttttggctgttcgagaatgtggtggccatgggagtcagcgacaagcgggatattagccggttcctggagagcaaccccgtgatgatcgatgccaaggaagtgagcgccgcccaccgggccagatacttctggggcaatctgcctggcatgaacagacccctggccagcaccgtgaacgacaagctggagctgcaggagtgcctggagcacggccggatcgccaagttcagcaaggtgagaaccatcaccacccgaagcaacagcatcaaacaaggcaaggaccagcactttcctgtgttcatgaacgagaaggaggacatcctgtggtgtaccgagatggagagagtgttcgggttcccagtccactacacagatgtcagcaacatgtctagactggccagacagagactgctgggaagaagctggtccgtccctgtgatcagacacctgttcgcccctctgaaggagtacttcgcctgcgtgagcagcggcaacagcaacgccaacagccggggccccagcttctctagcggcctggtgccactgtccctgagagggagccacatgggccccatggagatctacaaaaccgtgagcgcctggaagcggcagcctgtgcgcgtgctgagcctgtttcggaatatcgataaagtcctgaaaagcctgggattcctggagagcggctctggctccggcggtggcaccctgaagtacgtggaggatgtgacaaacgtggtcagacgggatgtggagaagtggggccccttcgatctggtgtacggcagcacccaacccctgggcagctcttgtgaccggtgccctggctggtacatgtttcagttccaccggatcctgcagtacgccctgccgagacaggagtcccagcggccattcttttggattttcatggacaacttgctgctgaccgaggatgaccaggaaactaccactcggttcctgcagaccgaagccgtgaccctgcaggacgtgagaggccgggactaccagaacgccatgcgggtgtggtccaacatccctggactgaaaagcaagcacgcacctctgacccctaaagaagaggagtacctgcaggcccaggtgcggagcagaagcaagctggacgcccctaaggtggatctgctggtgaagaattgcctcctgcccctgagagagtacttcaagtatttcagccagaatagtctgcccctgggaggcagcggcggcggcgccctggtgacatttgaggacgtcgccgtgcggttcacccaggaggaatgggctctgctggatccttctcagaaaatcctgtaccgggacgtgatgagagagacataccggaatctgacctccgtgggcatcaactgggaatgttgggaccttgaagcctgcttcagaagcctgggaagaaacctgagagtgcaggtggtgaagagaaagtgcgagctgaccaacagcggcccctgcgccgagggcggcccaagcagcggcgcccctcctcccagcggcggcagcccagccggctccccaacctctaccgaggagggcacctctgagtccgccacccccgagagcggccctggcacctccaccgagcccagcgagggcagcgcacccggcagccctgccggcagccccacctccacagaggagggaaccagcaccgagcccagcgaaggcagcgccccaggcaccagcaccgagcctagtgagcaggagattaaacggatcaacaagatcagaagaagacttgtgaaagacagcaacaccaagaaggccggcaagacaggccccatgaaaaccctgctggttagagtgatgacacccgatctgagagagcggctggaaaacctgagaaagaagcctgaaaatatcccccagcccatcagcaatacatctagagccaacctgaataagctgctgaccgattacaccgaaatgaagaaggcgatcctgcatgtgtactgggaagagttccagaaggaccctgtgggcctgatgagccgggtggcccagcctgccagcaagaagatcgatcagaacaagctgaaacctgagatggacgagaagggcaacctgaccaccgccggctttgcctgctctcagtgtggccagcccctgttcgtgtacaagctggagcaggtgtctgagaagggcaaggcttacaccaactacttcggacggtgcaatgtggccgagcacgaaaagctgatcctgctggcccagctgaagcccgagaaggatagcgacgaagccgtgacatatagcctgggaaagtttgggcagagggccctggatttctacagcattcatgtgaccaaggagtccacccaccccgtgaagcccctggcccagatcgccggaaacagatacgcctccggacctgtgggaaaggccctgagcgacgcatgtatgggcacaatcgcctccttcctgtctaagtaccaggacatcatcatcgaacaccagaaggtggtgaagggcaaccagaagagactggagagcctgcgggagctggccggcaaggaaaacctggaataccctagcgtgaccctgccacctcagcctcacaccaaggagggcgttgatgcctacaacgaagtgatcgcccgggtgcgaatgtgggtgaacctgaacctgtggcagaagctgaagctaagcagagatgatgccaagcctctgctgagactgaagggattcccttcctttcctctggtcgagagacaggccaacgaagtggactggtgggacatggtgtgtaacgtgaagaagctgatcaacgagaaaaaggaggatggcaaggtgttttggcagaatctggctggctacaagagacaggaagccctgagaccatacctgagcagcgaggaagatcggaagaagggaaagaaattcgctcggtaccagctgggcgacctgctgctgcacctggaaaagaagcacggcgaggactggggaaaggtgtacgacgaggcctgggagcggattgacaagaaagtggaaggcctgagcaagcacatcaagctggaagaggaacggagaagcgaggacgcccagagcaaggccgccctgaccgactggctgcgggctaaggccagcttcgtgatcgagggcctgaaggaggccgacaaggacgagttctgcagatgcgagctgaagctgcagaagtggtacggggacctgcggggaaagcccttcgccatcgaagccgagaacagcatcctggacatcagcggcttcagcaagcagtacaactgtgccttcatctggcagaaggacggcgtgaagaagctgaacctgtacctgatcatcaactacttcaagggcggcaagctgcggttcaagaagatcaaacctgaagccttcgaagccaacagattctacaccgtgatcaacaaaaagagcggcgagatcgtgcccatggaggtgaacttcaacttcgacgaccccaacctgatcatcctgcctctggcctttggcaagagacagggcagagaattcatctggaacgacctgctgtccctggaaaccggcagcctgaagctggccaacggaagagtgatcgagaagacactgtacaacagaagaacccggcaggatgagcctgccctgttcgtggccctgaccttcgagcggcgggaggtcctggactcctccaatatcaaaccaatgaacctgatcggcgtggcaagaggcgaaaacatccccgccgtgatcgccctgaccgaccccgagggctgcccactgagccggtttaaggatagcctgggaaacccaacccacatcctgagaatcggcgagagctataaggagaagcagcggaccatccaggccaagaaggaggtggagcagcggagagccggcggctacagccggaagtacgccagcaaagccaagaatctggcagacgatatggtgagaaacaccgctagagatctgctgtactacgccgtgacccaggatgccatgctgatcttcgccaacctgagccggggcttcggccggcagggcaagcggaccttcatggccgagagacagtacacacggatggaggactggctgaccgccaagctggcctacgagggcctgagcaagacctacctgtccaagacactggcccagtacacctccaagacatgcagcaactgtgggtttaccatcaccagcgccgactacgacagggtgctggagaagctgaagaagacagcaacaggctggatgaccacaattaacggcaaggagctgaaggtggagggccagattacctactacaacagatacaagagacagaacgtagtcaaggacctgtccgtcgagctggatagactgagcgaagaatctgtgaacaacgacatctcctcctggacaaagggcagaagcggagaagctctgagcctcctgaagaaaagattctcccatagacccgtgcaggagaagttcgtgtgcctgaactgcggcttcgagacacacgcagccgagcaagccgccctgaacatcgccagatcctggctgttcctgcggagccaggagtacaagaaataccagacaaacaagacaaccggcaacaccgataagagagccttcgtcgagacctggcagtccttttaccggaagaagcttaaggaggtgtggaaacctgccgtgcggtctggcggatctggcggaggctccgacaccgtggtgttcgaggacgtggtggtggacttcaccctggaggagtgggccctgctgaaccccgcccagagaaagctgtacagagacgtgatgctggagaccttcaagcacctggccagcgtggacaacgaggcccagctgaaggccagcggcagcatcagccagcaggacaccagcggcgagaagctgagcctgaagcagaagatcgagaagttcaccagaaagaacatctgggccggcggcccaagcagcggcgcccctcctcccagcggcggcagcccagccggctccccaacctctaccgaggagggcacctctgagtccgccacccccgagagcggccctggcacctccaccgagcccagcgagggcagcgcacccggcagccctgccggcagccccacctccacagaggagggaaccagcaccgagcccagcgaaggcagcgccccaggcaccagcaccgagcctagtgagcaggagattaaacggatcaacaagatcagaagaagacttgtgaaagacagcaacaccaagaaggccggcaagacaggccccatgaaaaccctgctggttagagtgatgacacccgatctgagagagcggctggaaaacctgagaaagaagcctgaaaatatcccccagcccatcagcaatacatctagagccaacctgaataagctgctgaccgattacaccgaaatgaagaaggcgatcctgcatgtgtactgggaagagttccagaaggaccctgtgggcctgatgagccgggtggcccagcctgccagcaagaagatcgatcagaacaagctgaaacctgagatggacgagaagggcaacctgaccaccgccggctttgcctgctctcagtgtggccagcccctgttcgtgtacaagctggagcaggtgtctgagaagggcaaggcttacaccaactacttcggacggtgcaatgtggccgagcacgaaaagctgatcctgctggcccagctgaagcccgagaaggatagcgacgaagccgtgacatatagcctgggaaagtttgggcagagggccctggatttctacagcattcatgtgaccaaggagtccacccaccccgtgaagcccctggcccagatcgccggaaacagatacgcctccggacctgtgggaaaggccctgagcgacgcatgtatgggcacaatcgcctccttcctgtctaagtaccaggacatcatcatcgaacaccagaaggtggtgaagggcaaccagaagagactggagagcctgcgggagctggccggcaaggaaaacctggaataccctagcgtgaccctgccacctcagcctcacaccaaggagggcgttgatgcctacaacgaagtgatcgcccgggtgcgaatgtgggtgaacctgaacctgtggcagaagctgaagctaagcagagatgatgccaagcctctgctgagactgaagggattcccttcctttcctctggtcgagagacaggccaacgaagtggactggtgggacatggtgtgtaacgtgaagaagctgatcaacgagaaaaaggaggatggcaaggtgttttggcagaatctggctggctacaagagacaggaagccctgagaccatacctgagcagcgaggaagatcggaagaagggaaagaaattcgctcggtaccagctgggcgacctgctgctgcacctggaaaagaagcacggcgaggactggggaaaggtgtacgacgaggcctgggagcggattgacaagaaagtggaaggcctgagcaagcacatcaagctggaagaggaacggagaagcgaggacgcccagagcaaggccgccctgaccgactggctgcgggctaaggccagcttcgtgatcgagggcctgaaggaggccgacaaggacgagttctgcagatgcgagctgaagctgcagaagtggtacggggacctgcggggaaagcccttcgccatcgaagccgagaacagcatcctggacatcagcggcttcagcaagcagtacaactgtgccttcatctggcagaaggacggcgtgaagaagctgaacctgtacctgatcatcaactacttcaagggcggcaagctgcggttcaagaagatcaaacctgaagccttcgaagccaacagattctacaccgtgatcaacaaaaagagcggcgagatcgtgcccatggaggtgaacttcaacttcgacgaccccaacctgatcatcctgcctctggcctttggcaagagacagggcagagaattcatctggaacgacctgctgtccctggaaaccggcagcctgaagctggccaacggaagagtgatcgagaagacactgtacaacagaagaacccggcaggatgagcctgccctgttcgtggccctgaccttcgagcggcgggaggtcctggactcctccaatatcaaaccaatgaacctgatcggcgtggcaagaggcgaaaacatccccgccgtgatcgccctgaccgaccccgagggctgcccactgagccggtttaaggatagcctgggaaacccaacccacatcctgagaatcggcgagagctataaggagaagcagcggaccatccaggccaagaaggaggtggagcagcggagagccggcggctacagccggaagtacgccagcaaagccaagaatctggcagacgatatggtgagaaacaccgctagagatctgctgtactacgccgtgacccaggatgccatgctgatcttcgccaacctgagccggggcttcggccggcagggcaagcggaccttcatggccgagagacagtacacacggatggaggactggctgaccgccaagctggcctacgagggcctgagcaagacctacctgtccaagacactggcccagtacacctccaagacatgcagcaactgtgggtttaccatcaccagcgccgactacgacagggtgctggagaagctgaagaagacagcaacaggctggatgaccacaattaacggcaaggagctgaaggtggagggccagattacctactacaacagatacaagagacagaacgtagtcaaggacctgtccgtcgagctggatagactgagcgaagaatctgtgaacaacgacatctcctcctggacaaagggcagaagcggagaagctctgagcctcctgaagaaaagattctcccatagacccgtgcaggagaagttcgtgtgcctgaactgcggcttcgagacacacgcagccgagcaagccgccctgaacatcgccagatcctggctgttcctgcggagccaggagtacaagaaataccagacaaacaagacaaccggcaacaccgataagagagccttcgtcgagacctggcagtccttttaccggaagaagcttaaggaggtgtggaaacctgccgtgcggtctggcggatctggcggaggctcctgacaccgtggtgttcgaggacgtggtggtggacttcaccctggaggagtgggccctgctgaaccccgcccagagaaagctgtacagagacgtgatgctggagaccttcaagcacctggccagcgtggacaacgaggcccagctgaaggccagcggcagcatcagccagcaggacaccagcggcgagaagctgagcctgaagcagaagatcgagaagttcaccagaaagaacatctgggccggatctggctccggcagcggccccaagaaaaagagaaaagtctaagctgccttctgcggggcttgccttctggccatgcccttcttctctcccttgcacctgtacctcttggtctttgaataaagcctgagtaggaaggctagcaaaaaaaaaaaaaaaaaaaaaaaaaaaaaaaaaaaaaaaaaaaaaaaaaaaaaaaaaaaaaaaaaaaaaaaaaaaaaaaa

SEQ ID NO: 16728 - RNA, 9485 nt, synthetic construct
  source 1..9485: mol_type = other RNA
aggaaataagagagaaaagaagagtaagaagaaatataagagccaccatggcccctaagaagaagcgtaaagtgagccggatggaacgcctcgtctacgaggtgcggcagaagtgcagaaacatcgaggacatctgcatctcctgcggatctctgaacgtgaccctggagcacccactgttcatcggcggcatgtgccagaactgtaaaaactgttttctggagtgtgcctatcaatacgacgatgacggctaccagagctactgcaccatctgttgcggcggaagagaggtgctgatgtgtggaaataacaactgctgccggtgcttctgcgtggaatgcgtggacctgctggtgggccccggcgccgcccaggccgctattaaggaagatccttggaactgctacatgtgcggccacaagggcacatacggcctgctgagacggagagaggactggcctagcagactgcagatgttcttcgccaataaccacgaccaggagttcgacccccctaaggtgtaccctcccgtccccgccgagaagagaaagcccatccgggtcctgagcctgttcgatggcatcgccaccggtctgctggtgctgaaggacctgggcatccaggtggataggtacattgcctccgaggtgtgcgaggactccatcaccgtgggaatggtgcgtcatcagggcaagatcatgtacgtgggcgacgtgcggagcgtgacacagaagcatatccaggagtggggccctttcgacctggtgatcggcggcagcccttgcaatgacctgagcatcgtgaacccagcccggaagggcctgtacgagggaaccggcagactgttcttcgagttttacagactgctgcacgacgcccggcctaaggaaggcgacgaccggcccttcttttggctgttcgagaatgtggtggccatgggagtcagcgacaagcgggatattagccggttcctggagagcaaccccgtgatgatcgatgccaaggaagtgagcgccgcccaccgggccagatacttctggggcaatctgcctggcatgaacagacccctggccagcaccgtgaacgacaagctggagctgcaggagtgcctggagcacggccggatcgccaagttcagcaaggtgagaaccatcaccacccgaagcaacagcatcaaacaaggcaaggaccagcactttcctgtgttcatgaacgagaaggaggacatcctgtggtgtaccgagatggagagagtgttcgggttcccagtccactacacagatgtcagcaacatgtctagactggccagacagagactgctgggaagaagctggtccgtccctgtgatcagacacctgttcgcccctctgaaggagtacttcgcctgcgtgagcagcggcaacagcaacgccaacagccggggccccagcttctctagcggcctggtgccactgtccctgagagggagccacatgggccccatggagatctacaaaaccgtgagcgcctggaagcggcagcctgtgcgcgtgctgagcctgtttcggaatatcgataaagtcctgaaaagcctgggattcctggagagcggctctggctccggcggtggcaccctgaagtacgtggaggatgtgacaaacgtggtcagacgggatgtggagaagtggggccccttcgatctggtgtacggcagcacccaacccctgggcagctcttgtgaccggtgccctggctggtacatgtttcagttccaccggatcctgcagtacgccctgccgagacaggagtcccagcggccattcttttggattttcatggacaacttgctgctgaccgaggatgaccaggaaactaccactcggttcctgcagaccgaagccgtgaccctgcaggacgtgagaggccgggactaccagaacgccatgcgggtgtggtccaacatccctggactgaaaagcaagcacgcacctctgacccctaaagaagaggagtacctgcaggcccaggtgcggagcagaagcaagctggacgcccctaaggtggatctgctggtgaagaattgcctcctgcccctgagagagtacttcaagtatttcagccagaatagtctgcccctgggaggcagcggcggcggcgccctggtgacatttgaggacgtcgccgtgcggttcacccaggaggaatgggctctgctggatccttctcagaaaatcctgtaccgggacgtgatgagagagacataccggaatctgacctccgtgggcatcaactgggaatgttgggaccttgaagcctgcttcagaagcctgggaagaaacctgagagtgcaggtggtgaagagaaagtgcgagctgaccaacagcggcccctgcgccgagggcggcccaagcagcggcgcccctcctcccagcggcggcagcccagccggctccccaacctctaccgaggagggcacctctgagtccgccacccccgagagcggccctggcacctccaccgagcccagcgagggcagcgcacccggcagccctgccggcagccccacctccacagaggagggaaccagcaccgagcccagcgaaggcagcgccccaggcaccagcaccgagcctagtgagcaggagattaaacggatcaacaagatcagaagaagacttgtgaaagacagcaacaccaagaaggccggcaagacaggccccatgaaaaccctgctggttagagtgatgacacccgatctgagagagcggctggaaaacctgagaaagaagcctgaaaatatcccccagcccatcagcaatacatctagagccaacctgaataagctgctgaccgattacaccgaaatgaagaaggcgatcctgcatgtgtactgggaagagttccagaaggaccctgtgggcctgatgagccgggtggcccagcctgccagcaagaagatcgatcagaacaagctgaaacctgagatggacgagaagggcaacctgaccaccgccggctttgcctgctctcagtgtggccagcccctgttcgtgtacaagctggagcaggtgtctgagaagggcaaggcttacaccaactacttcggacggtgcaatgtggccgagcacgaaaagctgatcctgctggcccagctgaagcccgagaaggatagcgacgaagccgtgacatatagcctgggaaagtttgggcagagggccctggatttctacagcattcatgtgaccaaggagtccacccaccccgtgaagcccctggcccagatcgccggaaacagatacgcctccggacctgtgggaaaggccctgagcgacgcatgtatgggcacaatcgcctccttcctgtctaagtaccaggacatcatcatcgaacaccagaaggtggtgaagggcaaccagaagagactggagagcctgcgggagctggccggcaaggaaaacctggaataccctagcgtgaccctgccacctcagcctcacaccaaggagggcgttgatgcctacaacgaagtgatcgcccgggtgcgaatgtgggtgaacctgaacctgtggcagaagctgaagctaagcagagatgatgccaagcctctgctgagactgaagggattcccttcctttcctctggtcgagagacaggccaacgaagtggactggtgggacatggtgtgtaacgtgaagaagctgatcaacgagaaaaaggaggatggcaaggtgttttggcagaatctggctggctacaagagacaggaagccctgagaccatacctgagcagcgaggaagatcggaagaagggaaagaaattcgctcggtaccagctgggcgacctgctgctgcacctggaaaagaagcacggcgaggactggggaaaggtgtacgacgaggcctgggagcggattgacaagaaagtggaaggcctgagcaagcacatcaagctggaagaggaacggagaagcgaggacgcccagagcaaggccgccctgaccgactggctgcgggctaaggccagcttcgtgatcgagggcctgaaggaggccgacaaggacgagttctgcagatgcgagctgaagctgcagaagtggtacggggacctgcggggaaagcccttcgccatcgaagccgagaacagcatcctggacatcagcggcttcagcaagcagtacaactgtgccttcatctggcagaaggacggcgtgaagaagctgaacctgtacctgatcatcaactacttcaagggcggcaagctgcggttcaagaagatcaaacctgaagccttcgaagccaacagattctacaccgtgatcaacaaaaagagcggcgagatcgtgcccatggaggtgaacttcaacttcgacgaccccaacctgatcatcctgcctctggcctttggcaagagacagggcagagaattcatctggaacgacctgctgtccctggaaaccggcagcctgaagctggccaacggaagagtgatcgagaagacactgtacaacagaagaacccggcaggatgagcctgccctgttcgtggccctgaccttcgagcggcgggaggtcctggactcctccaatatcaaaccaatgaacctgatcggcgtggcaagaggcgaaaacatccccgccgtgatcgccctgaccgaccccgagggctgcccactgagccggtttaaggatagcctgggaaacccaacccacatcctgagaatcggcgagagctataaggagaagcagcggaccatccaggccaagaaggaggtggagcagcggagagccggcggctacagccggaagtacgccagcaaagccaagaatctggcagacgatatggtgagaaacaccgctagagatctgctgtactacgccgtgacccaggatgccatgctgatcttcgccaacctgagccggggcttcggccggcagggcaagcggaccttcatggccgagagacagtacacacggatggaggactggctgaccgccaagctggcctacgagggcctgagcaagacctacctgtccaagacactggcccagtacacctccaagacatgcagcaactgtgggtttaccatcaccagcgccgactacgacagggtgctggagaagctgaagaagacagcaacaggctggatgaccacaattaacggcaaggagctgaaggtggagggccagattacctactacaacagatacaagagacagaacgtagtcaaggacctgtccgtcgagctggatagactgagcgaagaatctgtgaacaacgacatctcctcctggacaaagggcagaagcggagaagctctgagcctcctgaagaaaagattctcccatagacccgtgcaggagaagttcgtgtgcctgaactgcggcttcgagacacacgcagccgagcaagccgccctgaacatcgccagatcctggctgttcctgcggagccaggagtacaagaaataccagacaaacaagacaaccggcaacaccgataagagagccttcgtcgagacctggcagtccttttaccggaagaagcttaaggaggtgtggaaacctgccgtgcggtctggcggatctggcggaggctcccagcagaggcccgtgagcttcaaggacgtggtggtgggcttcacccaggaggagtggcacaggctgaaccccgcccagagggccctgtacagggacgtgatgctggagacctacagcaacctggtgagcgtgggctacgagggcaccaagccctacgtgatcctgaagctggagcaggaggaggccccctggatctgcgaggccgcctgcagcggctgccactgccaggagaacatctgccagggcggcccaagcagcggcgcccctcctcccagcggcggcagcccagccggctccccaacctctaccgaggagggcacctctgagtccgccacccccgagagcggccctggcacctccaccgagcccagcgagggcagcgcacccggcagccctgccggcagccccacctccacagaggagggaaccagcaccgagcccagcgaaggcagcgccccaggcaccagcaccgagcctagtgagcaggagattaaacggatcaacaagatcagaagaagacttgtgaaagacagcaacaccaagaaggccggcaagacaggccccatgaaaaccctgctggttagagtgatgacacccgatctgagagagcggctggaaaacctgagaaagaagcctgaaaatatcccccagcccatcagcaatacatctagagccaacctgaataagctgctgaccgattacaccgaaatgaagaaggcgatcctgcatgtgtactgggaagagttccagaaggaccctgtgggcctgatgagccgggtggcccagcctgccagcaagaagatcgatcagaacaagctgaaacctgagatggacgagaagggcaacctgaccaccgccggctttgcctgctctcagtgtggccagcccctgttcgtgtacaagctggagcaggtgtctgagaagggcaaggcttacaccaactacttcggacggtgcaatgtggccgagcacgaaaagctgatcctgctggcccagctgaagcccgagaaggatagcgacgaagccgtgacatatagcctgggaaagtttgggcagagggccctggatttctacagcattcatgtgaccaaggagtccacccaccccgtgaagcccctggcccagatcgccggaaacagatacgcctccggacctgtgggaaaggccctgagcgacgcatgtatgggcacaatcgcctccttcctgtctaagtaccaggacatcatcatcgaacaccagaaggtggtgaagggcaaccagaagagactggagagcctgcgggagctggccggcaaggaaaacctggaataccctagcgtgaccctgccacctcagcctcacaccaaggagggcgttgatgcctacaacgaagtgatcgcccgggtgcgaatgtgggtgaacctgaacctgtggcagaagctgaagctaagcagagatgatgccaagcctctgctgagactgaagggattcccttcctttcctctggtcgagagacaggccaacgaagtggactggtgggacatggtgtgtaacgtgaagaagctgatcaacgagaaaaaggaggatggcaaggtgttttggcagaatctggctggctacaagagacaggaagccctgagaccatacctgagcagcgaggaagatcggaagaagggaaagaaattcgctcggtaccagctgggcgacctgctgctgcacctggaaaagaagcacggcgaggactggggaaaggtgtacgacgaggcctgggagcggattgacaagaaagtggaaggcctgagcaagcacatcaagctggaagaggaacggagaagcgaggacgcccagagcaaggccgccctgaccgactggctgcgggctaaggccagcttcgtgatcgagggcctgaaggaggccgacaaggacgagttctgcagatgcgagctgaagctgcagaagtggtacggggacctgcggggaaagcccttcgccatcgaagccgagaacagcatcctggacatcagcggcttcagcaagcagtacaactgtgccttcatctggcagaaggacggcgtgaagaagctgaacctgtacctgatcatcaactacttcaagggcggcaagctgcggttcaagaagatcaaacctgaagccttcgaagccaacagattctacaccgtgatcaacaaaaagagcggcgagatcgtgcccatggaggtgaacttcaacttcgacgaccccaacctgatcatcctgcctctggcctttggcaagagacagggcagagaattcatctggaacgacctgctgtccctggaaaccggcagcctgaagctggccaacggaagagtgatcgagaagacactgtacaacagaagaacccggcaggatgagcctgccctgttcgtggccctgaccttcgagcggcgggaggtcctggactcctccaatatcaaaccaatgaacctgatcggcgtggcaagaggcgaaaacatccccgccgtgatcgccctgaccgaccccgagggctgcccactgagccggtttaaggatagcctgggaaacccaacccacatcctgagaatcggcgagagctataaggagaagcagcggaccatccaggccaagaaggaggtggagcagcggagagccggcggctacagccggaagtacgccagcaaagccaagaatctggcagacgatatggtgagaaacaccgctagagatctgctgtactacgccgtgacccaggatgccatgctgatcttcgccaacctgagccggggcttcggccggcagggcaagcggaccttcatggccgagagacagtacacacggatggaggactggctgaccgccaagctggcctacgagggcctgagcaagacctacctgtccaagacactggcccagtacacctccaagacatgcagcaactgtgggtttaccatcaccagcgccgactacgacagggtgctggagaagctgaagaagacagcaacaggctggatgaccacaattaacggcaaggagctgaaggtggagggccagattacctactacaacagatacaagagacagaacgtagtcaaggacctgtccgtcgagctggatagactgagcgaagaatctgtgaacaacgacatctcctcctggacaaagggcagaagcggagaagctctgagcctcctgaagaaaagattctcccatagacccgtgcaggagaagttcgtgtgcctgaactgcggcttcgagacacacgcagccgagcaagccgccctgaacatcgccagatcctggctgttcctgcggagccaggagtacaagaaataccagacaaacaagacaaccggcaacaccgataagagagccttcgtcgagacctggcagtccttttaccggaagaagcttaaggaggtgtggaaacctgccgtgcggtctggcggatctggcggaggctcctcagcagaggcccgtgagcttcaaggacgtggtggtgggcttcacccaggaggagtggcacaggctgaaccccgcccagagggccctgtacagggacgtgatgctggagacctacagcaacctggtgagcgtgggctacgagggcaccaagccctacgtgatcctgaagctggagcaggaggaggccccctggatctgcgaggccgcctgcagcggctgccactgccaggagaacatctgccagggatctggctccggcagcggccccaagaaaaagagaaaagtctaagctgccttctgcggggcttgccttctggccatgcccttcttctctcccttgcacctgtacctcttggtctttgaataaagcctgagtaggaaggctagcaaaaaaaaaaaaaaaaaaaaaaaaaaaaaaaaaaaaaaaaaaaaaaaaaaaaaaaaaaaaaaaaaaaaaaaaaaaaaaaa

SEQ ID NO: 16729 - RNA, 9485 nt, synthetic construct
  source 1..9485: mol_type = other RNA
aggaaataagagagaaaagaagagtaagaagaaatataagagccaccatggcccctaagaagaagcgtaaagtgagccggatggaacgcctcgtctacgaggtgcggcagaagtgcagaaacatcgaggacatctgcatctcctgcggatctctgaacgtgaccctggagcacccactgttcatcggcggcatgtgccagaactgtaaaaactgttttctggagtgtgcctatcaatacgacgatgacggctaccagagctactgcaccatctgttgcggcggaagagaggtgctgatgtgtggaaataacaactgctgccggtgcttctgcgtggaatgcgtggacctgctggtgggccccggcgccgcccaggccgctattaaggaagatccttggaactgctacatgtgcggccacaagggcacatacggcctgctgagacggagagaggactggcctagcagactgcagatgttcttcgccaataaccacgaccaggagttcgacccccctaaggtgtaccctcccgtccccgccgagaagagaaagcccatccgggtcctgagcctgttcgatggcatcgccaccggtctgctggtgctgaaggacctgggcatccaggtggataggtacattgcctccgaggtgtgcgaggactccatcaccgtgggaatggtgcgtcatcagggcaagatcatgtacgtgggcgacgtgcggagcgtgacacagaagcatatccaggagtggggccctttcgacctggtgatcggcggcagcccttgcaatgacctgagcatcgtgaacccagcccggaagggcctgtacgagggaaccggcagactgttcttcgagttttacagactgctgcacgacgcccggcctaaggaaggcgacgaccggcccttcttttggctgttcgagaatgtggtggccatgggagtcagcgacaagcgggatattagccggttcctggagagcaaccccgtgatgatcgatgccaaggaagtgagcgccgcccaccgggccagatacttctggggcaatctgcctggcatgaacagacccctggccagcaccgtgaacgacaagctggagctgcaggagtgcctggagcacggccggatcgccaagttcagcaaggtgagaaccatcaccacccgaagcaacagcatcaaacaaggcaaggaccagcactttcctgtgttcatgaacgagaaggaggacatcctgtggtgtaccgagatggagagagtgttcgggttcccagtccactacacagatgtcagcaacatgtctagactggccagacagagactgctgggaagaagctggtccgtccctgtgatcagacacctgttcgcccctctgaaggagtacttcgcctgcgtgagcagcggcaacagcaacgccaacagccggggccccagcttctctagcggcctggtgccactgtccctgagagggagccacatgggccccatggagatctacaaaaccgtgagcgcctggaagcggcagcctgtgcgcgtgctgagcctgtttcggaatatcgataaagtcctgaaaagcctgggattcctggagagcggctctggctccggcggtggcaccctgaagtacgtggaggatgtgacaaacgtggtcagacgggatgtggagaagtggggccccttcgatctggtgtacggcagcacccaacccctgggcagctcttgtgaccggtgccctggctggtacatgtttcagttccaccggatcctgcagtacgccctgccgagacaggagtcccagcggccattcttttggattttcatggacaacttgctgctgaccgaggatgaccaggaaactaccactcggttcctgcagaccgaagccgtgaccctgcaggacgtgagaggccgggactaccagaacgccatgcgggtgtggtccaacatccctggactgaaaagcaagcacgcacctctgacccctaaagaagaggagtacctgcaggcccaggtgcggagcagaagcaagctggacgcccctaaggtggatctgctggtgaagaattgcctcctgcccctgagagagtacttcaagtatttcagccagaatagtctgcccctgggaggcagcggcggcggcgccctggtgacatttgaggacgtcgccgtgcggttcacccaggaggaatgggctctgctggatccttctcagaaaatcctgtaccgggacgtgatgagagagacataccggaatctgacctccgtgggcatcaactgggaatgttgggaccttgaagcctgcttcagaagcctgggaagaaacctgagagtgcaggtggtgaagagaaagtgcgagctgaccaacagcggcccctgcgccgagggcggcccaagcagcggcgcccctcctcccagcggcggcagcccagccggctccccaacctctaccgaggagggcacctctgagtccgccacccccgagagcggccctggcacctccaccgagcccagcgagggcagcgcacccggcagccctgccggcagccccacctccacagaggagggaaccagcaccgagcccagcgaaggcagcgccccaggcaccagcaccgagcctagtgagcaggagattaaacggatcaacaagatcagaagaagacttgtgaaagacagcaacaccaagaaggccggcaagacaggccccatgaaaaccctgctggttagagtgatgacacccgatctgagagagcggctggaaaacctgagaaagaagcctgaaaatatcccccagcccatcagcaatacatctagagccaacctgaataagctgctgaccgattacaccgaaatgaagaaggcgatcctgcatgtgtactgggaagagttccagaaggaccctgtgggcctgatgagccgggtggcccagcctgccagcaagaagatcgatcagaacaagctgaaacctgagatggacgagaagggcaacctgaccaccgccggctttgcctgctctcagtgtggccagcccctgttcgtgtacaagctggagcaggtgtctgagaagggcaaggcttacaccaactacttcggacggtgcaatgtggccgagcacgaaaagctgatcctgctggcccagctgaagcccgagaaggatagcgacgaagccgtgacatatagcctgggaaagtttgggcagagggccctggatttctacagcattcatgtgaccaaggagtccacccaccccgtgaagcccctggcccagatcgccggaaacagatacgcctccggacctgtgggaaaggccctgagcgacgcatgtatgggcacaatcgcctccttcctgtctaagtaccaggacatcatcatcgaacaccagaaggtggtgaagggcaaccagaagagactggagagcctgcgggagctggccggcaaggaaaacctggaataccctagcgtgaccctgccacctcagcctcacaccaaggagggcgttgatgcctacaacgaagtgatcgcccgggtgcgaatgtgggtgaacctgaacctgtggcagaagctgaagctaagcagagatgatgccaagcctctgctgagactgaagggattcccttcctttcctctggtcgagagacaggccaacgaagtggactggtgggacatggtgtgtaacgtgaagaagctgatcaacgagaaaaaggaggatggcaaggtgttttggcagaatctggctggctacaagagacaggaagccctgagaccatacctgagcagcgaggaagatcggaagaagggaaagaaattcgctcggtaccagctgggcgacctgctgctgcacctggaaaagaagcacggcgaggactggggaaaggtgtacgacgaggcctgggagcggattgacaagaaagtggaaggcctgagcaagcacatcaagctggaagaggaacggagaagcgaggacgcccagagcaaggccgccctgaccgactggctgcgggctaaggccagcttcgtgatcgagggcctgaaggaggccgacaaggacgagttctgcagatgcgagctgaagctgcagaagtggtacggggacctgcggggaaagcccttcgccatcgaagccgagaacagcatcctggacatcagcggcttcagcaagcagtacaactgtgccttcatctggcagaaggacggcgtgaagaagctgaacctgtacctgatcatcaactacttcaagggcggcaagctgcggttcaagaagatcaaacctgaagccttcgaagccaacagattctacaccgtgatcaacaaaaagagcggcgagatcgtgcccatggaggtgaacttcaacttcgacgaccccaacctgatcatcctgcctctggcctttggcaagagacagggcagagaattcatctggaacgacctgctgtccctggaaaccggcagcctgaagctggccaacggaagagtgatcgagaagacactgtacaacagaagaacccggcaggatgagcctgccctgttcgtggccctgaccttcgagcggcgggaggtcctggactcctccaatatcaaaccaatgaacctgatcggcgtggcaagaggcgaaaacatccccgccgtgatcgccctgaccgaccccgagggctgcccactgagccggtttaaggatagcctgggaaacccaacccacatcctgagaatcggcgagagctataaggagaagcagcggaccatccaggccaagaaggaggtggagcagcggagagccggcggctacagccggaagtacgccagcaaagccaagaatctggcagacgatatggtgagaaacaccgctagagatctgctgtactacgccgtgacccaggatgccatgctgatcttcgccaacctgagccggggcttcggccggcagggcaagcggaccttcatggccgagagacagtacacacggatggaggactggctgaccgccaagctggcctacgagggcctgagcaagacctacctgtccaagacactggcccagtacacctccaagacatgcagcaactgtgggtttaccatcaccagcgccgactacgacagggtgctggagaagctgaagaagacagcaacaggctggatgaccacaattaacggcaaggagctgaaggtggagggccagattacctactacaacagatacaagagacagaacgtagtcaaggacctgtccgtcgagctggatagactgagcgaagaatctgtgaacaacgacatctcctcctggacaaagggcagaagcggagaagctctgagcctcctgaagaaaagattctcccatagacccgtgcaggagaagttcgtgtgcctgaactgcggcttcgagacacacgcagccgagcaagccgccctgaacatcgccagatcctggctgttcctgcggagccaggagtacaagaaataccagacaaacaagacaaccggcaacaccgataagagagccttcgtcgagacctggcagtccttttaccggaagaagcttaaggaggtgtggaaacctgccgtgcggtctggcggatctggcggaggctccctgcaggaggccgtgaccttcgaggacgtggccgtgaacttcagcaacgaggagtggcagtgcctgacccacgcccagaggcacctgtacaaggacgtgatgctggagaactacggcaacgtggtgagcctgggcttccccttccccaagccccccctgatcagccacctggagcaggaggccgagctgtgcgcccaggacaggcaggacagggagttcctgagctgcagctaccccgtgagcggcggcccaagcagcggcgcccctcctcccagcggcggcagcccagccggctccccaacctctaccgaggagggcacctctgagtccgccacccccgagagcggccctggcacctccaccgagcccagcgagggcagcgcacccggcagccctgccggcagccccacctccacagaggagggaaccagcaccgagcccagcgaaggcagcgccccaggcaccagcaccgagcctagtgagcaggagattaaacggatcaacaagatcagaagaagacttgtgaaagacagcaacaccaagaaggccggcaagacaggccccatgaaaaccctgctggttagagtgatgacacccgatctgagagagcggctggaaaacctgagaaagaagcctgaaaatatcccccagcccatcagcaatacatctagagccaacctgaataagctgctgaccgattacaccgaaatgaagaaggcgatcctgcatgtgtactgggaagagttccagaaggaccctgtgggcctgatgagccgggtggcccagcctgccagcaagaagatcgatcagaacaagctgaaacctgagatggacgagaagggcaacctgaccaccgccggctttgcctgctctcagtgtggccagcccctgttcgtgtacaagctggagcaggtgtctgagaagggcaaggcttacaccaactacttcggacggtgcaatgtggccgagcacgaaaagctgatcctgctggcccagctgaagcccgagaaggatagcgacgaagccgtgacatatagcctgggaaagtttgggcagagggccctggatttctacagcattcatgtgaccaaggagtccacccaccccgtgaagcccctggcccagatcgccggaaacagatacgcctccggacctgtgggaaaggccctgagcgacgcatgtatgggcacaatcgcctccttcctgtctaagtaccaggacatcatcatcgaacaccagaaggtggtgaagggcaaccagaagagactggagagcctgcgggagctggccggcaaggaaaacctggaataccctagcgtgaccctgccacctcagcctcacaccaaggagggcgttgatgcctacaacgaagtgatcgcccgggtgcgaatgtgggtgaacctgaacctgtggcagaagctgaagctaagcagagatgatgccaagcctctgctgagactgaagggattcccttcctttcctctggtcgagagacaggccaacgaagtggactggtgggacatggtgtgtaacgtgaagaagctgatcaacgagaaaaaggaggatggcaaggtgttttggcagaatctggctggctacaagagacaggaagccctgagaccatacctgagcagcgaggaagatcggaagaagggaaagaaattcgctcggtaccagctgggcgacctgctgctgcacctggaaaagaagcacggcgaggactggggaaaggtgtacgacgaggcctgggagcggattgacaagaaagtggaaggcctgagcaagcacatcaagctggaagaggaacggagaagcgaggacgcccagagcaaggccgccctgaccgactggctgcgggctaaggccagcttcgtgatcgagggcctgaaggaggccgacaaggacgagttctgcagatgcgagctgaagctgcagaagtggtacggggacctgcggggaaagcccttcgccatcgaagccgagaacagcatcctggacatcagcggcttcagcaagcagtacaactgtgccttcatctggcagaaggacggcgtgaagaagctgaacctgtacctgatcatcaactacttcaagggcggcaagctgcggttcaagaagatcaaacctgaagccttcgaagccaacagattctacaccgtgatcaacaaaaagagcggcgagatcgtgcccatggaggtgaacttcaacttcgacgaccccaacctgatcatcctgcctctggcctttggcaagagacagggcagagaattcatctggaacgacctgctgtccctggaaaccggcagcctgaagctggccaacggaagagtgatcgagaagacactgtacaacagaagaacccggcaggatgagcctgccctgttcgtggccctgaccttcgagcggcgggaggtcctggactcctccaatatcaaaccaatgaacctgatcggcgtggcaagaggcgaaaacatccccgccgtgatcgccctgaccgaccccgagggctgcccactgagccggtttaaggatagcctgggaaacccaacccacatcctgagaatcggcgagagctataaggagaagcagcggaccatccaggccaagaaggaggtggagcagcggagagccggcggctacagccggaagtacgccagcaaagccaagaatctggcagacgatatggtgagaaacaccgctagagatctgctgtactacgccgtgacccaggatgccatgctgatcttcgccaacctgagccggggcttcggccggcagggcaagcggaccttcatggccgagagacagtacacacggatggaggactggctgaccgccaagctggcctacgagggcctgagcaagacctacctgtccaagacactggcccagtacacctccaagacatgcagcaactgtgggtttaccatcaccagcgccgactacgacagggtgctggagaagctgaagaagacagcaacaggctggatgaccacaattaacggcaaggagctgaaggtggagggccagattacctactacaacagatacaagagacagaacgtagtcaaggacctgtccgtcgagctggatagactgagcgaagaatctgtgaacaacgacatctcctcctggacaaagggcagaagcggagaagctctgagcctcctgaagaaaagattctcccatagacccgtgcaggagaagttcgtgtgcctgaactgcggcttcgagacacacgcagccgagcaagccgccctgaacatcgccagatcctggctgttcctgcggagccaggagtacaagaaataccagacaaacaagacaaccggcaacaccgataagagagccttcgtcgagacctggcagtccttttaccggaagaagcttaaggaggtgtggaaacctgccgtgcggtctggcggatctggcggaggctcctctgcaggaggccgtgaccttcgaggacgtggccgtgaacttcagcaacgaggagtggcagtgcctgacccacgcccagaggcacctgtacaaggacgtgatgctggagaactacggcaacgtggtgagcctgggcttccccttccccaagccccccctgatcagccacctggagcaggaggccgagctgtgcgcccaggacaggcaggacagggagttcctgagctgcagctaccccgtgagcggatctggctccggcagcggccccaagaaaaagagaaaagtctaagctgccttctgcggggcttgccttctggccatgcccttcttctctcccttgcacctgtacctcttggtctttgaataaagcctgagtaggaaggctagcaaaaaaaaaaaaaaaaaaaaaaaaaaaaaaaaaaaaaaaaaaaaaaaaaaaaaaaaaaaaaaaaaaaaaaaaaaaaaaaa

SEQ ID NO: 16730 - RNA, 9485 nt, synthetic construct
  source 1..9485: mol_type = other RNA
aggaaataagagagaaaagaagagtaagaagaaatataagagccaccatggcccctaagaagaagcgtaaagtgagccggatggaacgcctcgtctacgaggtgcggcagaagtgcagaaacatcgaggacatctgcatctcctgcggatctctgaacgtgaccctggagcacccactgttcatcggcggcatgtgccagaactgtaaaaactgttttctggagtgtgcctatcaatacgacgatgacggctaccagagctactgcaccatctgttgcggcggaagagaggtgctgatgtgtggaaataacaactgctgccggtgcttctgcgtggaatgcgtggacctgctggtgggccccggcgccgcccaggccgctattaaggaagatccttggaactgctacatgtgcggccacaagggcacatacggcctgctgagacggagagaggactggcctagcagactgcagatgttcttcgccaataaccacgaccaggagttcgacccccctaaggtgtaccctcccgtccccgccgagaagagaaagcccatccgggtcctgagcctgttcgatggcatcgccaccggtctgctggtgctgaaggacctgggcatccaggtggataggtacattgcctccgaggtgtgcgaggactccatcaccgtgggaatggtgcgtcatcagggcaagatcatgtacgtgggcgacgtgcggagcgtgacacagaagcatatccaggagtggggccctttcgacctggtgatcggcggcagcccttgcaatgacctgagcatcgtgaacccagcccggaagggcctgtacgagggaaccggcagactgttcttcgagttttacagactgctgcacgacgcccggcctaaggaaggcgacgaccggcccttcttttggctgttcgagaatgtggtggccatgggagtcagcgacaagcgggatattagccggttcctggagagcaaccccgtgatgatcgatgccaaggaagtgagcgccgcccaccgggccagatacttctggggcaatctgcctggcatgaacagacccctggccagcaccgtgaacgacaagctggagctgcaggagtgcctggagcacggccggatcgccaagttcagcaaggtgagaaccatcaccacccgaagcaacagcatcaaacaaggcaaggaccagcactttcctgtgttcatgaacgagaaggaggacatcctgtggtgtaccgagatggagagagtgttcgggttcccagtccactacacagatgtcagcaacatgtctagactggccagacagagactgctgggaagaagctggtccgtccctgtgatcagacacctgttcgcccctctgaaggagtacttcgcctgcgtgagcagcggcaacagcaacgccaacagccggggccccagcttctctagcggcctggtgccactgtccctgagagggagccacatgggccccatggagatctacaaaaccgtgagcgcctggaagcggcagcctgtgcgcgtgctgagcctgtttcggaatatcgataaagtcctgaaaagcctgggattcctggagagcggctctggctccggcggtggcaccctgaagtacgtggaggatgtgacaaacgtggtcagacgggatgtggagaagtggggccccttcgatctggtgtacggcagcacccaacccctgggcagctcttgtgaccggtgccctggctggtacatgtttcagttccaccggatcctgcagtacgccctgccgagacaggagtcccagcggccattcttttggattttcatggacaacttgctgctgaccgaggatgaccaggaaactaccactcggttcctgcagaccgaagccgtgaccctgcaggacgtgagaggccgggactaccagaacgccatgcgggtgtggtccaacatccctggactgaaaagcaagcacgcacctctgacccctaaagaagaggagtacctgcaggcccaggtgcggagcagaagcaagctggacgcccctaaggtggatctgctggtgaagaattgcctcctgcccctgagagagtacttcaagtatttcagccagaatagtctgcccctgggaggcagcggcggcggcgccctggtgacatttgaggacgtcgccgtgcggttcacccaggaggaatgggctctgctggatccttctcagaaaatcctgtaccgggacgtgatgagagagacataccggaatctgacctccgtgggcatcaactgggaatgttgggaccttgaagcctgcttcagaagcctgggaagaaacctgagagtgcaggtggtgaagagaaagtgcgagctgaccaacagcggcccctgcgccgagggcggcccaagcagcggcgcccctcctcccagcggcggcagcccagccggctccccaacctctaccgaggagggcacctctgagtccgccacccccgagagcggccctggcacctccaccgagcccagcgagggcagcgcacccggcagccctgccggcagccccacctccacagaggagggaaccagcaccgagcccagcgaaggcagcgccccaggcaccagcaccgagcctagtgagcaggagattaaacggatcaacaagatcagaagaagacttgtgaaagacagcaacaccaagaaggccggcaagacaggccccatgaaaaccctgctggttagagtgatgacacccgatctgagagagcggctggaaaacctgagaaagaagcctgaaaatatcccccagcccatcagcaatacatctagagccaacctgaataagctgctgaccgattacaccgaaatgaagaaggcgatcctgcatgtgtactgggaagagttccagaaggaccctgtgggcctgatgagccgggtggcccagcctgccagcaagaagatcgatcagaacaagctgaaacctgagatggacgagaagggcaacctgaccaccgccggctttgcctgctctcagtgtggccagcccctgttcgtgtacaagctggagcaggtgtctgagaagggcaaggcttacaccaactacttcggacggtgcaatgtggccgagcacgaaaagctgatcctgctggcccagctgaagcccgagaaggatagcgacgaagccgtgacatatagcctgggaaagtttgggcagagggccctggatttctacagcattcatgtgaccaaggagtccacccaccccgtgaagcccctggcccagatcgccggaaacagatacgcctccggacctgtgggaaaggccctgagcgacgcatgtatgggcacaatcgcctccttcctgtctaagtaccaggacatcatcatcgaacaccagaaggtggtgaagggcaaccagaagagactggagagcctgcgggagctggccggcaaggaaaacctggaataccctagcgtgaccctgccacctcagcctcacaccaaggagggcgttgatgcctacaacgaagtgatcgcccgggtgcgaatgtgggtgaacctgaacctgtggcagaagctgaagctaagcagagatgatgccaagcctctgctgagactgaagggattcccttcctttcctctggtcgagagacaggccaacgaagtggactggtgggacatggtgtgtaacgtgaagaagctgatcaacgagaaaaaggaggatggcaaggtgttttggcagaatctggctggctacaagagacaggaagccctgagaccatacctgagcagcgaggaagatcggaagaagggaaagaaattcgctcggtaccagctgggcgacctgctgctgcacctggaaaagaagcacggcgaggactggggaaaggtgtacgacgaggcctgggagcggattgacaagaaagtggaaggcctgagcaagcacatcaagctggaagaggaacggagaagcgaggacgcccagagcaaggccgccctgaccgactggctgcgggctaaggccagcttcgtgatcgagggcctgaaggaggccgacaaggacgagttctgcagatgcgagctgaagctgcagaagtggtacggggacctgcggggaaagcccttcgccatcgaagccgagaacagcatcctggacatcagcggcttcagcaagcagtacaactgtgccttcatctggcagaaggacggcgtgaagaagctgaacctgtacctgatcatcaactacttcaagggcggcaagctgcggttcaagaagatcaaacctgaagccttcgaagccaacagattctacaccgtgatcaacaaaaagagcggcgagatcgtgcccatggaggtgaacttcaacttcgacgaccccaacctgatcatcctgcctctggcctttggcaagagacagggcagagaattcatctggaacgacctgctgtccctggaaaccggcagcctgaagctggccaacggaagagtgatcgagaagacactgtacaacagaagaacccggcaggatgagcctgccctgttcgtggccctgaccttcgagcggcgggaggtcctggactcctccaatatcaaaccaatgaacctgatcggcgtggcaagaggcgaaaacatccccgccgtgatcgccctgaccgaccccgagggctgcccactgagccggtttaaggatagcctgggaaacccaacccacatcctgagaatcggcgagagctataaggagaagcagcggaccatccaggccaagaaggaggtggagcagcggagagccggcggctacagccggaagtacgccagcaaagccaagaatctggcagacgatatggtgagaaacaccgctagagatctgctgtactacgccgtgacccaggatgccatgctgatcttcgccaacctgagccggggcttcggccggcagggcaagcggaccttcatggccgagagacagtacacacggatggaggactggctgaccgccaagctggcctacgagggcctgagcaagacctacctgtccaagacactggcccagtacacctccaagacatgcagcaactgtgggtttaccatcaccagcgccgactacgacagggtgctggagaagctgaagaagacagcaacaggctggatgaccacaattaacggcaaggagctgaaggtggagggccagattacctactacaacagatacaagagacagaacgtagtcaaggacctgtccgtcgagctggatagactgagcgaagaatctgtgaacaacgacatctcctcctggacaaagggcagaagcggagaagctctgagcctcctgaagaaaagattctcccatagacccgtgcaggagaagttcgtgtgcctgaactgcggcttcgagacacacgcagccgagcaagccgccctgaacatcgccagatcctggctgttcctgcggagccaggagtacaagaaataccagacaaacaagacaaccggcaacaccgataagagagccttcgtcgagacctggcagtccttttaccggaagaagcttaaggaggtgtggaaacctgccgtgcggtctggcggatctggcggaggctcctgctaccaggacagcgtgaccttcgacgacgtggccgtggacttcacccaggaggagtggaccctgctggacagcacccagaggagcctgtacagcgacgtgatgctggagaactacaagaacctggccaccgtgggcggccagatcatcaagcccagcctgatcagctggctggagcaggaggagagcaagaccgtgcagggcggcgtgctgcagggcaggaagacccagtggaggggcaccggcggcccaagcagcggcgcccctcctcccagcggcggcagcccagccggctccccaacctctaccgaggagggcacctctgagtccgccacccccgagagcggccctggcacctccaccgagcccagcgagggcagcgcacccggcagccctgccggcagccccacctccacagaggagggaaccagcaccgagcccagcgaaggcagcgccccaggcaccagcaccgagcctagtgagcaggagattaaacggatcaacaagatcagaagaagacttgtgaaagacagcaacaccaagaaggccggcaagacaggccccatgaaaaccctgctggttagagtgatgacacccgatctgagagagcggctggaaaacctgagaaagaagcctgaaaatatcccccagcccatcagcaatacatctagagccaacctgaataagctgctgaccgattacaccgaaatgaagaaggcgatcctgcatgtgtactgggaagagttccagaaggaccctgtgggcctgatgagccgggtggcccagcctgccagcaagaagatcgatcagaacaagctgaaacctgagatggacgagaagggcaacctgaccaccgccggctttgcctgctctcagtgtggccagcccctgttcgtgtacaagctggagcaggtgtctgagaagggcaaggcttacaccaactacttcggacggtgcaatgtggccgagcacgaaaagctgatcctgctggcccagctgaagcccgagaaggatagcgacgaagccgtgacatatagcctgggaaagtttgggcagagggccctggatttctacagcattcatgtgaccaaggagtccacccaccccgtgaagcccctggcccagatcgccggaaacagatacgcctccggacctgtgggaaaggccctgagcgacgcatgtatgggcacaatcgcctccttcctgtctaagtaccaggacatcatcatcgaacaccagaaggtggtgaagggcaaccagaagagactggagagcctgcgggagctggccggcaaggaaaacctggaataccctagcgtgaccctgccacctcagcctcacaccaaggagggcgttgatgcctacaacgaagtgatcgcccgggtgcgaatgtgggtgaacctgaacctgtggcagaagctgaagctaagcagagatgatgccaagcctctgctgagactgaagggattcccttcctttcctctggtcgagagacaggccaacgaagtggactggtgggacatggtgtgtaacgtgaagaagctgatcaacgagaaaaaggaggatggcaaggtgttttggcagaatctggctggctacaagagacaggaagccctgagaccatacctgagcagcgaggaagatcggaagaagggaaagaaattcgctcggtaccagctgggcgacctgctgctgcacctggaaaagaagcacggcgaggactggggaaaggtgtacgacgaggcctgggagcggattgacaagaaagtggaaggcctgagcaagcacatcaagctggaagaggaacggagaagcgaggacgcccagagcaaggccgccctgaccgactggctgcgggctaaggccagcttcgtgatcgagggcctgaaggaggccgacaaggacgagttctgcagatgcgagctgaagctgcagaagtggtacggggacctgcggggaaagcccttcgccatcgaagccgagaacagcatcctggacatcagcggcttcagcaagcagtacaactgtgccttcatctggcagaaggacggcgtgaagaagctgaacctgtacctgatcatcaactacttcaagggcggcaagctgcggttcaagaagatcaaacctgaagccttcgaagccaacagattctacaccgtgatcaacaaaaagagcggcgagatcgtgcccatggaggtgaacttcaacttcgacgaccccaacctgatcatcctgcctctggcctttggcaagagacagggcagagaattcatctggaacgacctgctgtccctggaaaccggcagcctgaagctggccaacggaagagtgatcgagaagacactgtacaacagaagaacccggcaggatgagcctgccctgttcgtggccctgaccttcgagcggcgggaggtcctggactcctccaatatcaaaccaatgaacctgatcggcgtggcaagaggcgaaaacatccccgccgtgatcgccctgaccgaccccgagggctgcccactgagccggtttaaggatagcctgggaaacccaacccacatcctgagaatcggcgagagctataaggagaagcagcggaccatccaggccaagaaggaggtggagcagcggagagccggcggctacagccggaagtacgccagcaaagccaagaatctggcagacgatatggtgagaaacaccgctagagatctgctgtactacgccgtgacccaggatgccatgctgatcttcgccaacctgagccggggcttcggccggcagggcaagcggaccttcatggccgagagacagtacacacggatggaggactggctgaccgccaagctggcctacgagggcctgagcaagacctacctgtccaagacactggcccagtacacctccaagacatgcagcaactgtgggtttaccatcaccagcgccgactacgacagggtgctggagaagctgaagaagacagcaacaggctggatgaccacaattaacggcaaggagctgaaggtggagggccagattacctactacaacagatacaagagacagaacgtagtcaaggacctgtccgtcgagctggatagactgagcgaagaatctgtgaacaacgacatctcctcctggacaaagggcagaagcggagaagctctgagcctcctgaagaaaagattctcccatagacccgtgcaggagaagttcgtgtgcctgaactgcggcttcgagacacacgcagccgagcaagccgccctgaacatcgccagatcctggctgttcctgcggagccaggagtacaagaaataccagacaaacaagacaaccggcaacaccgataagagagccttcgtcgagacctggcagtccttttaccggaagaagcttaaggaggtgtggaaacctgccgtgcggtctggcggatctggcggaggctccttgctaccaggacagcgtgaccttcgacgacgtggccgtggacttcacccaggaggagtggaccctgctggacagcacccagaggagcctgtacagcgacgtgatgctggagaactacaagaacctggccaccgtgggcggccagatcatcaagcccagcctgatcagctggctggagcaggaggagagcaagaccgtgcagggcggcgtgctgcagggcaggaagacccagtggaggggcaccggatctggctccggcagcggccccaagaaaaagagaaaagtctaagctgccttctgcggggcttgccttctggccatgcccttcttctctcccttgcacctgtacctcttggtctttgaataaagcctgagtaggaaggctagcaaaaaaaaaaaaaaaaaaaaaaaaaaaaaaaaaaaaaaaaaaaaaaaaaaaaaaaaaaaaaaaaaaaaaaaaaaaaaaaa

SEQ ID NO: 16731 - RNA, 9485 nt, synthetic construct
  source 1..9485: mol_type = other RNA
aggaaataagagagaaaagaagagtaagaagaaatataagagccaccatggcccctaagaagaagcgtaaagtgagccggatggaacgcctcgtctacgaggtgcggcagaagtgcagaaacatcgaggacatctgcatctcctgcggatctctgaacgtgaccctggagcacccactgttcatcggcggcatgtgccagaactgtaaaaactgttttctggagtgtgcctatcaatacgacgatgacggctaccagagctactgcaccatctgttgcggcggaagagaggtgctgatgtgtggaaataacaactgctgccggtgcttctgcgtggaatgcgtggacctgctggtgggccccggcgccgcccaggccgctattaaggaagatccttggaactgctacatgtgcggccacaagggcacatacggcctgctgagacggagagaggactggcctagcagactgcagatgttcttcgccaataaccacgaccaggagttcgacccccctaaggtgtaccctcccgtccccgccgagaagagaaagcccatccgggtcctgagcctgttcgatggcatcgccaccggtctgctggtgctgaaggacctgggcatccaggtggataggtacattgcctccgaggtgtgcgaggactccatcaccgtgggaatggtgcgtcatcagggcaagatcatgtacgtgggcgacgtgcggagcgtgacacagaagcatatccaggagtggggccctttcgacctggtgatcggcggcagcccttgcaatgacctgagcatcgtgaacccagcccggaagggcctgtacgagggaaccggcagactgttcttcgagttttacagactgctgcacgacgcccggcctaaggaaggcgacgaccggcccttcttttggctgttcgagaatgtggtggccatgggagtcagcgacaagcgggatattagccggttcctggagagcaaccccgtgatgatcgatgccaaggaagtgagcgccgcccaccgggccagatacttctggggcaatctgcctggcatgaacagacccctggccagcaccgtgaacgacaagctggagctgcaggagtgcctggagcacggccggatcgccaagttcagcaaggtgagaaccatcaccacccgaagcaacagcatcaaacaaggcaaggaccagcactttcctgtgttcatgaacgagaaggaggacatcctgtggtgtaccgagatggagagagtgttcgggttcccagtccactacacagatgtcagcaacatgtctagactggccagacagagactgctgggaagaagctggtccgtccctgtgatcagacacctgttcgcccctctgaaggagtacttcgcctgcgtgagcagcggcaacagcaacgccaacagccggggccccagcttctctagcggcctggtgccactgtccctgagagggagccacatgggccccatggagatctacaaaaccgtgagcgcctggaagcggcagcctgtgcgcgtgctgagcctgtttcggaatatcgataaagtcctgaaaagcctgggattcctggagagcggctctggctccggcggtggcaccctgaagtacgtggaggatgtgacaaacgtggtcagacgggatgtggagaagtggggccccttcgatctggtgtacggcagcacccaacccctgggcagctcttgtgaccggtgccctggctggtacatgtttcagttccaccggatcctgcagtacgccctgccgagacaggagtcccagcggccattcttttggattttcatggacaacttgctgctgaccgaggatgaccaggaaactaccactcggttcctgcagaccgaagccgtgaccctgcaggacgtgagaggccgggactaccagaacgccatgcgggtgtggtccaacatccctggactgaaaagcaagcacgcacctctgacccctaaagaagaggagtacctgcaggcccaggtgcggagcagaagcaagctggacgcccctaaggtggatctgctggtgaagaattgcctcctgcccctgagagagtacttcaagtatttcagccagaatagtctgcccctgggaggcagcggcggcggcgccctggtgacatttgaggacgtcgccgtgcggttcacccaggaggaatgggctctgctggatccttctcagaaaatcctgtaccgggacgtgatgagagagacataccggaatctgacctccgtgggcatcaactgggaatgttgggaccttgaagcctgcttcagaagcctgggaagaaacctgagagtgcaggtggtgaagagaaagtgcgagctgaccaacagcggcccctgcgccgagggcggcccaagcagcggcgcccctcctcccagcggcggcagcccagccggctccccaacctctaccgaggagggcacctctgagtccgccacccccgagagcggccctggcacctccaccgagcccagcgagggcagcgcacccggcagccctgccggcagccccacctccacagaggagggaaccagcaccgagcccagcgaaggcagcgccccaggcaccagcaccgagcctagtgagcaggagattaaacggatcaacaagatcagaagaagacttgtgaaagacagcaacaccaagaaggccggcaagacaggccccatgaaaaccctgctggttagagtgatgacacccgatctgagagagcggctggaaaacctgagaaagaagcctgaaaatatcccccagcccatcagcaatacatctagagccaacctgaataagctgctgaccgattacaccgaaatgaagaaggcgatcctgcatgtgtactgggaagagttccagaaggaccctgtgggcctgatgagccgggtggcccagcctgccagcaagaagatcgatcagaacaagctgaaacctgagatggacgagaagggcaacctgaccaccgccggctttgcctgctctcagtgtggccagcccctgttcgtgtacaagctggagcaggtgtctgagaagggcaaggcttacaccaactacttcggacggtgcaatgtggccgagcacgaaaagctgatcctgctggcccagctgaagcccgagaaggatagcgacgaagccgtgacatatagcctgggaaagtttgggcagagggccctggatttctacagcattcatgtgaccaaggagtccacccaccccgtgaagcccctggcccagatcgccggaaacagatacgcctccggacctgtgggaaaggccctgagcgacgcatgtatgggcacaatcgcctccttcctgtctaagtaccaggacatcatcatcgaacaccagaaggtggtgaagggcaaccagaagagactggagagcctgcgggagctggccggcaaggaaaacctggaataccctagcgtgaccctgccacctcagcctcacaccaaggagggcgttgatgcctacaacgaagtgatcgcccgggtgcgaatgtgggtgaacctgaacctgtggcagaagctgaagctaagcagagatgatgccaagcctctgctgagactgaagggattcccttcctttcctctggtcgagagacaggccaacgaagtggactggtgggacatggtgtgtaacgtgaagaagctgatcaacgagaaaaaggaggatggcaaggtgttttggcagaatctggctggctacaagagacaggaagccctgagaccatacctgagcagcgaggaagatcggaagaagggaaagaaattcgctcggtaccagctgggcgacctgctgctgcacctggaaaagaagcacggcgaggactggggaaaggtgtacgacgaggcctgggagcggattgacaagaaagtggaaggcctgagcaagcacatcaagctggaagaggaacggagaagcgaggacgcccagagcaaggccgccctgaccgactggctgcgggctaaggccagcttcgtgatcgagggcctgaaggaggccgacaaggacgagttctgcagatgcgagctgaagctgcagaagtggtacggggacctgcggggaaagcccttcgccatcgaagccgagaacagcatcctggacatcagcggcttcagcaagcagtacaactgtgccttcatctggcagaaggacggcgtgaagaagctgaacctgtacctgatcatcaactacttcaagggcggcaagctgcggttcaagaagatcaaacctgaagccttcgaagccaacagattctacaccgtgatcaacaaaaagagcggcgagatcgtgcccatggaggtgaacttcaacttcgacgaccccaacctgatcatcctgcctctggcctttggcaagagacagggcagagaattcatctggaacgacctgctgtccctggaaaccggcagcctgaagctggccaacggaagagtgatcgagaagacactgtacaacagaagaacccggcaggatgagcctgccctgttcgtggccctgaccttcgagcggcgggaggtcctggactcctccaatatcaaaccaatgaacctgatcggcgtggcaagaggcgaaaacatccccgccgtgatcgccctgaccgaccccgagggctgcccactgagccggtttaaggatagcctgggaaacccaacccacatcctgagaatcggcgagagctataaggagaagcagcggaccatccaggccaagaaggaggtggagcagcggagagccggcggctacagccggaagtacgccagcaaagccaagaatctggcagacgatatggtgagaaacaccgctagagatctgctgtactacgccgtgacccaggatgccatgctgatcttcgccaacctgagccggggcttcggccggcagggcaagcggaccttcatggccgagagacagtacacacggatggaggactggctgaccgccaagctggcctacgagggcctgagcaagacctacctgtccaagacactggcccagtacacctccaagacatgcagcaactgtgggtttaccatcaccagcgccgactacgacagggtgctggagaagctgaagaagacagcaacaggctggatgaccacaattaacggcaaggagctgaaggtggagggccagattacctactacaacagatacaagagacagaacgtagtcaaggacctgtccgtcgagctggatagactgagcgaagaatctgtgaacaacgacatctcctcctggacaaagggcagaagcggagaagctctgagcctcctgaagaaaagattctcccatagacccgtgcaggagaagttcgtgtgcctgaactgcggcttcgagacacacgcagccgagcaagccgccctgaacatcgccagatcctggctgttcctgcggagccaggagtacaagaaataccagacaaacaagacaaccggcaacaccgataagagagccttcgtcgagacctggcagtccttttaccggaagaagcttaaggaggtgtggaaacctgccgtgcggtctggcggatctggcggaggctccagccaggagctggtgaccttcgaggacgtggccatctacttcaccgaggaggagtggggcctgctggaccccgcccagaggaagctgtacagggacgtgatgctggagaacttcggcaacgtgctgctgctgggcttccccgtgagcaagcccgacatcatcagcaagctggagaggggcgagatcccctgcgtgcccttcctgcccaggaagaagatcctggtgatcaggctgggcggcggcggcggcccaagcagcggcgcccctcctcccagcggcggcagcccagccggctccccaacctctaccgaggagggcacctctgagtccgccacccccgagagcggccctggcacctccaccgagcccagcgagggcagcgcacccggcagccctgccggcagccccacctccacagaggagggaaccagcaccgagcccagcgaaggcagcgccccaggcaccagcaccgagcctagtgagcaggagattaaacggatcaacaagatcagaagaagacttgtgaaagacagcaacaccaagaaggccggcaagacaggccccatgaaaaccctgctggttagagtgatgacacccgatctgagagagcggctggaaaacctgagaaagaagcctgaaaatatcccccagcccatcagcaatacatctagagccaacctgaataagctgctgaccgattacaccgaaatgaagaaggcgatcctgcatgtgtactgggaagagttccagaaggaccctgtgggcctgatgagccgggtggcccagcctgccagcaagaagatcgatcagaacaagctgaaacctgagatggacgagaagggcaacctgaccaccgccggctttgcctgctctcagtgtggccagcccctgttcgtgtacaagctggagcaggtgtctgagaagggcaaggcttacaccaactacttcggacggtgcaatgtggccgagcacgaaaagctgatcctgctggcccagctgaagcccgagaaggatagcgacgaagccgtgacatatagcctgggaaagtttgggcagagggccctggatttctacagcattcatgtgaccaaggagtccacccaccccgtgaagcccctggcccagatcgccggaaacagatacgcctccggacctgtgggaaaggccctgagcgacgcatgtatgggcacaatcgcctccttcctgtctaagtaccaggacatcatcatcgaacaccagaaggtggtgaagggcaaccagaagagactggagagcctgcgggagctggccggcaaggaaaacctggaataccctagcgtgaccctgccacctcagcctcacaccaaggagggcgttgatgcctacaacgaagtgatcgcccgggtgcgaatgtgggtgaacctgaacctgtggcagaagctgaagctaagcagagatgatgccaagcctctgctgagactgaagggattcccttcctttcctctggtcgagagacaggccaacgaagtggactggtgggacatggtgtgtaacgtgaagaagctgatcaacgagaaaaaggaggatggcaaggtgttttggcagaatctggctggctacaagagacaggaagccctgagaccatacctgagcagcgaggaagatcggaagaagggaaagaaattcgctcggtaccagctgggcgacctgctgctgcacctggaaaagaagcacggcgaggactggggaaaggtgtacgacgaggcctgggagcggattgacaagaaagtggaaggcctgagcaagcacatcaagctggaagaggaacggagaagcgaggacgcccagagcaaggccgccctgaccgactggctgcgggctaaggccagcttcgtgatcgagggcctgaaggaggccgacaaggacgagttctgcagatgcgagctgaagctgcagaagtggtacggggacctgcggggaaagcccttcgccatcgaagccgagaacagcatcctggacatcagcggcttcagcaagcagtacaactgtgccttcatctggcagaaggacggcgtgaagaagctgaacctgtacctgatcatcaactacttcaagggcggcaagctgcggttcaagaagatcaaacctgaagccttcgaagccaacagattctacaccgtgatcaacaaaaagagcggcgagatcgtgcccatggaggtgaacttcaacttcgacgaccccaacctgatcatcctgcctctggcctttggcaagagacagggcagagaattcatctggaacgacctgctgtccctggaaaccggcagcctgaagctggccaacggaagagtgatcgagaagacactgtacaacagaagaacccggcaggatgagcctgccctgttcgtggccctgaccttcgagcggcgggaggtcctggactcctccaatatcaaaccaatgaacctgatcggcgtggcaagaggcgaaaacatccccgccgtgatcgccctgaccgaccccgagggctgcccactgagccggtttaaggatagcctgggaaacccaacccacatcctgagaatcggcgagagctataaggagaagcagcggaccatccaggccaagaaggaggtggagcagcggagagccggcggctacagccggaagtacgccagcaaagccaagaatctggcagacgatatggtgagaaacaccgctagagatctgctgtactacgccgtgacccaggatgccatgctgatcttcgccaacctgagccggggcttcggccggcagggcaagcggaccttcatggccgagagacagtacacacggatggaggactggctgaccgccaagctggcctacgagggcctgagcaagacctacctgtccaagacactggcccagtacacctccaagacatgcagcaactgtgggtttaccatcaccagcgccgactacgacagggtgctggagaagctgaagaagacagcaacaggctggatgaccacaattaacggcaaggagctgaaggtggagggccagattacctactacaacagatacaagagacagaacgtagtcaaggacctgtccgtcgagctggatagactgagcgaagaatctgtgaacaacgacatctcctcctggacaaagggcagaagcggagaagctctgagcctcctgaagaaaagattctcccatagacccgtgcaggagaagttcgtgtgcctgaactgcggcttcgagacacacgcagccgagcaagccgccctgaacatcgccagatcctggctgttcctgcggagccaggagtacaagaaataccagacaaacaagacaaccggcaacaccgataagagagccttcgtcgagacctggcagtccttttaccggaagaagcttaaggaggtgtggaaacctgccgtgcggtctggcggatctggcggaggctcctagccaggagctggtgaccttcgaggacgtggccatctacttcaccgaggaggagtggggcctgctggaccccgcccagaggaagctgtacagggacgtgatgctggagaacttcggcaacgtgctgctgctgggcttccccgtgagcaagcccgacatcatcagcaagctggagaggggcgagatcccctgcgtgcccttcctgcccaggaagaagatcctggtgatcaggctgggcggcggcggatctggctccggcagcggccccaagaaaaagagaaaagtctaagctgccttctgcggggcttgccttctggccatgcccttcttctctcccttgcacctgtacctcttggtctttgaataaagcctgagtaggaaggctagcaaaaaaaaaaaaaaaaaaaaaaaaaaaaaaaaaaaaaaaaaaaaaaaaaaaaaaaaaaaaaaaaaaaaaaaaaaaaaaaa

SEQ ID NO: 16732 - RNA, 9485 nt, synthetic construct
  source 1..9485: mol_type = other RNA
aggaaataagagagaaaagaagagtaagaagaaatataagagccaccatggcccctaagaagaagcgtaaagtgagccggatggaacgcctcgtctacgaggtgcggcagaagtgcagaaacatcgaggacatctgcatctcctgcggatctctgaacgtgaccctggagcacccactgttcatcggcggcatgtgccagaactgtaaaaactgttttctggagtgtgcctatcaatacgacgatgacggctaccagagctactgcaccatctgttgcggcggaagagaggtgctgatgtgtggaaataacaactgctgccggtgcttctgcgtggaatgcgtggacctgctggtgggccccggcgccgcccaggccgctattaaggaagatccttggaactgctacatgtgcggccacaagggcacatacggcctgctgagacggagagaggactggcctagcagactgcagatgttcttcgccaataaccacgaccaggagttcgacccccctaaggtgtaccctcccgtccccgccgagaagagaaagcccatccgggtcctgagcctgttcgatggcatcgccaccggtctgctggtgctgaaggacctgggcatccaggtggataggtacattgcctccgaggtgtgcgaggactccatcaccgtgggaatggtgcgtcatcagggcaagatcatgtacgtgggcgacgtgcggagcgtgacacagaagcatatccaggagtggggccctttcgacctggtgatcggcggcagcccttgcaatgacctgagcatcgtgaacccagcccggaagggcctgtacgagggaaccggcagactgttcttcgagttttacagactgctgcacgacgcccggcctaaggaaggcgacgaccggcccttcttttggctgttcgagaatgtggtggccatgggagtcagcgacaagcgggatattagccggttcctggagagcaaccccgtgatgatcgatgccaaggaagtgagcgccgcccaccgggccagatacttctggggcaatctgcctggcatgaacagacccctggccagcaccgtgaacgacaagctggagctgcaggagtgcctggagcacggccggatcgccaagttcagcaaggtgagaaccatcaccacccgaagcaacagcatcaaacaaggcaaggaccagcactttcctgtgttcatgaacgagaaggaggacatcctgtggtgtaccgagatggagagagtgttcgggttcccagtccactacacagatgtcagcaacatgtctagactggccagacagagactgctgggaagaagctggtccgtccctgtgatcagacacctgttcgcccctctgaaggagtacttcgcctgcgtgagcagcggcaacagcaacgccaacagccggggccccagcttctctagcggcctggtgccactgtccctgagagggagccacatgggccccatggagatctacaaaaccgtgagcgcctggaagcggcagcctgtgcgcgtgctgagcctgtttcggaatatcgataaagtcctgaaaagcctgggattcctggagagcggctctggctccggcggtggcaccctgaagtacgtggaggatgtgacaaacgtggtcagacgggatgtggagaagtggggccccttcgatctggtgtacggcagcacccaacccctgggcagctcttgtgaccggtgccctggctggtacatgtttcagttccaccggatcctgcagtacgccctgccgagacaggagtcccagcggccattcttttggattttcatggacaacttgctgctgaccgaggatgaccaggaaactaccactcggttcctgcagaccgaagccgtgaccctgcaggacgtgagaggccgggactaccagaacgccatgcgggtgtggtccaacatccctggactgaaaagcaagcacgcacctctgacccctaaagaagaggagtacctgcaggcccaggtgcggagcagaagcaagctggacgcccctaaggtggatctgctggtgaagaattgcctcctgcccctgagagagtacttcaagtatttcagccagaatagtctgcccctgggaggcagcggcggcggcgccctggtgacatttgaggacgtcgccgtgcggttcacccaggaggaatgggctctgctggatccttctcagaaaatcctgtaccgggacgtgatgagagagacataccggaatctgacctccgtgggcatcaactgggaatgttgggaccttgaagcctgcttcagaagcctgggaagaaacctgagagtgcaggtggtgaagagaaagtgcgagctgaccaacagcggcccctgcgccgagggcggcccaagcagcggcgcccctcctcccagcggcggcagcccagccggctccccaacctctaccgaggagggcacctctgagtccgccacccccgagagcggccctggcacctccaccgagcccagcgagggcagcgcacccggcagccctgccggcagccccacctccacagaggagggaaccagcaccgagcccagcgaaggcagcgccccaggcaccagcaccgagcctagtgagcaggagattaaacggatcaacaagatcagaagaagacttgtgaaagacagcaacaccaagaaggccggcaagacaggccccatgaaaaccctgctggttagagtgatgacacccgatctgagagagcggctggaaaacctgagaaagaagcctgaaaatatcccccagcccatcagcaatacatctagagccaacctgaataagctgctgaccgattacaccgaaatgaagaaggcgatcctgcatgtgtactgggaagagttccagaaggaccctgtgggcctgatgagccgggtggcccagcctgccagcaagaagatcgatcagaacaagctgaaacctgagatggacgagaagggcaacctgaccaccgccggctttgcctgctctcagtgtggccagcccctgttcgtgtacaagctggagcaggtgtctgagaagggcaaggcttacaccaactacttcggacggtgcaatgtggccgagcacgaaaagctgatcctgctggcccagctgaagcccgagaaggatagcgacgaagccgtgacatatagcctgggaaagtttgggcagagggccctggatttctacagcattcatgtgaccaaggagtccacccaccccgtgaagcccctggcccagatcgccggaaacagatacgcctccggacctgtgggaaaggccctgagcgacgcatgtatgggcacaatcgcctccttcctgtctaagtaccaggacatcatcatcgaacaccagaaggtggtgaagggcaaccagaagagactggagagcctgcgggagctggccggcaaggaaaacctggaataccctagcgtgaccctgccacctcagcctcacaccaaggagggcgttgatgcctacaacgaagtgatcgcccgggtgcgaatgtgggtgaacctgaacctgtggcagaagctgaagctaagcagagatgatgccaagcctctgctgagactgaagggattcccttcctttcctctggtcgagagacaggccaacgaagtggactggtgggacatggtgtgtaacgtgaagaagctgatcaacgagaaaaaggaggatggcaaggtgttttggcagaatctggctggctacaagagacaggaagccctgagaccatacctgagcagcgaggaagatcggaagaagggaaagaaattcgctcggtaccagctgggcgacctgctgctgcacctggaaaagaagcacggcgaggactggggaaaggtgtacgacgaggcctgggagcggattgacaagaaagtggaaggcctgagcaagcacatcaagctggaagaggaacggagaagcgaggacgcccagagcaaggccgccctgaccgactggctgcgggctaaggccagcttcgtgatcgagggcctgaaggaggccgacaaggacgagttctgcagatgcgagctgaagctgcagaagtggtacggggacctgcggggaaagcccttcgccatcgaagccgagaacagcatcctggacatcagcggcttcagcaagcagtacaactgtgccttcatctggcagaaggacggcgtgaagaagctgaacctgtacctgatcatcaactacttcaagggcggcaagctgcggttcaagaagatcaaacctgaagccttcgaagccaacagattctacaccgtgatcaacaaaaagagcggcgagatcgtgcccatggaggtgaacttcaacttcgacgaccccaacctgatcatcctgcctctggcctttggcaagagacagggcagagaattcatctggaacgacctgctgtccctggaaaccggcagcctgaagctggccaacggaagagtgatcgagaagacactgtacaacagaagaacccggcaggatgagcctgccctgttcgtggccctgaccttcgagcggcgggaggtcctggactcctccaatatcaaaccaatgaacctgatcggcgtggcaagaggcgaaaacatccccgccgtgatcgccctgaccgaccccgagggctgcccactgagccggtttaaggatagcctgggaaacccaacccacatcctgagaatcggcgagagctataaggagaagcagcggaccatccaggccaagaaggaggtggagcagcggagagccggcggctacagccggaagtacgccagcaaagccaagaatctggcagacgatatggtgagaaacaccgctagagatctgctgtactacgccgtgacccaggatgccatgctgatcttcgccaacctgagccggggcttcggccggcagggcaagcggaccttcatggccgagagacagtacacacggatggaggactggctgaccgccaagctggcctacgagggcctgagcaagacctacctgtccaagacactggcccagtacacctccaagacatgcagcaactgtgggtttaccatcaccagcgccgactacgacagggtgctggagaagctgaagaagacagcaacaggctggatgaccacaattaacggcaaggagctgaaggtggagggccagattacctactacaacagatacaagagacagaacgtagtcaaggacctgtccgtcgagctggatagactgagcgaagaatctgtgaacaacgacatctcctcctggacaaagggcagaagcggagaagctctgagcctcctgaagaaaagattctcccatagacccgtgcaggagaagttcgtgtgcctgaactgcggcttcgagacacacgcagccgagcaagccgccctgaacatcgccagatcctggctgttcctgcggagccaggagtacaagaaataccagacaaacaagacaaccggcaacaccgataagagagccttcgtcgagacctggcagtccttttaccggaagaagcttaaggaggtgtggaaacctgccgtgcggtctggcggatctggcggaggctccctgttcgagagcgtgagcttcaaggacgtgaccatcgacttcagctgggaggagtggcagcagctggacttcgcccagaagagcctgtacagggacgtgatgctggagaactacttcaacctgatcagcgtgggctgccaggtgcccaagcccgaggtgatcttcaacctggagcaggtggagaacccctgcatgctgcacaggaagatcagcaggcagagctgcctggacggcgacatcggcggcggcccaagcagcggcgcccctcctcccagcggcggcagcccagccggctccccaacctctaccgaggagggcacctctgagtccgccacccccgagagcggccctggcacctccaccgagcccagcgagggcagcgcacccggcagccctgccggcagccccacctccacagaggagggaaccagcaccgagcccagcgaaggcagcgccccaggcaccagcaccgagcctagtgagcaggagattaaacggatcaacaagatcagaagaagacttgtgaaagacagcaacaccaagaaggccggcaagacaggccccatgaaaaccctgctggttagagtgatgacacccgatctgagagagcggctggaaaacctgagaaagaagcctgaaaatatcccccagcccatcagcaatacatctagagccaacctgaataagctgctgaccgattacaccgaaatgaagaaggcgatcctgcatgtgtactgggaagagttccagaaggaccctgtgggcctgatgagccgggtggcccagcctgccagcaagaagatcgatcagaacaagctgaaacctgagatggacgagaagggcaacctgaccaccgccggctttgcctgctctcagtgtggccagcccctgttcgtgtacaagctggagcaggtgtctgagaagggcaaggcttacaccaactacttcggacggtgcaatgtggccgagcacgaaaagctgatcctgctggcccagctgaagcccgagaaggatagcgacgaagccgtgacatatagcctgggaaagtttgggcagagggccctggatttctacagcattcatgtgaccaaggagtccacccaccccgtgaagcccctggcccagatcgccggaaacagatacgcctccggacctgtgggaaaggccctgagcgacgcatgtatgggcacaatcgcctccttcctgtctaagtaccaggacatcatcatcgaacaccagaaggtggtgaagggcaaccagaagagactggagagcctgcgggagctggccggcaaggaaaacctggaataccctagcgtgaccctgccacctcagcctcacaccaaggagggcgttgatgcctacaacgaagtgatcgcccgggtgcgaatgtgggtgaacctgaacctgtggcagaagctgaagctaagcagagatgatgccaagcctctgctgagactgaagggattcccttcctttcctctggtcgagagacaggccaacgaagtggactggtgggacatggtgtgtaacgtgaagaagctgatcaacgagaaaaaggaggatggcaaggtgttttggcagaatctggctggctacaagagacaggaagccctgagaccatacctgagcagcgaggaagatcggaagaagggaaagaaattcgctcggtaccagctgggcgacctgctgctgcacctggaaaagaagcacggcgaggactggggaaaggtgtacgacgaggcctgggagcggattgacaagaaagtggaaggcctgagcaagcacatcaagctggaagaggaacggagaagcgaggacgcccagagcaaggccgccctgaccgactggctgcgggctaaggccagcttcgtgatcgagggcctgaaggaggccgacaaggacgagttctgcagatgcgagctgaagctgcagaagtggtacggggacctgcggggaaagcccttcgccatcgaagccgagaacagcatcctggacatcagcggcttcagcaagcagtacaactgtgccttcatctggcagaaggacggcgtgaagaagctgaacctgtacctgatcatcaactacttcaagggcggcaagctgcggttcaagaagatcaaacctgaagccttcgaagccaacagattctacaccgtgatcaacaaaaagagcggcgagatcgtgcccatggaggtgaacttcaacttcgacgaccccaacctgatcatcctgcctctggcctttggcaagagacagggcagagaattcatctggaacgacctgctgtccctggaaaccggcagcctgaagctggccaacggaagagtgatcgagaagacactgtacaacagaagaacccggcaggatgagcctgccctgttcgtggccctgaccttcgagcggcgggaggtcctggactcctccaatatcaaaccaatgaacctgatcggcgtggcaagaggcgaaaacatccccgccgtgatcgccctgaccgaccccgagggctgcccactgagccggtttaaggatagcctgggaaacccaacccacatcctgagaatcggcgagagctataaggagaagcagcggaccatccaggccaagaaggaggtggagcagcggagagccggcggctacagccggaagtacgccagcaaagccaagaatctggcagacgatatggtgagaaacaccgctagagatctgctgtactacgccgtgacccaggatgccatgctgatcttcgccaacctgagccggggcttcggccggcagggcaagcggaccttcatggccgagagacagtacacacggatggaggactggctgaccgccaagctggcctacgagggcctgagcaagacctacctgtccaagacactggcccagtacacctccaagacatgcagcaactgtgggtttaccatcaccagcgccgactacgacagggtgctggagaagctgaagaagacagcaacaggctggatgaccacaattaacggcaaggagctgaaggtggagggccagattacctactacaacagatacaagagacagaacgtagtcaaggacctgtccgtcgagctggatagactgagcgaagaatctgtgaacaacgacatctcctcctggacaaagggcagaagcggagaagctctgagcctcctgaagaaaagattctcccatagacccgtgcaggagaagttcgtgtgcctgaactgcggcttcgagacacacgcagccgagcaagccgccctgaacatcgccagatcctggctgttcctgcggagccaggagtacaagaaataccagacaaacaagacaaccggcaacaccgataagagagccttcgtcgagacctggcagtccttttaccggaagaagcttaaggaggtgtggaaacctgccgtgcggtctggcggatctggcggaggctcctctgttcgagagcgtgagcttcaaggacgtgaccatcgacttcagctgggaggagtggcagcagctggacttcgcccagaagagcctgtacagggacgtgatgctggagaactacttcaacctgatcagcgtgggctgccaggtgcccaagcccgaggtgatcttcaacctggagcaggtggagaacccctgcatgctgcacaggaagatcagcaggcagagctgcctggacggcgacatcggcggatctggctccggcagcggccccaagaaaaagagaaaagtctaagctgccttctgcggggcttgccttctggccatgcccttcttctctcccttgcacctgtacctcttggtctttgaataaagcctgagtaggaaggctagcaaaaaaaaaaaaaaaaaaaaaaaaaaaaaaaaaaaaaaaaaaaaaaaaaaaaaaaaaaaaaaaaaaaaaaaaaaaaaaaa

SEQ ID NO: 16733 - RNA, 9485 nt, synthetic construct
  source 1..9485: mol_type = other RNA
aggaaataagagagaaaagaagagtaagaagaaatataagagccaccatggcccctaagaagaagcgtaaagtgagccggatggaacgcctcgtctacgaggtgcggcagaagtgcagaaacatcgaggacatctgcatctcctgcggatctctgaacgtgaccctggagcacccactgttcatcggcggcatgtgccagaactgtaaaaactgttttctggagtgtgcctatcaatacgacgatgacggctaccagagctactgcaccatctgttgcggcggaagagaggtgctgatgtgtggaaataacaactgctgccggtgcttctgcgtggaatgcgtggacctgctggtgggccccggcgccgcccaggccgctattaaggaagatccttggaactgctacatgtgcggccacaagggcacatacggcctgctgagacggagagaggactggcctagcagactgcagatgttcttcgccaataaccacgaccaggagttcgacccccctaaggtgtaccctcccgtccccgccgagaagagaaagcccatccgggtcctgagcctgttcgatggcatcgccaccggtctgctggtgctgaaggacctgggcatccaggtggataggtacattgcctccgaggtgtgcgaggactccatcaccgtgggaatggtgcgtcatcagggcaagatcatgtacgtgggcgacgtgcggagcgtgacacagaagcatatccaggagtggggccctttcgacctggtgatcggcggcagcccttgcaatgacctgagcatcgtgaacccagcccggaagggcctgtacgagggaaccggcagactgttcttcgagttttacagactgctgcacgacgcccggcctaaggaaggcgacgaccggcccttcttttggctgttcgagaatgtggtggccatgggagtcagcgacaagcgggatattagccggttcctggagagcaaccccgtgatgatcgatgccaaggaagtgagcgccgcccaccgggccagatacttctggggcaatctgcctggcatgaacagacccctggccagcaccgtgaacgacaagctggagctgcaggagtgcctggagcacggccggatcgccaagttcagcaaggtgagaaccatcaccacccgaagcaacagcatcaaacaaggcaaggaccagcactttcctgtgttcatgaacgagaaggaggacatcctgtggtgtaccgagatggagagagtgttcgggttcccagtccactacacagatgtcagcaacatgtctagactggccagacagagactgctgggaagaagctggtccgtccctgtgatcagacacctgttcgcccctctgaaggagtacttcgcctgcgtgagcagcggcaacagcaacgccaacagccggggccccagcttctctagcggcctggtgccactgtccctgagagggagccacatgggccccatggagatctacaaaaccgtgagcgcctggaagcggcagcctgtgcgcgtgctgagcctgtttcggaatatcgataaagtcctgaaaagcctgggattcctggagagcggctctggctccggcggtggcaccctgaagtacgtggaggatgtgacaaacgtggtcagacgggatgtggagaagtggggccccttcgatctggtgtacggcagcacccaacccctgggcagctcttgtgaccggtgccctggctggtacatgtttcagttccaccggatcctgcagtacgccctgccgagacaggagtcccagcggccattcttttggattttcatggacaacttgctgctgaccgaggatgaccaggaaactaccactcggttcctgcagaccgaagccgtgaccctgcaggacgtgagaggccgggactaccagaacgccatgcgggtgtggtccaacatccctggactgaaaagcaagcacgcacctctgacccctaaagaagaggagtacctgcaggcccaggtgcggagcagaagcaagctggacgcccctaaggtggatctgctggtgaagaattgcctcctgcccctgagagagtacttcaagtatttcagccagaatagtctgcccctgggaggcagcggcggcggcgccctggtgacatttgaggacgtcgccgtgcggttcacccaggaggaatgggctctgctggatccttctcagaaaatcctgtaccgggacgtgatgagagagacataccggaatctgacctccgtgggcatcaactgggaatgttgggaccttgaagcctgcttcagaagcctgggaagaaacctgagagtgcaggtggtgaagagaaagtgcgagctgaccaacagcggcccctgcgccgagggcggcccaagcagcggcgcccctcctcccagcggcggcagcccagccggctccccaacctctaccgaggagggcacctctgagtccgccacccccgagagcggccctggcacctccaccgagcccagcgagggcagcgcacccggcagccctgccggcagccccacctccacagaggagggaaccagcaccgagcccagcgaaggcagcgccccaggcaccagcaccgagcctagtgagcaggagattaaacggatcaacaagatcagaagaagacttgtgaaagacagcaacaccaagaaggccggcaagacaggccccatgaaaaccctgctggttagagtgatgacacccgatctgagagagcggctggaaaacctgagaaagaagcctgaaaatatcccccagcccatcagcaatacatctagagccaacctgaataagctgctgaccgattacaccgaaatgaagaaggcgatcctgcatgtgtactgggaagagttccagaaggaccctgtgggcctgatgagccgggtggcccagcctgccagcaagaagatcgatcagaacaagctgaaacctgagatggacgagaagggcaacctgaccaccgccggctttgcctgctctcagtgtggccagcccctgttcgtgtacaagctggagcaggtgtctgagaagggcaaggcttacaccaactacttcggacggtgcaatgtggccgagcacgaaaagctgatcctgctggcccagctgaagcccgagaaggatagcgacgaagccgtgacatatagcctgggaaagtttgggcagagggccctggatttctacagcattcatgtgaccaaggagtccacccaccccgtgaagcccctggcccagatcgccggaaacagatacgcctccggacctgtgggaaaggccctgagcgacgcatgtatgggcacaatcgcctccttcctgtctaagtaccaggacatcatcatcgaacaccagaaggtggtgaagggcaaccagaagagactggagagcctgcgggagctggccggcaaggaaaacctggaataccctagcgtgaccctgccacctcagcctcacaccaaggagggcgttgatgcctacaacgaagtgatcgcccgggtgcgaatgtgggtgaacctgaacctgtggcagaagctgaagctaagcagagatgatgccaagcctctgctgagactgaagggattcccttcctttcctctggtcgagagacaggccaacgaagtggactggtgggacatggtgtgtaacgtgaagaagctgatcaacgagaaaaaggaggatggcaaggtgttttggcagaatctggctggctacaagagacaggaagccctgagaccatacctgagcagcgaggaagatcggaagaagggaaagaaattcgctcggtaccagctgggcgacctgctgctgcacctggaaaagaagcacggcgaggactggggaaaggtgtacgacgaggcctgggagcggattgacaagaaagtggaaggcctgagcaagcacatcaagctggaagaggaacggagaagcgaggacgcccagagcaaggccgccctgaccgactggctgcgggctaaggccagcttcgtgatcgagggcctgaaggaggccgacaaggacgagttctgcagatgcgagctgaagctgcagaagtggtacggggacctgcggggaaagcccttcgccatcgaagccgagaacagcatcctggacatcagcggcttcagcaagcagtacaactgtgccttcatctggcagaaggacggcgtgaagaagctgaacctgtacctgatcatcaactacttcaagggcggcaagctgcggttcaagaagatcaaacctgaagccttcgaagccaacagattctacaccgtgatcaacaaaaagagcggcgagatcgtgcccatggaggtgaacttcaacttcgacgaccccaacctgatcatcctgcctctggcctttggcaagagacagggcagagaattcatctggaacgacctgctgtccctggaaaccggcagcctgaagctggccaacggaagagtgatcgagaagacactgtacaacagaagaacccggcaggatgagcctgccctgttcgtggccctgaccttcgagcggcgggaggtcctggactcctccaatatcaaaccaatgaacctgatcggcgtggcaagaggcgaaaacatccccgccgtgatcgccctgaccgaccccgagggctgcccactgagccggtttaaggatagcctgggaaacccaacccacatcctgagaatcggcgagagctataaggagaagcagcggaccatccaggccaagaaggaggtggagcagcggagagccggcggctacagccggaagtacgccagcaaagccaagaatctggcagacgatatggtgagaaacaccgctagagatctgctgtactacgccgtgacccaggatgccatgctgatcttcgccaacctgagccggggcttcggccggcagggcaagcggaccttcatggccgagagacagtacacacggatggaggactggctgaccgccaagctggcctacgagggcctgagcaagacctacctgtccaagacactggcccagtacacctccaagacatgcagcaactgtgggtttaccatcaccagcgccgactacgacagggtgctggagaagctgaagaagacagcaacaggctggatgaccacaattaacggcaaggagctgaaggtggagggccagattacctactacaacagatacaagagacagaacgtagtcaaggacctgtccgtcgagctggatagactgagcgaagaatctgtgaacaacgacatctcctcctggacaaagggcagaagcggagaagctctgagcctcctgaagaaaagattctcccatagacccgtgcaggagaagttcgtgtgcctgaactgcggcttcgagacacacgcagccgagcaagccgccctgaacatcgccagatcctggctgttcctgcggagccaggagtacaagaaataccagacaaacaagacaaccggcaacaccgataagagagccttcgtcgagacctggcagtccttttaccggaagaagcttaaggaggtgtggaaacctgccgtgcggtctggcggatctggcggaggctccgcccagggcctggtgctgttcgaggacgtgagcgtggacttcacccagaaggagtggcagctgctggacaggacccagaggctgctgtacagggacgtgatgctggagaactacggccacctggtgagcctgggccactgcgtgagcaagcccgagctgatcctgaagctggagcaggaggaggagccctggatcctgaagggccagctggccagcgagagccaccccgaggtgcagaggaccggcggcccaagcagcggcgcccctcctcccagcggcggcagcccagccggctccccaacctctaccgaggagggcacctctgagtccgccacccccgagagcggccctggcacctccaccgagcccagcgagggcagcgcacccggcagccctgccggcagccccacctccacagaggagggaaccagcaccgagcccagcgaaggcagcgccccaggcaccagcaccgagcctagtgagcaggagattaaacggatcaacaagatcagaagaagacttgtgaaagacagcaacaccaagaaggccggcaagacaggccccatgaaaaccctgctggttagagtgatgacacccgatctgagagagcggctggaaaacctgagaaagaagcctgaaaatatcccccagcccatcagcaatacatctagagccaacctgaataagctgctgaccgattacaccgaaatgaagaaggcgatcctgcatgtgtactgggaagagttccagaaggaccctgtgggcctgatgagccgggtggcccagcctgccagcaagaagatcgatcagaacaagctgaaacctgagatggacgagaagggcaacctgaccaccgccggctttgcctgctctcagtgtggccagcccctgttcgtgtacaagctggagcaggtgtctgagaagggcaaggcttacaccaactacttcggacggtgcaatgtggccgagcacgaaaagctgatcctgctggcccagctgaagcccgagaaggatagcgacgaagccgtgacatatagcctgggaaagtttgggcagagggccctggatttctacagcattcatgtgaccaaggagtccacccaccccgtgaagcccctggcccagatcgccggaaacagatacgcctccggacctgtgggaaaggccctgagcgacgcatgtatgggcacaatcgcctccttcctgtctaagtaccaggacatcatcatcgaacaccagaaggtggtgaagggcaaccagaagagactggagagcctgcgggagctggccggcaaggaaaacctggaataccctagcgtgaccctgccacctcagcctcacaccaaggagggcgttgatgcctacaacgaagtgatcgcccgggtgcgaatgtgggtgaacctgaacctgtggcagaagctgaagctaagcagagatgatgccaagcctctgctgagactgaagggattcccttcctttcctctggtcgagagacaggccaacgaagtggactggtgggacatggtgtgtaacgtgaagaagctgatcaacgagaaaaaggaggatggcaaggtgttttggcagaatctggctggctacaagagacaggaagccctgagaccatacctgagcagcgaggaagatcggaagaagggaaagaaattcgctcggtaccagctgggcgacctgctgctgcacctggaaaagaagcacggcgaggactggggaaaggtgtacgacgaggcctgggagcggattgacaagaaagtggaaggcctgagcaagcacatcaagctggaagaggaacggagaagcgaggacgcccagagcaaggccgccctgaccgactggctgcgggctaaggccagcttcgtgatcgagggcctgaaggaggccgacaaggacgagttctgcagatgcgagctgaagctgcagaagtggtacggggacctgcggggaaagcccttcgccatcgaagccgagaacagcatcctggacatcagcggcttcagcaagcagtacaactgtgccttcatctggcagaaggacggcgtgaagaagctgaacctgtacctgatcatcaactacttcaagggcggcaagctgcggttcaagaagatcaaacctgaagccttcgaagccaacagattctacaccgtgatcaacaaaaagagcggcgagatcgtgcccatggaggtgaacttcaacttcgacgaccccaacctgatcatcctgcctctggcctttggcaagagacagggcagagaattcatctggaacgacctgctgtccctggaaaccggcagcctgaagctggccaacggaagagtgatcgagaagacactgtacaacagaagaacccggcaggatgagcctgccctgttcgtggccctgaccttcgagcggcgggaggtcctggactcctccaatatcaaaccaatgaacctgatcggcgtggcaagaggcgaaaacatccccgccgtgatcgccctgaccgaccccgagggctgcccactgagccggtttaaggatagcctgggaaacccaacccacatcctgagaatcggcgagagctataaggagaagcagcggaccatccaggccaagaaggaggtggagcagcggagagccggcggctacagccggaagtacgccagcaaagccaagaatctggcagacgatatggtgagaaacaccgctagagatctgctgtactacgccgtgacccaggatgccatgctgatcttcgccaacctgagccggggcttcggccggcagggcaagcggaccttcatggccgagagacagtacacacggatggaggactggctgaccgccaagctggcctacgagggcctgagcaagacctacctgtccaagacactggcccagtacacctccaagacatgcagcaactgtgggtttaccatcaccagcgccgactacgacagggtgctggagaagctgaagaagacagcaacaggctggatgaccacaattaacggcaaggagctgaaggtggagggccagattacctactacaacagatacaagagacagaacgtagtcaaggacctgtccgtcgagctggatagactgagcgaagaatctgtgaacaacgacatctcctcctggacaaagggcagaagcggagaagctctgagcctcctgaagaaaagattctcccatagacccgtgcaggagaagttcgtgtgcctgaactgcggcttcgagacacacgcagccgagcaagccgccctgaacatcgccagatcctggctgttcctgcggagccaggagtacaagaaataccagacaaacaagacaaccggcaacaccgataagagagccttcgtcgagacctggcagtccttttaccggaagaagcttaaggaggtgtggaaacctgccgtgcggtctggcggatctggcggaggctcctgcccagggcctggtgctgttcgaggacgtgagcgtggacttcacccagaaggagtggcagctgctggacaggacccagaggctgctgtacagggacgtgatgctggagaactacggccacctggtgagcctgggccactgcgtgagcaagcccgagctgatcctgaagctggagcaggaggaggagccctggatcctgaagggccagctggccagcgagagccaccccgaggtgcagaggaccggatctggctccggcagcggccccaagaaaaagagaaaagtctaagctgccttctgcggggcttgccttctggccatgcccttcttctctcccttgcacctgtacctcttggtctttgaataaagcctgagtaggaaggctagcaaaaaaaaaaaaaaaaaaaaaaaaaaaaaaaaaaaaaaaaaaaaaaaaaaaaaaaaaaaaaaaaaaaaaaaaaaaaaaaa

SEQ ID NO: 16734 - RNA, 9485 nt, synthetic construct
  source 1..9485: mol_type = other RNA
aggaaataagagagaaaagaagagtaagaagaaatataagagccaccatggcccctaagaagaagcgtaaagtgagccggatggaacgcctcgtctacgaggtgcggcagaagtgcagaaacatcgaggacatctgcatctcctgcggatctctgaacgtgaccctggagcacccactgttcatcggcggcatgtgccagaactgtaaaaactgttttctggagtgtgcctatcaatacgacgatgacggctaccagagctactgcaccatctgttgcggcggaagagaggtgctgatgtgtggaaataacaactgctgccggtgcttctgcgtggaatgcgtggacctgctggtgggccccggcgccgcccaggccgctattaaggaagatccttggaactgctacatgtgcggccacaagggcacatacggcctgctgagacggagagaggactggcctagcagactgcagatgttcttcgccaataaccacgaccaggagttcgacccccctaaggtgtaccctcccgtccccgccgagaagagaaagcccatccgggtcctgagcctgttcgatggcatcgccaccggtctgctggtgctgaaggacctgggcatccaggtggataggtacattgcctccgaggtgtgcgaggactccatcaccgtgggaatggtgcgtcatcagggcaagatcatgtacgtgggcgacgtgcggagcgtgacacagaagcatatccaggagtggggccctttcgacctggtgatcggcggcagcccttgcaatgacctgagcatcgtgaacccagcccggaagggcctgtacgagggaaccggcagactgttcttcgagttttacagactgctgcacgacgcccggcctaaggaaggcgacgaccggcccttcttttggctgttcgagaatgtggtggccatgggagtcagcgacaagcgggatattagccggttcctggagagcaaccccgtgatgatcgatgccaaggaagtgagcgccgcccaccgggccagatacttctggggcaatctgcctggcatgaacagacccctggccagcaccgtgaacgacaagctggagctgcaggagtgcctggagcacggccggatcgccaagttcagcaaggtgagaaccatcaccacccgaagcaacagcatcaaacaaggcaaggaccagcactttcctgtgttcatgaacgagaaggaggacatcctgtggtgtaccgagatggagagagtgttcgggttcccagtccactacacagatgtcagcaacatgtctagactggccagacagagactgctgggaagaagctggtccgtccctgtgatcagacacctgttcgcccctctgaaggagtacttcgcctgcgtgagcagcggcaacagcaacgccaacagccggggccccagcttctctagcggcctggtgccactgtccctgagagggagccacatgggccccatggagatctacaaaaccgtgagcgcctggaagcggcagcctgtgcgcgtgctgagcctgtttcggaatatcgataaagtcctgaaaagcctgggattcctggagagcggctctggctccggcggtggcaccctgaagtacgtggaggatgtgacaaacgtggtcagacgggatgtggagaagtggggccccttcgatctggtgtacggcagcacccaacccctgggcagctcttgtgaccggtgccctggctggtacatgtttcagttccaccggatcctgcagtacgccctgccgagacaggagtcccagcggccattcttttggattttcatggacaacttgctgctgaccgaggatgaccaggaaactaccactcggttcctgcagaccgaagccgtgaccctgcaggacgtgagaggccgggactaccagaacgccatgcgggtgtggtccaacatccctggactgaaaagcaagcacgcacctctgacccctaaagaagaggagtacctgcaggcccaggtgcggagcagaagcaagctggacgcccctaaggtggatctgctggtgaagaattgcctcctgcccctgagagagtacttcaagtatttcagccagaatagtctgcccctgggaggcagcggcggcggcgccctggtgacatttgaggacgtcgccgtgcggttcacccaggaggaatgggctctgctggatccttctcagaaaatcctgtaccgggacgtgatgagagagacataccggaatctgacctccgtgggcatcaactgggaatgttgggaccttgaagcctgcttcagaagcctgggaagaaacctgagagtgcaggtggtgaagagaaagtgcgagctgaccaacagcggcccctgcgccgagggcggcccaagcagcggcgcccctcctcccagcggcggcagcccagccggctccccaacctctaccgaggagggcacctctgagtccgccacccccgagagcggccctggcacctccaccgagcccagcgagggcagcgcacccggcagccctgccggcagccccacctccacagaggagggaaccagcaccgagcccagcgaaggcagcgccccaggcaccagcaccgagcctagtgagcaggagattaaacggatcaacaagatcagaagaagacttgtgaaagacagcaacaccaagaaggccggcaagacaggccccatgaaaaccctgctggttagagtgatgacacccgatctgagagagcggctggaaaacctgagaaagaagcctgaaaatatcccccagcccatcagcaatacatctagagccaacctgaataagctgctgaccgattacaccgaaatgaagaaggcgatcctgcatgtgtactgggaagagttccagaaggaccctgtgggcctgatgagccgggtggcccagcctgccagcaagaagatcgatcagaacaagctgaaacctgagatggacgagaagggcaacctgaccaccgccggctttgcctgctctcagtgtggccagcccctgttcgtgtacaagctggagcaggtgtctgagaagggcaaggcttacaccaactacttcggacggtgcaatgtggccgagcacgaaaagctgatcctgctggcccagctgaagcccgagaaggatagcgacgaagccgtgacatatagcctgggaaagtttgggcagagggccctggatttctacagcattcatgtgaccaaggagtccacccaccccgtgaagcccctggcccagatcgccggaaacagatacgcctccggacctgtgggaaaggccctgagcgacgcatgtatgggcacaatcgcctccttcctgtctaagtaccaggacatcatcatcgaacaccagaaggtggtgaagggcaaccagaagagactggagagcctgcgggagctggccggcaaggaaaacctggaataccctagcgtgaccctgccacctcagcctcacaccaaggagggcgttgatgcctacaacgaagtgatcgcccgggtgcgaatgtgggtgaacctgaacctgtggcagaagctgaagctaagcagagatgatgccaagcctctgctgagactgaagggattcccttcctttcctctggtcgagagacaggccaacgaagtggactggtgggacatggtgtgtaacgtgaagaagctgatcaacgagaaaaaggaggatggcaaggtgttttggcagaatctggctggctacaagagacaggaagccctgagaccatacctgagcagcgaggaagatcggaagaagggaaagaaattcgctcggtaccagctgggcgacctgctgctgcacctggaaaagaagcacggcgaggactggggaaaggtgtacgacgaggcctgggagcggattgacaagaaagtggaaggcctgagcaagcacatcaagctggaagaggaacggagaagcgaggacgcccagagcaaggccgccctgaccgactggctgcgggctaaggccagcttcgtgatcgagggcctgaaggaggccgacaaggacgagttctgcagatgcgagctgaagctgcagaagtggtacggggacctgcggggaaagcccttcgccatcgaagccgagaacagcatcctggacatcagcggcttcagcaagcagtacaactgtgccttcatctggcagaaggacggcgtgaagaagctgaacctgtacctgatcatcaactacttcaagggcggcaagctgcggttcaagaagatcaaacctgaagccttcgaagccaacagattctacaccgtgatcaacaaaaagagcggcgagatcgtgcccatggaggtgaacttcaacttcgacgaccccaacctgatcatcctgcctctggcctttggcaagagacagggcagagaattcatctggaacgacctgctgtccctggaaaccggcagcctgaagctggccaacggaagagtgatcgagaagacactgtacaacagaagaacccggcaggatgagcctgccctgttcgtggccctgaccttcgagcggcgggaggtcctggactcctccaatatcaaaccaatgaacctgatcggcgtggcaagaggcgaaaacatccccgccgtgatcgccctgaccgaccccgagggctgcccactgagccggtttaaggatagcctgggaaacccaacccacatcctgagaatcggcgagagctataaggagaagcagcggaccatccaggccaagaaggaggtggagcagcggagagccggcggctacagccggaagtacgccagcaaagccaagaatctggcagacgatatggtgagaaacaccgctagagatctgctgtactacgccgtgacccaggatgccatgctgatcttcgccaacctgagccggggcttcggccggcagggcaagcggaccttcatggccgagagacagtacacacggatggaggactggctgaccgccaagctggcctacgagggcctgagcaagacctacctgtccaagacactggcccagtacacctccaagacatgcagcaactgtgggtttaccatcaccagcgccgactacgacagggtgctggagaagctgaagaagacagcaacaggctggatgaccacaattaacggcaaggagctgaaggtggagggccagattacctactacaacagatacaagagacagaacgtagtcaaggacctgtccgtcgagctggatagactgagcgaagaatctgtgaacaacgacatctcctcctggacaaagggcagaagcggagaagctctgagcctcctgaagaaaagattctcccatagacccgtgcaggagaagttcgtgtgcctgaactgcggcttcgagacacacgcagccgagcaagccgccctgaacatcgccagatcctggctgttcctgcggagccaggagtacaagaaataccagacaaacaagacaaccggcaacaccgataagagagccttcgtcgagacctggcagtccttttaccggaagaagcttaaggaggtgtggaaacctgccgtgcggtctggcggatctggcggaggctccacccagggcagcctgagcttcagggacgtgaccgtgggcttcacccaggaggagtggcagcacctggaccccgcccagaggagcctgtacagggacgtgatgctggagaactacagccacctggtgagcctgggctacagcatcagcaagcccgaggtgatcctgaagctggagcagggcgaggagccctggatcctggaggaggagttccccagccagagcgacctggagctgatcaagagcggcggcccaagcagcggcgcccctcctcccagcggcggcagcccagccggctccccaacctctaccgaggagggcacctctgagtccgccacccccgagagcggccctggcacctccaccgagcccagcgagggcagcgcacccggcagccctgccggcagccccacctccacagaggagggaaccagcaccgagcccagcgaaggcagcgccccaggcaccagcaccgagcctagtgagcaggagattaaacggatcaacaagatcagaagaagacttgtgaaagacagcaacaccaagaaggccggcaagacaggccccatgaaaaccctgctggttagagtgatgacacccgatctgagagagcggctggaaaacctgagaaagaagcctgaaaatatcccccagcccatcagcaatacatctagagccaacctgaataagctgctgaccgattacaccgaaatgaagaaggcgatcctgcatgtgtactgggaagagttccagaaggaccctgtgggcctgatgagccgggtggcccagcctgccagcaagaagatcgatcagaacaagctgaaacctgagatggacgagaagggcaacctgaccaccgccggctttgcctgctctcagtgtggccagcccctgttcgtgtacaagctggagcaggtgtctgagaagggcaaggcttacaccaactacttcggacggtgcaatgtggccgagcacgaaaagctgatcctgctggcccagctgaagcccgagaaggatagcgacgaagccgtgacatatagcctgggaaagtttgggcagagggccctggatttctacagcattcatgtgaccaaggagtccacccaccccgtgaagcccctggcccagatcgccggaaacagatacgcctccggacctgtgggaaaggccctgagcgacgcatgtatgggcacaatcgcctccttcctgtctaagtaccaggacatcatcatcgaacaccagaaggtggtgaagggcaaccagaagagactggagagcctgcgggagctggccggcaaggaaaacctggaataccctagcgtgaccctgccacctcagcctcacaccaaggagggcgttgatgcctacaacgaagtgatcgcccgggtgcgaatgtgggtgaacctgaacctgtggcagaagctgaagctaagcagagatgatgccaagcctctgctgagactgaagggattcccttcctttcctctggtcgagagacaggccaacgaagtggactggtgggacatggtgtgtaacgtgaagaagctgatcaacgagaaaaaggaggatggcaaggtgttttggcagaatctggctggctacaagagacaggaagccctgagaccatacctgagcagcgaggaagatcggaagaagggaaagaaattcgctcggtaccagctgggcgacctgctgctgcacctggaaaagaagcacggcgaggactggggaaaggtgtacgacgaggcctgggagcggattgacaagaaagtggaaggcctgagcaagcacatcaagctggaagaggaacggagaagcgaggacgcccagagcaaggccgccctgaccgactggctgcgggctaaggccagcttcgtgatcgagggcctgaaggaggccgacaaggacgagttctgcagatgcgagctgaagctgcagaagtggtacggggacctgcggggaaagcccttcgccatcgaagccgagaacagcatcctggacatcagcggcttcagcaagcagtacaactgtgccttcatctggcagaaggacggcgtgaagaagctgaacctgtacctgatcatcaactacttcaagggcggcaagctgcggttcaagaagatcaaacctgaagccttcgaagccaacagattctacaccgtgatcaacaaaaagagcggcgagatcgtgcccatggaggtgaacttcaacttcgacgaccccaacctgatcatcctgcctctggcctttggcaagagacagggcagagaattcatctggaacgacctgctgtccctggaaaccggcagcctgaagctggccaacggaagagtgatcgagaagacactgtacaacagaagaacccggcaggatgagcctgccctgttcgtggccctgaccttcgagcggcgggaggtcctggactcctccaatatcaaaccaatgaacctgatcggcgtggcaagaggcgaaaacatccccgccgtgatcgccctgaccgaccccgagggctgcccactgagccggtttaaggatagcctgggaaacccaacccacatcctgagaatcggcgagagctataaggagaagcagcggaccatccaggccaagaaggaggtggagcagcggagagccggcggctacagccggaagtacgccagcaaagccaagaatctggcagacgatatggtgagaaacaccgctagagatctgctgtactacgccgtgacccaggatgccatgctgatcttcgccaacctgagccggggcttcggccggcagggcaagcggaccttcatggccgagagacagtacacacggatggaggactggctgaccgccaagctggcctacgagggcctgagcaagacctacctgtccaagacactggcccagtacacctccaagacatgcagcaactgtgggtttaccatcaccagcgccgactacgacagggtgctggagaagctgaagaagacagcaacaggctggatgaccacaattaacggcaaggagctgaaggtggagggccagattacctactacaacagatacaagagacagaacgtagtcaaggacctgtccgtcgagctggatagactgagcgaagaatctgtgaacaacgacatctcctcctggacaaagggcagaagcggagaagctctgagcctcctgaagaaaagattctcccatagacccgtgcaggagaagttcgtgtgcctgaactgcggcttcgagacacacgcagccgagcaagccgccctgaacatcgccagatcctggctgttcctgcggagccaggagtacaagaaataccagacaaacaagacaaccggcaacaccgataagagagccttcgtcgagacctggcagtccttttaccggaagaagcttaaggaggtgtggaaacctgccgtgcggtctggcggatctggcggaggctcctacccagggcagcctgagcttcagggacgtgaccgtgggcttcacccaggaggagtggcagcacctggaccccgcccagaggagcctgtacagggacgtgatgctggagaactacagccacctggtgagcctgggctacagcatcagcaagcccgaggtgatcctgaagctggagcagggcgaggagccctggatcctggaggaggagttccccagccagagcgacctggagctgatcaagagcggatctggctccggcagcggccccaagaaaaagagaaaagtctaagctgccttctgcggggcttgccttctggccatgcccttcttctctcccttgcacctgtacctcttggtctttgaataaagcctgagtaggaaggctagcaaaaaaaaaaaaaaaaaaaaaaaaaaaaaaaaaaaaaaaaaaaaaaaaaaaaaaaaaaaaaaaaaaaaaaaaaaaaaaaa

SEQ ID NO: 16735 - RNA, 9485 nt, synthetic construct
  source 1..9485: mol_type = other RNA
aggaaataagagagaaaagaagagtaagaagaaatataagagccaccatggcccctaagaagaagcgtaaagtgagccggatggaacgcctcgtctacgaggtgcggcagaagtgcagaaacatcgaggacatctgcatctcctgcggatctctgaacgtgaccctggagcacccactgttcatcggcggcatgtgccagaactgtaaaaactgttttctggagtgtgcctatcaatacgacgatgacggctaccagagctactgcaccatctgttgcggcggaagagaggtgctgatgtgtggaaataacaactgctgccggtgcttctgcgtggaatgcgtggacctgctggtgggccccggcgccgcccaggccgctattaaggaagatccttggaactgctacatgtgcggccacaagggcacatacggcctgctgagacggagagaggactggcctagcagactgcagatgttcttcgccaataaccacgaccaggagttcgacccccctaaggtgtaccctcccgtccccgccgagaagagaaagcccatccgggtcctgagcctgttcgatggcatcgccaccggtctgctggtgctgaaggacctgggcatccaggtggataggtacattgcctccgaggtgtgcgaggactccatcaccgtgggaatggtgcgtcatcagggcaagatcatgtacgtgggcgacgtgcggagcgtgacacagaagcatatccaggagtggggccctttcgacctggtgatcggcggcagcccttgcaatgacctgagcatcgtgaacccagcccggaagggcctgtacgagggaaccggcagactgttcttcgagttttacagactgctgcacgacgcccggcctaaggaaggcgacgaccggcccttcttttggctgttcgagaatgtggtggccatgggagtcagcgacaagcgggatattagccggttcctggagagcaaccccgtgatgatcgatgccaaggaagtgagcgccgcccaccgggccagatacttctggggcaatctgcctggcatgaacagacccctggccagcaccgtgaacgacaagctggagctgcaggagtgcctggagcacggccggatcgccaagttcagcaaggtgagaaccatcaccacccgaagcaacagcatcaaacaaggcaaggaccagcactttcctgtgttcatgaacgagaaggaggacatcctgtggtgtaccgagatggagagagtgttcgggttcccagtccactacacagatgtcagcaacatgtctagactggccagacagagactgctgggaagaagctggtccgtccctgtgatcagacacctgttcgcccctctgaaggagtacttcgcctgcgtgagcagcggcaacagcaacgccaacagccggggccccagcttctctagcggcctggtgccactgtccctgagagggagccacatgggccccatggagatctacaaaaccgtgagcgcctggaagcggcagcctgtgcgcgtgctgagcctgtttcggaatatcgataaagtcctgaaaagcctgggattcctggagagcggctctggctccggcggtggcaccctgaagtacgtggaggatgtgacaaacgtggtcagacgggatgtggagaagtggggccccttcgatctggtgtacggcagcacccaacccctgggcagctcttgtgaccggtgccctggctggtacatgtttcagttccaccggatcctgcagtacgccctgccgagacaggagtcccagcggccattcttttggattttcatggacaacttgctgctgaccgaggatgaccaggaaactaccactcggttcctgcagaccgaagccgtgaccctgcaggacgtgagaggccgggactaccagaacgccatgcgggtgtggtccaacatccctggactgaaaagcaagcacgcacctctgacccctaaagaagaggagtacctgcaggcccaggtgcggagcagaagcaagctggacgcccctaaggtggatctgctggtgaagaattgcctcctgcccctgagagagtacttcaagtatttcagccagaatagtctgcccctgggaggcagcggcggcggcgccctggtgacatttgaggacgtcgccgtgcggttcacccaggaggaatgggctctgctggatccttctcagaaaatcctgtaccgggacgtgatgagagagacataccggaatctgacctccgtgggcatcaactgggaatgttgggaccttgaagcctgcttcagaagcctgggaagaaacctgagagtgcaggtggtgaagagaaagtgcgagctgaccaacagcggcccctgcgccgagggcggcccaagcagcggcgcccctcctcccagcggcggcagcccagccggctccccaacctctaccgaggagggcacctctgagtccgccacccccgagagcggccctggcacctccaccgagcccagcgagggcagcgcacccggcagccctgccggcagccccacctccacagaggagggaaccagcaccgagcccagcgaaggcagcgccccaggcaccagcaccgagcctagtgagcaggagattaaacggatcaacaagatcagaagaagacttgtgaaagacagcaacaccaagaaggccggcaagacaggccccatgaaaaccctgctggttagagtgatgacacccgatctgagagagcggctggaaaacctgagaaagaagcctgaaaatatcccccagcccatcagcaatacatctagagccaacctgaataagctgctgaccgattacaccgaaatgaagaaggcgatcctgcatgtgtactgggaagagttccagaaggaccctgtgggcctgatgagccgggtggcccagcctgccagcaagaagatcgatcagaacaagctgaaacctgagatggacgagaagggcaacctgaccaccgccggctttgcctgctctcagtgtggccagcccctgttcgtgtacaagctggagcaggtgtctgagaagggcaaggcttacaccaactacttcggacggtgcaatgtggccgagcacgaaaagctgatcctgctggcccagctgaagcccgagaaggatagcgacgaagccgtgacatatagcctgggaaagtttgggcagagggccctggatttctacagcattcatgtgaccaaggagtccacccaccccgtgaagcccctggcccagatcgccggaaacagatacgcctccggacctgtgggaaaggccctgagcgacgcatgtatgggcacaatcgcctccttcctgtctaagtaccaggacatcatcatcgaacaccagaaggtggtgaagggcaaccagaagagactggagagcctgcgggagctggccggcaaggaaaacctggaataccctagcgtgaccctgccacctcagcctcacaccaaggagggcgttgatgcctacaacgaagtgatcgcccgggtgcgaatgtgggtgaacctgaacctgtggcagaagctgaagctaagcagagatgatgccaagcctctgctgagactgaagggattcccttcctttcctctggtcgagagacaggccaacgaagtggactggtgggacatggtgtgtaacgtgaagaagctgatcaacgagaaaaaggaggatggcaaggtgttttggcagaatctggctggctacaagagacaggaagccctgagaccatacctgagcagcgaggaagatcggaagaagggaaagaaattcgctcggtaccagctgggcgacctgctgctgcacctggaaaagaagcacggcgaggactggggaaaggtgtacgacgaggcctgggagcggattgacaagaaagtggaaggcctgagcaagcacatcaagctggaagaggaacggagaagcgaggacgcccagagcaaggccgccctgaccgactggctgcgggctaaggccagcttcgtgatcgagggcctgaaggaggccgacaaggacgagttctgcagatgcgagctgaagctgcagaagtggtacggggacctgcggggaaagcccttcgccatcgaagccgagaacagcatcctggacatcagcggcttcagcaagcagtacaactgtgccttcatctggcagaaggacggcgtgaagaagctgaacctgtacctgatcatcaactacttcaagggcggcaagctgcggttcaagaagatcaaacctgaagccttcgaagccaacagattctacaccgtgatcaacaaaaagagcggcgagatcgtgcccatggaggtgaacttcaacttcgacgaccccaacctgatcatcctgcctctggcctttggcaagagacagggcagagaattcatctggaacgacctgctgtccctggaaaccggcagcctgaagctggccaacggaagagtgatcgagaagacactgtacaacagaagaacccggcaggatgagcctgccctgttcgtggccctgaccttcgagcggcgggaggtcctggactcctccaatatcaaaccaatgaacctgatcggcgtggcaagaggcgaaaacatccccgccgtgatcgccctgaccgaccccgagggctgcccactgagccggtttaaggatagcctgggaaacccaacccacatcctgagaatcggcgagagctataaggagaagcagcggaccatccaggccaagaaggaggtggagcagcggagagccggcggctacagccggaagtacgccagcaaagccaagaatctggcagacgatatggtgagaaacaccgctagagatctgctgtactacgccgtgacccaggatgccatgctgatcttcgccaacctgagccggggcttcggccggcagggcaagcggaccttcatggccgagagacagtacacacggatggaggactggctgaccgccaagctggcctacgagggcctgagcaagacctacctgtccaagacactggcccagtacacctccaagacatgcagcaactgtgggtttaccatcaccagcgccgactacgacagggtgctggagaagctgaagaagacagcaacaggctggatgaccacaattaacggcaaggagctgaaggtggagggccagattacctactacaacagatacaagagacagaacgtagtcaaggacctgtccgtcgagctggatagactgagcgaagaatctgtgaacaacgacatctcctcctggacaaagggcagaagcggagaagctctgagcctcctgaagaaaagattctcccatagacccgtgcaggagaagttcgtgtgcctgaactgcggcttcgagacacacgcagccgagcaagccgccctgaacatcgccagatcctggctgttcctgcggagccaggagtacaagaaataccagacaaacaagacaaccggcaacaccgataagagagccttcgtcgagacctggcagtccttttaccggaagaagcttaaggaggtgtggaaacctgccgtgcggtctggcggatctggcggaggctcccaggccgagctgaccttcgaggacgtggccgtgttcctgagccaggaggagtggggcaggctggaccccgcccagaggggcctgtacagggacgtgatgctggagacctacaggaacctggtgagcctgggcgccggccccgccggccccaagcccggcgtgatcacccagctggagaggggcgacgagccctgggtgctggacacccagggcgtggagggcagggagaggcagaaggtggacggcggcccaagcagcggcgcccctcctcccagcggcggcagcccagccggctccccaacctctaccgaggagggcacctctgagtccgccacccccgagagcggccctggcacctccaccgagcccagcgagggcagcgcacccggcagccctgccggcagccccacctccacagaggagggaaccagcaccgagcccagcgaaggcagcgccccaggcaccagcaccgagcctagtgagcaggagattaaacggatcaacaagatcagaagaagacttgtgaaagacagcaacaccaagaaggccggcaagacaggccccatgaaaaccctgctggttagagtgatgacacccgatctgagagagcggctggaaaacctgagaaagaagcctgaaaatatcccccagcccatcagcaatacatctagagccaacctgaataagctgctgaccgattacaccgaaatgaagaaggcgatcctgcatgtgtactgggaagagttccagaaggaccctgtgggcctgatgagccgggtggcccagcctgccagcaagaagatcgatcagaacaagctgaaacctgagatggacgagaagggcaacctgaccaccgccggctttgcctgctctcagtgtggccagcccctgttcgtgtacaagctggagcaggtgtctgagaagggcaaggcttacaccaactacttcggacggtgcaatgtggccgagcacgaaaagctgatcctgctggcccagctgaagcccgagaaggatagcgacgaagccgtgacatatagcctgggaaagtttgggcagagggccctggatttctacagcattcatgtgaccaaggagtccacccaccccgtgaagcccctggcccagatcgccggaaacagatacgcctccggacctgtgggaaaggccctgagcgacgcatgtatgggcacaatcgcctccttcctgtctaagtaccaggacatcatcatcgaacaccagaaggtggtgaagggcaaccagaagagactggagagcctgcgggagctggccggcaaggaaaacctggaataccctagcgtgaccctgccacctcagcctcacaccaaggagggcgttgatgcctacaacgaagtgatcgcccgggtgcgaatgtgggtgaacctgaacctgtggcagaagctgaagctaagcagagatgatgccaagcctctgctgagactgaagggattcccttcctttcctctggtcgagagacaggccaacgaagtggactggtgggacatggtgtgtaacgtgaagaagctgatcaacgagaaaaaggaggatggcaaggtgttttggcagaatctggctggctacaagagacaggaagccctgagaccatacctgagcagcgaggaagatcggaagaagggaaagaaattcgctcggtaccagctgggcgacctgctgctgcacctggaaaagaagcacggcgaggactggggaaaggtgtacgacgaggcctgggagcggattgacaagaaagtggaaggcctgagcaagcacatcaagctggaagaggaacggagaagcgaggacgcccagagcaaggccgccctgaccgactggctgcgggctaaggccagcttcgtgatcgagggcctgaaggaggccgacaaggacgagttctgcagatgcgagctgaagctgcagaagtggtacggggacctgcggggaaagcccttcgccatcgaagccgagaacagcatcctggacatcagcggcttcagcaagcagtacaactgtgccttcatctggcagaaggacggcgtgaagaagctgaacctgtacctgatcatcaactacttcaagggcggcaagctgcggttcaagaagatcaaacctgaagccttcgaagccaacagattctacaccgtgatcaacaaaaagagcggcgagatcgtgcccatggaggtgaacttcaacttcgacgaccccaacctgatcatcctgcctctggcctttggcaagagacagggcagagaattcatctggaacgacctgctgtccctggaaaccggcagcctgaagctggccaacggaagagtgatcgagaagacactgtacaacagaagaacccggcaggatgagcctgccctgttcgtggccctgaccttcgagcggcgggaggtcctggactcctccaatatcaaaccaatgaacctgatcggcgtggcaagaggcgaaaacatccccgccgtgatcgccctgaccgaccccgagggctgcccactgagccggtttaaggatagcctgggaaacccaacccacatcctgagaatcggcgagagctataaggagaagcagcggaccatccaggccaagaaggaggtggagcagcggagagccggcggctacagccggaagtacgccagcaaagccaagaatctggcagacgatatggtgagaaacaccgctagagatctgctgtactacgccgtgacccaggatgccatgctgatcttcgccaacctgagccggggcttcggccggcagggcaagcggaccttcatggccgagagacagtacacacggatggaggactggctgaccgccaagctggcctacgagggcctgagcaagacctacctgtccaagacactggcccagtacacctccaagacatgcagcaactgtgggtttaccatcaccagcgccgactacgacagggtgctggagaagctgaagaagacagcaacaggctggatgaccacaattaacggcaaggagctgaaggtggagggccagattacctactacaacagatacaagagacagaacgtagtcaaggacctgtccgtcgagctggatagactgagcgaagaatctgtgaacaacgacatctcctcctggacaaagggcagaagcggagaagctctgagcctcctgaagaaaagattctcccatagacccgtgcaggagaagttcgtgtgcctgaactgcggcttcgagacacacgcagccgagcaagccgccctgaacatcgccagatcctggctgttcctgcggagccaggagtacaagaaataccagacaaacaagacaaccggcaacaccgataagagagccttcgtcgagacctggcagtccttttaccggaagaagcttaaggaggtgtggaaacctgccgtgcggtctggcggatctggcggaggctcctcaggccgagctgaccttcgaggacgtggccgtgttcctgagccaggaggagtggggcaggctggaccccgcccagaggggcctgtacagggacgtgatgctggagacctacaggaacctggtgagcctgggcgccggccccgccggccccaagcccggcgtgatcacccagctggagaggggcgacgagccctgggtgctggacacccagggcgtggagggcagggagaggcagaaggtggacggatctggctccggcagcggccccaagaaaaagagaaaagtctaagctgccttctgcggggcttgccttctggccatgcccttcttctctcccttgcacctgtacctcttggtctttgaataaagcctgagtaggaaggctagcaaaaaaaaaaaaaaaaaaaaaaaaaaaaaaaaaaaaaaaaaaaaaaaaaaaaaaaaaaaaaaaaaaaaaaaaaaaaaaaa

SEQ ID NO: 16736 - RNA, 9485 nt, synthetic construct
  source 1..9485: mol_type = other RNA
aggaaataagagagaaaagaagagtaagaagaaatataagagccaccatggcccctaagaagaagcgtaaagtgagccggatggaacgcctcgtctacgaggtgcggcagaagtgcagaaacatcgaggacatctgcatctcctgcggatctctgaacgtgaccctggagcacccactgttcatcggcggcatgtgccagaactgtaaaaactgttttctggagtgtgcctatcaatacgacgatgacggctaccagagctactgcaccatctgttgcggcggaagagaggtgctgatgtgtggaaataacaactgctgccggtgcttctgcgtggaatgcgtggacctgctggtgggccccggcgccgcccaggccgctattaaggaagatccttggaactgctacatgtgcggccacaagggcacatacggcctgctgagacggagagaggactggcctagcagactgcagatgttcttcgccaataaccacgaccaggagttcgacccccctaaggtgtaccctcccgtccccgccgagaagagaaagcccatccgggtcctgagcctgttcgatggcatcgccaccggtctgctggtgctgaaggacctgggcatccaggtggataggtacattgcctccgaggtgtgcgaggactccatcaccgtgggaatggtgcgtcatcagggcaagatcatgtacgtgggcgacgtgcggagcgtgacacagaagcatatccaggagtggggccctttcgacctggtgatcggcggcagcccttgcaatgacctgagcatcgtgaacccagcccggaagggcctgtacgagggaaccggcagactgttcttcgagttttacagactgctgcacgacgcccggcctaaggaaggcgacgaccggcccttcttttggctgttcgagaatgtggtggccatgggagtcagcgacaagcgggatattagccggttcctggagagcaaccccgtgatgatcgatgccaaggaagtgagcgccgcccaccgggccagatacttctggggcaatctgcctggcatgaacagacccctggccagcaccgtgaacgacaagctggagctgcaggagtgcctggagcacggccggatcgccaagttcagcaaggtgagaaccatcaccacccgaagcaacagcatcaaacaaggcaaggaccagcactttcctgtgttcatgaacgagaaggaggacatcctgtggtgtaccgagatggagagagtgttcgggttcccagtccactacacagatgtcagcaacatgtctagactggccagacagagactgctgggaagaagctggtccgtccctgtgatcagacacctgttcgcccctctgaaggagtacttcgcctgcgtgagcagcggcaacagcaacgccaacagccggggccccagcttctctagcggcctggtgccactgtccctgagagggagccacatgggccccatggagatctacaaaaccgtgagcgcctggaagcggcagcctgtgcgcgtgctgagcctgtttcggaatatcgataaagtcctgaaaagcctgggattcctggagagcggctctggctccggcggtggcaccctgaagtacgtggaggatgtgacaaacgtggtcagacgggatgtggagaagtggggccccttcgatctggtgtacggcagcacccaacccctgggcagctcttgtgaccggtgccctggctggtacatgtttcagttccaccggatcctgcagtacgccctgccgagacaggagtcccagcggccattcttttggattttcatggacaacttgctgctgaccgaggatgaccaggaaactaccactcggttcctgcagaccgaagccgtgaccctgcaggacgtgagaggccgggactaccagaacgccatgcgggtgtggtccaacatccctggactgaaaagcaagcacgcacctctgacccctaaagaagaggagtacctgcaggcccaggtgcggagcagaagcaagctggacgcccctaaggtggatctgctggtgaagaattgcctcctgcccctgagagagtacttcaagtatttcagccagaatagtctgcccctgggaggcagcggcggcggcgccctggtgacatttgaggacgtcgccgtgcggttcacccaggaggaatgggctctgctggatccttctcagaaaatcctgtaccgggacgtgatgagagagacataccggaatctgacctccgtgggcatcaactgggaatgttgggaccttgaagcctgcttcagaagcctgggaagaaacctgagagtgcaggtggtgaagagaaagtgcgagctgaccaacagcggcccctgcgccgagggcggcccaagcagcggcgcccctcctcccagcggcggcagcccagccggctccccaacctctaccgaggagggcacctctgagtccgccacccccgagagcggccctggcacctccaccgagcccagcgagggcagcgcacccggcagccctgccggcagccccacctccacagaggagggaaccagcaccgagcccagcgaaggcagcgccccaggcaccagcaccgagcctagtgagcaggagattaaacggatcaacaagatcagaagaagacttgtgaaagacagcaacaccaagaaggccggcaagacaggccccatgaaaaccctgctggttagagtgatgacacccgatctgagagagcggctggaaaacctgagaaagaagcctgaaaatatcccccagcccatcagcaatacatctagagccaacctgaataagctgctgaccgattacaccgaaatgaagaaggcgatcctgcatgtgtactgggaagagttccagaaggaccctgtgggcctgatgagccgggtggcccagcctgccagcaagaagatcgatcagaacaagctgaaacctgagatggacgagaagggcaacctgaccaccgccggctttgcctgctctcagtgtggccagcccctgttcgtgtacaagctggagcaggtgtctgagaagggcaaggcttacaccaactacttcggacggtgcaatgtggccgagcacgaaaagctgatcctgctggcccagctgaagcccgagaaggatagcgacgaagccgtgacatatagcctgggaaagtttgggcagagggccctggatttctacagcattcatgtgaccaaggagtccacccaccccgtgaagcccctggcccagatcgccggaaacagatacgcctccggacctgtgggaaaggccctgagcgacgcatgtatgggcacaatcgcctccttcctgtctaagtaccaggacatcatcatcgaacaccagaaggtggtgaagggcaaccagaagagactggagagcctgcgggagctggccggcaaggaaaacctggaataccctagcgtgaccctgccacctcagcctcacaccaaggagggcgttgatgcctacaacgaagtgatcgcccgggtgcgaatgtgggtgaacctgaacctgtggcagaagctgaagctaagcagagatgatgccaagcctctgctgagactgaagggattcccttcctttcctctggtcgagagacaggccaacgaagtggactggtgggacatggtgtgtaacgtgaagaagctgatcaacgagaaaaaggaggatggcaaggtgttttggcagaatctggctggctacaagagacaggaagccctgagaccatacctgagcagcgaggaagatcggaagaagggaaagaaattcgctcggtaccagctgggcgacctgctgctgcacctggaaaagaagcacggcgaggactggggaaaggtgtacgacgaggcctgggagcggattgacaagaaagtggaaggcctgagcaagcacatcaagctggaagaggaacggagaagcgaggacgcccagagcaaggccgccctgaccgactggctgcgggctaaggccagcttcgtgatcgagggcctgaaggaggccgacaaggacgagttctgcagatgcgagctgaagctgcagaagtggtacggggacctgcggggaaagcccttcgccatcgaagccgagaacagcatcctggacatcagcggcttcagcaagcagtacaactgtgccttcatctggcagaaggacggcgtgaagaagctgaacctgtacctgatcatcaactacttcaagggcggcaagctgcggttcaagaagatcaaacctgaagccttcgaagccaacagattctacaccgtgatcaacaaaaagagcggcgagatcgtgcccatggaggtgaacttcaacttcgacgaccccaacctgatcatcctgcctctggcctttggcaagagacagggcagagaattcatctggaacgacctgctgtccctggaaaccggcagcctgaagctggccaacggaagagtgatcgagaagacactgtacaacagaagaacccggcaggatgagcctgccctgttcgtggccctgaccttcgagcggcgggaggtcctggactcctccaatatcaaaccaatgaacctgatcggcgtggcaagaggcgaaaacatccccgccgtgatcgccctgaccgaccccgagggctgcccactgagccggtttaaggatagcctgggaaacccaacccacatcctgagaatcggcgagagctataaggagaagcagcggaccatccaggccaagaaggaggtggagcagcggagagccggcggctacagccggaagtacgccagcaaagccaagaatctggcagacgatatggtgagaaacaccgctagagatctgctgtactacgccgtgacccaggatgccatgctgatcttcgccaacctgagccggggcttcggccggcagggcaagcggaccttcatggccgagagacagtacacacggatggaggactggctgaccgccaagctggcctacgagggcctgagcaagacctacctgtccaagacactggcccagtacacctccaagacatgcagcaactgtgggtttaccatcaccagcgccgactacgacagggtgctggagaagctgaagaagacagcaacaggctggatgaccacaattaacggcaaggagctgaaggtggagggccagattacctactacaacagatacaagagacagaacgtagtcaaggacctgtccgtcgagctggatagactgagcgaagaatctgtgaacaacgacatctcctcctggacaaagggcagaagcggagaagctctgagcctcctgaagaaaagattctcccatagacccgtgcaggagaagttcgtgtgcctgaactgcggcttcgagacacacgcagccgagcaagccgccctgaacatcgccagatcctggctgttcctgcggagccaggagtacaagaaataccagacaaacaagacaaccggcaacaccgataagagagccttcgtcgagacctggcagtccttttaccggaagaagcttaaggaggtgtggaaacctgccgtgcggtctggcggatctggcggaggctccgcccaggtgcccgtgaccttcgaggacatcgccatctacttcagccaggaggagtgggagtacctggacgagggccagaaggccctgtacagggaggtgatgaaggagaactacgagaccctgctgctgctgggctgccccggcctgaagcccgtgatcatcagcagcatcgagcagggcgaggagccctgcgtgaggaagctgcaggagagggccgagctgtaccccaccgccggcgacgagggcggcccaagcagcggcgcccctcctcccagcggcggcagcccagccggctccccaacctctaccgaggagggcacctctgagtccgccacccccgagagcggccctggcacctccaccgagcccagcgagggcagcgcacccggcagccctgccggcagccccacctccacagaggagggaaccagcaccgagcccagcgaaggcagcgccccaggcaccagcaccgagcctagtgagcaggagattaaacggatcaacaagatcagaagaagacttgtgaaagacagcaacaccaagaaggccggcaagacaggccccatgaaaaccctgctggttagagtgatgacacccgatctgagagagcggctggaaaacctgagaaagaagcctgaaaatatcccccagcccatcagcaatacatctagagccaacctgaataagctgctgaccgattacaccgaaatgaagaaggcgatcctgcatgtgtactgggaagagttccagaaggaccctgtgggcctgatgagccgggtggcccagcctgccagcaagaagatcgatcagaacaagctgaaacctgagatggacgagaagggcaacctgaccaccgccggctttgcctgctctcagtgtggccagcccctgttcgtgtacaagctggagcaggtgtctgagaagggcaaggcttacaccaactacttcggacggtgcaatgtggccgagcacgaaaagctgatcctgctggcccagctgaagcccgagaaggatagcgacgaagccgtgacatatagcctgggaaagtttgggcagagggccctggatttctacagcattcatgtgaccaaggagtccacccaccccgtgaagcccctggcccagatcgccggaaacagatacgcctccggacctgtgggaaaggccctgagcgacgcatgtatgggcacaatcgcctccttcctgtctaagtaccaggacatcatcatcgaacaccagaaggtggtgaagggcaaccagaagagactggagagcctgcgggagctggccggcaaggaaaacctggaataccctagcgtgaccctgccacctcagcctcacaccaaggagggcgttgatgcctacaacgaagtgatcgcccgggtgcgaatgtgggtgaacctgaacctgtggcagaagctgaagctaagcagagatgatgccaagcctctgctgagactgaagggattcccttcctttcctctggtcgagagacaggccaacgaagtggactggtgggacatggtgtgtaacgtgaagaagctgatcaacgagaaaaaggaggatggcaaggtgttttggcagaatctggctggctacaagagacaggaagccctgagaccatacctgagcagcgaggaagatcggaagaagggaaagaaattcgctcggtaccagctgggcgacctgctgctgcacctggaaaagaagcacggcgaggactggggaaaggtgtacgacgaggcctgggagcggattgacaagaaagtggaaggcctgagcaagcacatcaagctggaagaggaacggagaagcgaggacgcccagagcaaggccgccctgaccgactggctgcgggctaaggccagcttcgtgatcgagggcctgaaggaggccgacaaggacgagttctgcagatgcgagctgaagctgcagaagtggtacggggacctgcggggaaagcccttcgccatcgaagccgagaacagcatcctggacatcagcggcttcagcaagcagtacaactgtgccttcatctggcagaaggacggcgtgaagaagctgaacctgtacctgatcatcaactacttcaagggcggcaagctgcggttcaagaagatcaaacctgaagccttcgaagccaacagattctacaccgtgatcaacaaaaagagcggcgagatcgtgcccatggaggtgaacttcaacttcgacgaccccaacctgatcatcctgcctctggcctttggcaagagacagggcagagaattcatctggaacgacctgctgtccctggaaaccggcagcctgaagctggccaacggaagagtgatcgagaagacactgtacaacagaagaacccggcaggatgagcctgccctgttcgtggccctgaccttcgagcggcgggaggtcctggactcctccaatatcaaaccaatgaacctgatcggcgtggcaagaggcgaaaacatccccgccgtgatcgccctgaccgaccccgagggctgcccactgagccggtttaaggatagcctgggaaacccaacccacatcctgagaatcggcgagagctataaggagaagcagcggaccatccaggccaagaaggaggtggagcagcggagagccggcggctacagccggaagtacgccagcaaagccaagaatctggcagacgatatggtgagaaacaccgctagagatctgctgtactacgccgtgacccaggatgccatgctgatcttcgccaacctgagccggggcttcggccggcagggcaagcggaccttcatggccgagagacagtacacacggatggaggactggctgaccgccaagctggcctacgagggcctgagcaagacctacctgtccaagacactggcccagtacacctccaagacatgcagcaactgtgggtttaccatcaccagcgccgactacgacagggtgctggagaagctgaagaagacagcaacaggctggatgaccacaattaacggcaaggagctgaaggtggagggccagattacctactacaacagatacaagagacagaacgtagtcaaggacctgtccgtcgagctggatagactgagcgaagaatctgtgaacaacgacatctcctcctggacaaagggcagaagcggagaagctctgagcctcctgaagaaaagattctcccatagacccgtgcaggagaagttcgtgtgcctgaactgcggcttcgagacacacgcagccgagcaagccgccctgaacatcgccagatcctggctgttcctgcggagccaggagtacaagaaataccagacaaacaagacaaccggcaacaccgataagagagccttcgtcgagacctggcagtccttttaccggaagaagcttaaggaggtgtggaaacctgccgtgcggtctggcggatctggcggaggctcctgcccaggtgcccgtgaccttcgaggacatcgccatctacttcagccaggaggagtgggagtacctggacgagggccagaaggccctgtacagggaggtgatgaaggagaactacgagaccctgctgctgctgggctgccccggcctgaagcccgtgatcatcagcagcatcgagcagggcgaggagccctgcgtgaggaagctgcaggagagggccgagctgtaccccaccgccggcgacgagggatctggctccggcagcggccccaagaaaaagagaaaagtctaagctgccttctgcggggcttgccttctggccatgcccttcttctctcccttgcacctgtacctcttggtctttgaataaagcctgagtaggaaggctagcaaaaaaaaaaaaaaaaaaaaaaaaaaaaaaaaaaaaaaaaaaaaaaaaaaaaaaaaaaaaaaaaaaaaaaaaaaaaaaaa

SEQ ID NO: 16737 - RNA, 9485 nt, synthetic construct
  source 1..9485: mol_type = other RNA
aggaaataagagagaaaagaagagtaagaagaaatataagagccaccatggcccctaagaagaagcgtaaagtgagccggatggaacgcctcgtctacgaggtgcggcagaagtgcagaaacatcgaggacatctgcatctcctgcggatctctgaacgtgaccctggagcacccactgttcatcggcggcatgtgccagaactgtaaaaactgttttctggagtgtgcctatcaatacgacgatgacggctaccagagctactgcaccatctgttgcggcggaagagaggtgctgatgtgtggaaataacaactgctgccggtgcttctgcgtggaatgcgtggacctgctggtgggccccggcgccgcccaggccgctattaaggaagatccttggaactgctacatgtgcggccacaagggcacatacggcctgctgagacggagagaggactggcctagcagactgcagatgttcttcgccaataaccacgaccaggagttcgacccccctaaggtgtaccctcccgtccccgccgagaagagaaagcccatccgggtcctgagcctgttcgatggcatcgccaccggtctgctggtgctgaaggacctgggcatccaggtggataggtacattgcctccgaggtgtgcgaggactccatcaccgtgggaatggtgcgtcatcagggcaagatcatgtacgtgggcgacgtgcggagcgtgacacagaagcatatccaggagtggggccctttcgacctggtgatcggcggcagcccttgcaatgacctgagcatcgtgaacccagcccggaagggcctgtacgagggaaccggcagactgttcttcgagttttacagactgctgcacgacgcccggcctaaggaaggcgacgaccggcccttcttttggctgttcgagaatgtggtggccatgggagtcagcgacaagcgggatattagccggttcctggagagcaaccccgtgatgatcgatgccaaggaagtgagcgccgcccaccgggccagatacttctggggcaatctgcctggcatgaacagacccctggccagcaccgtgaacgacaagctggagctgcaggagtgcctggagcacggccggatcgccaagttcagcaaggtgagaaccatcaccacccgaagcaacagcatcaaacaaggcaaggaccagcactttcctgtgttcatgaacgagaaggaggacatcctgtggtgtaccgagatggagagagtgttcgggttcccagtccactacacagatgtcagcaacatgtctagactggccagacagagactgctgggaagaagctggtccgtccctgtgatcagacacctgttcgcccctctgaaggagtacttcgcctgcgtgagcagcggcaacagcaacgccaacagccggggccccagcttctctagcggcctggtgccactgtccctgagagggagccacatgggccccatggagatctacaaaaccgtgagcgcctggaagcggcagcctgtgcgcgtgctgagcctgtttcggaatatcgataaagtcctgaaaagcctgggattcctggagagcggctctggctccggcggtggcaccctgaagtacgtggaggatgtgacaaacgtggtcagacgggatgtggagaagtggggccccttcgatctggtgtacggcagcacccaacccctgggcagctcttgtgaccggtgccctggctggtacatgtttcagttccaccggatcctgcagtacgccctgccgagacaggagtcccagcggccattcttttggattttcatggacaacttgctgctgaccgaggatgaccaggaaactaccactcggttcctgcagaccgaagccgtgaccctgcaggacgtgagaggccgggactaccagaacgccatgcgggtgtggtccaacatccctggactgaaaagcaagcacgcacctctgacccctaaagaagaggagtacctgcaggcccaggtgcggagcagaagcaagctggacgcccctaaggtggatctgctggtgaagaattgcctcctgcccctgagagagtacttcaagtatttcagccagaatagtctgcccctgggaggcagcggcggcggcgccctggtgacatttgaggacgtcgccgtgcggttcacccaggaggaatgggctctgctggatccttctcagaaaatcctgtaccgggacgtgatgagagagacataccggaatctgacctccgtgggcatcaactgggaatgttgggaccttgaagcctgcttcagaagcctgggaagaaacctgagagtgcaggtggtgaagagaaagtgcgagctgaccaacagcggcccctgcgccgagggcggcccaagcagcggcgcccctcctcccagcggcggcagcccagccggctccccaacctctaccgaggagggcacctctgagtccgccacccccgagagcggccctggcacctccaccgagcccagcgagggcagcgcacccggcagccctgccggcagccccacctccacagaggagggaaccagcaccgagcccagcgaaggcagcgccccaggcaccagcaccgagcctagtgagcaggagattaaacggatcaacaagatcagaagaagacttgtgaaagacagcaacaccaagaaggccggcaagacaggccccatgaaaaccctgctggttagagtgatgacacccgatctgagagagcggctggaaaacctgagaaagaagcctgaaaatatcccccagcccatcagcaatacatctagagccaacctgaataagctgctgaccgattacaccgaaatgaagaaggcgatcctgcatgtgtactgggaagagttccagaaggaccctgtgggcctgatgagccgggtggcccagcctgccagcaagaagatcgatcagaacaagctgaaacctgagatggacgagaagggcaacctgaccaccgccggctttgcctgctctcagtgtggccagcccctgttcgtgtacaagctggagcaggtgtctgagaagggcaaggcttacaccaactacttcggacggtgcaatgtggccgagcacgaaaagctgatcctgctggcccagctgaagcccgagaaggatagcgacgaagccgtgacatatagcctgggaaagtttgggcagagggccctggatttctacagcattcatgtgaccaaggagtccacccaccccgtgaagcccctggcccagatcgccggaaacagatacgcctccggacctgtgggaaaggccctgagcgacgcatgtatgggcacaatcgcctccttcctgtctaagtaccaggacatcatcatcgaacaccagaaggtggtgaagggcaaccagaagagactggagagcctgcgggagctggccggcaaggaaaacctggaataccctagcgtgaccctgccacctcagcctcacaccaaggagggcgttgatgcctacaacgaagtgatcgcccgggtgcgaatgtgggtgaacctgaacctgtggcagaagctgaagctaagcagagatgatgccaagcctctgctgagactgaagggattcccttcctttcctctggtcgagagacaggccaacgaagtggactggtgggacatggtgtgtaacgtgaagaagctgatcaacgagaaaaaggaggatggcaaggtgttttggcagaatctggctggctacaagagacaggaagccctgagaccatacctgagcagcgaggaagatcggaagaagggaaagaaattcgctcggtaccagctgggcgacctgctgctgcacctggaaaagaagcacggcgaggactggggaaaggtgtacgacgaggcctgggagcggattgacaagaaagtggaaggcctgagcaagcacatcaagctggaagaggaacggagaagcgaggacgcccagagcaaggccgccctgaccgactggctgcgggctaaggccagcttcgtgatcgagggcctgaaggaggccgacaaggacgagttctgcagatgcgagctgaagctgcagaagtggtacggggacctgcggggaaagcccttcgccatcgaagccgagaacagcatcctggacatcagcggcttcagcaagcagtacaactgtgccttcatctggcagaaggacggcgtgaagaagctgaacctgtacctgatcatcaactacttcaagggcggcaagctgcggttcaagaagatcaaacctgaagccttcgaagccaacagattctacaccgtgatcaacaaaaagagcggcgagatcgtgcccatggaggtgaacttcaacttcgacgaccccaacctgatcatcctgcctctggcctttggcaagagacagggcagagaattcatctggaacgacctgctgtccctggaaaccggcagcctgaagctggccaacggaagagtgatcgagaagacactgtacaacagaagaacccggcaggatgagcctgccctgttcgtggccctgaccttcgagcggcgggaggtcctggactcctccaatatcaaaccaatgaacctgatcggcgtggcaagaggcgaaaacatccccgccgtgatcgccctgaccgaccccgagggctgcccactgagccggtttaaggatagcctgggaaacccaacccacatcctgagaatcggcgagagctataaggagaagcagcggaccatccaggccaagaaggaggtggagcagcggagagccggcggctacagccggaagtacgccagcaaagccaagaatctggcagacgatatggtgagaaacaccgctagagatctgctgtactacgccgtgacccaggatgccatgctgatcttcgccaacctgagccggggcttcggccggcagggcaagcggaccttcatggccgagagacagtacacacggatggaggactggctgaccgccaagctggcctacgagggcctgagcaagacctacctgtccaagacactggcccagtacacctccaagacatgcagcaactgtgggtttaccatcaccagcgccgactacgacagggtgctggagaagctgaagaagacagcaacaggctggatgaccacaattaacggcaaggagctgaaggtggagggccagattacctactacaacagatacaagagacagaacgtagtcaaggacctgtccgtcgagctggatagactgagcgaagaatctgtgaacaacgacatctcctcctggacaaagggcagaagcggagaagctctgagcctcctgaagaaaagattctcccatagacccgtgcaggagaagttcgtgtgcctgaactgcggcttcgagacacacgcagccgagcaagccgccctgaacatcgccagatcctggctgttcctgcggagccaggagtacaagaaataccagacaaacaagacaaccggcaacaccgataagagagccttcgtcgagacctggcagtccttttaccggaagaagcttaaggaggtgtggaaacctgccgtgcggtctggcggatctggcggaggctcccccaaggtgcccgtgagcttcgaggacgtgagcgtgtacttcaccaagaccgagtggaagctgctggacgtgcagcagaggatcctgtacaagaccgtgatgctggagaactaccaccacctggtgagcctgggctgcctgagcaccaagccccacctggtgagctggctggagcagggcgagggcccctggaccaccgacatctggaggacccccgccaccgccaagacccagaccgagggcggcggcccaagcagcggcgcccctcctcccagcggcggcagcccagccggctccccaacctctaccgaggagggcacctctgagtccgccacccccgagagcggccctggcacctccaccgagcccagcgagggcagcgcacccggcagccctgccggcagccccacctccacagaggagggaaccagcaccgagcccagcgaaggcagcgccccaggcaccagcaccgagcctagtgagcaggagattaaacggatcaacaagatcagaagaagacttgtgaaagacagcaacaccaagaaggccggcaagacaggccccatgaaaaccctgctggttagagtgatgacacccgatctgagagagcggctggaaaacctgagaaagaagcctgaaaatatcccccagcccatcagcaatacatctagagccaacctgaataagctgctgaccgattacaccgaaatgaagaaggcgatcctgcatgtgtactgggaagagttccagaaggaccctgtgggcctgatgagccgggtggcccagcctgccagcaagaagatcgatcagaacaagctgaaacctgagatggacgagaagggcaacctgaccaccgccggctttgcctgctctcagtgtggccagcccctgttcgtgtacaagctggagcaggtgtctgagaagggcaaggcttacaccaactacttcggacggtgcaatgtggccgagcacgaaaagctgatcctgctggcccagctgaagcccgagaaggatagcgacgaagccgtgacatatagcctgggaaagtttgggcagagggccctggatttctacagcattcatgtgaccaaggagtccacccaccccgtgaagcccctggcccagatcgccggaaacagatacgcctccggacctgtgggaaaggccctgagcgacgcatgtatgggcacaatcgcctccttcctgtctaagtaccaggacatcatcatcgaacaccagaaggtggtgaagggcaaccagaagagactggagagcctgcgggagctggccggcaaggaaaacctggaataccctagcgtgaccctgccacctcagcctcacaccaaggagggcgttgatgcctacaacgaagtgatcgcccgggtgcgaatgtgggtgaacctgaacctgtggcagaagctgaagctaagcagagatgatgccaagcctctgctgagactgaagggattcccttcctttcctctggtcgagagacaggccaacgaagtggactggtgggacatggtgtgtaacgtgaagaagctgatcaacgagaaaaaggaggatggcaaggtgttttggcagaatctggctggctacaagagacaggaagccctgagaccatacctgagcagcgaggaagatcggaagaagggaaagaaattcgctcggtaccagctgggcgacctgctgctgcacctggaaaagaagcacggcgaggactggggaaaggtgtacgacgaggcctgggagcggattgacaagaaagtggaaggcctgagcaagcacatcaagctggaagaggaacggagaagcgaggacgcccagagcaaggccgccctgaccgactggctgcgggctaaggccagcttcgtgatcgagggcctgaaggaggccgacaaggacgagttctgcagatgcgagctgaagctgcagaagtggtacggggacctgcggggaaagcccttcgccatcgaagccgagaacagcatcctggacatcagcggcttcagcaagcagtacaactgtgccttcatctggcagaaggacggcgtgaagaagctgaacctgtacctgatcatcaactacttcaagggcggcaagctgcggttcaagaagatcaaacctgaagccttcgaagccaacagattctacaccgtgatcaacaaaaagagcggcgagatcgtgcccatggaggtgaacttcaacttcgacgaccccaacctgatcatcctgcctctggcctttggcaagagacagggcagagaattcatctggaacgacctgctgtccctggaaaccggcagcctgaagctggccaacggaagagtgatcgagaagacactgtacaacagaagaacccggcaggatgagcctgccctgttcgtggccctgaccttcgagcggcgggaggtcctggactcctccaatatcaaaccaatgaacctgatcggcgtggcaagaggcgaaaacatccccgccgtgatcgccctgaccgaccccgagggctgcccactgagccggtttaaggatagcctgggaaacccaacccacatcctgagaatcggcgagagctataaggagaagcagcggaccatccaggccaagaaggaggtggagcagcggagagccggcggctacagccggaagtacgccagcaaagccaagaatctggcagacgatatggtgagaaacaccgctagagatctgctgtactacgccgtgacccaggatgccatgctgatcttcgccaacctgagccggggcttcggccggcagggcaagcggaccttcatggccgagagacagtacacacggatggaggactggctgaccgccaagctggcctacgagggcctgagcaagacctacctgtccaagacactggcccagtacacctccaagacatgcagcaactgtgggtttaccatcaccagcgccgactacgacagggtgctggagaagctgaagaagacagcaacaggctggatgaccacaattaacggcaaggagctgaaggtggagggccagattacctactacaacagatacaagagacagaacgtagtcaaggacctgtccgtcgagctggatagactgagcgaagaatctgtgaacaacgacatctcctcctggacaaagggcagaagcggagaagctctgagcctcctgaagaaaagattctcccatagacccgtgcaggagaagttcgtgtgcctgaactgcggcttcgagacacacgcagccgagcaagccgccctgaacatcgccagatcctggctgttcctgcggagccaggagtacaagaaataccagacaaacaagacaaccggcaacaccgataagagagccttcgtcgagacctggcagtccttttaccggaagaagcttaaggaggtgtggaaacctgccgtgcggtctggcggatctggcggaggctcctcccaaggtgcccgtgagcttcgaggacgtgagcgtgtacttcaccaagaccgagtggaagctgctggacgtgcagcagaggatcctgtacaagaccgtgatgctggagaactaccaccacctggtgagcctgggctgcctgagcaccaagccccacctggtgagctggctggagcagggcgagggcccctggaccaccgacatctggaggacccccgccaccgccaagacccagaccgagggcggatctggctccggcagcggccccaagaaaaagagaaaagtctaagctgccttctgcggggcttgccttctggccatgcccttcttctctcccttgcacctgtacctcttggtctttgaataaagcctgagtaggaaggctagcaaaaaaaaaaaaaaaaaaaaaaaaaaaaaaaaaaaaaaaaaaaaaaaaaaaaaaaaaaaaaaaaaaaaaaaaaaaaaaaa

SEQ ID NO: 16738 - RNA, 9485 nt, synthetic construct
  source 1..9485: mol_type = other RNA
aggaaataagagagaaaagaagagtaagaagaaatataagagccaccatggcccctaagaagaagcgtaaagtgagccggatggaacgcctcgtctacgaggtgcggcagaagtgcagaaacatcgaggacatctgcatctcctgcggatctctgaacgtgaccctggagcacccactgttcatcggcggcatgtgccagaactgtaaaaactgttttctggagtgtgcctatcaatacgacgatgacggctaccagagctactgcaccatctgttgcggcggaagagaggtgctgatgtgtggaaataacaactgctgccggtgcttctgcgtggaatgcgtggacctgctggtgggccccggcgccgcccaggccgctattaaggaagatccttggaactgctacatgtgcggccacaagggcacatacggcctgctgagacggagagaggactggcctagcagactgcagatgttcttcgccaataaccacgaccaggagttcgacccccctaaggtgtaccctcccgtccccgccgagaagagaaagcccatccgggtcctgagcctgttcgatggcatcgccaccggtctgctggtgctgaaggacctgggcatccaggtggataggtacattgcctccgaggtgtgcgaggactccatcaccgtgggaatggtgcgtcatcagggcaagatcatgtacgtgggcgacgtgcggagcgtgacacagaagcatatccaggagtggggccctttcgacctggtgatcggcggcagcccttgcaatgacctgagcatcgtgaacccagcccggaagggcctgtacgagggaaccggcagactgttcttcgagttttacagactgctgcacgacgcccggcctaaggaaggcgacgaccggcccttcttttggctgttcgagaatgtggtggccatgggagtcagcgacaagcgggatattagccggttcctggagagcaaccccgtgatgatcgatgccaaggaagtgagcgccgcccaccgggccagatacttctggggcaatctgcctggcatgaacagacccctggccagcaccgtgaacgacaagctggagctgcaggagtgcctggagcacggccggatcgccaagttcagcaaggtgagaaccatcaccacccgaagcaacagcatcaaacaaggcaaggaccagcactttcctgtgttcatgaacgagaaggaggacatcctgtggtgtaccgagatggagagagtgttcgggttcccagtccactacacagatgtcagcaacatgtctagactggccagacagagactgctgggaagaagctggtccgtccctgtgatcagacacctgttcgcccctctgaaggagtacttcgcctgcgtgagcagcggcaacagcaacgccaacagccggggccccagcttctctagcggcctggtgccactgtccctgagagggagccacatgggccccatggagatctacaaaaccgtgagcgcctggaagcggcagcctgtgcgcgtgctgagcctgtttcggaatatcgataaagtcctgaaaagcctgggattcctggagagcggctctggctccggcggtggcaccctgaagtacgtggaggatgtgacaaacgtggtcagacgggatgtggagaagtggggccccttcgatctggtgtacggcagcacccaacccctgggcagctcttgtgaccggtgccctggctggtacatgtttcagttccaccggatcctgcagtacgccctgccgagacaggagtcccagcggccattcttttggattttcatggacaacttgctgctgaccgaggatgaccaggaaactaccactcggttcctgcagaccgaagccgtgaccctgcaggacgtgagaggccgggactaccagaacgccatgcgggtgtggtccaacatccctggactgaaaagcaagcacgcacctctgacccctaaagaagaggagtacctgcaggcccaggtgcggagcagaagcaagctggacgcccctaaggtggatctgctggtgaagaattgcctcctgcccctgagagagtacttcaagtatttcagccagaatagtctgcccctgggaggcagcggcggcggcgccctggtgacatttgaggacgtcgccgtgcggttcacccaggaggaatgggctctgctggatccttctcagaaaatcctgtaccgggacgtgatgagagagacataccggaatctgacctccgtgggcatcaactgggaatgttgggaccttgaagcctgcttcagaagcctgggaagaaacctgagagtgcaggtggtgaagagaaagtgcgagctgaccaacagcggcccctgcgccgagggcggcccaagcagcggcgcccctcctcccagcggcggcagcccagccggctccccaacctctaccgaggagggcacctctgagtccgccacccccgagagcggccctggcacctccaccgagcccagcgagggcagcgcacccggcagccctgccggcagccccacctccacagaggagggaaccagcaccgagcccagcgaaggcagcgccccaggcaccagcaccgagcctagtgagcaggagattaaacggatcaacaagatcagaagaagacttgtgaaagacagcaacaccaagaaggccggcaagacaggccccatgaaaaccctgctggttagagtgatgacacccgatctgagagagcggctggaaaacctgagaaagaagcctgaaaatatcccccagcccatcagcaatacatctagagccaacctgaataagctgctgaccgattacaccgaaatgaagaaggcgatcctgcatgtgtactgggaagagttccagaaggaccctgtgggcctgatgagccgggtggcccagcctgccagcaagaagatcgatcagaacaagctgaaacctgagatggacgagaagggcaacctgaccaccgccggctttgcctgctctcagtgtggccagcccctgttcgtgtacaagctggagcaggtgtctgagaagggcaaggcttacaccaactacttcggacggtgcaatgtggccgagcacgaaaagctgatcctgctggcccagctgaagcccgagaaggatagcgacgaagccgtgacatatagcctgggaaagtttgggcagagggccctggatttctacagcattcatgtgaccaaggagtccacccaccccgtgaagcccctggcccagatcgccggaaacagatacgcctccggacctgtgggaaaggccctgagcgacgcatgtatgggcacaatcgcctccttcctgtctaagtaccaggacatcatcatcgaacaccagaaggtggtgaagggcaaccagaagagactggagagcctgcgggagctggccggcaaggaaaacctggaataccctagcgtgaccctgccacctcagcctcacaccaaggagggcgttgatgcctacaacgaagtgatcgcccgggtgcgaatgtgggtgaacctgaacctgtggcagaagctgaagctaagcagagatgatgccaagcctctgctgagactgaagggattcccttcctttcctctggtcgagagacaggccaacgaagtggactggtgggacatggtgtgtaacgtgaagaagctgatcaacgagaaaaaggaggatggcaaggtgttttggcagaatctggctggctacaagagacaggaagccctgagaccatacctgagcagcgaggaagatcggaagaagggaaagaaattcgctcggtaccagctgggcgacctgctgctgcacctggaaaagaagcacggcgaggactggggaaaggtgtacgacgaggcctgggagcggattgacaagaaagtggaaggcctgagcaagcacatcaagctggaagaggaacggagaagcgaggacgcccagagcaaggccgccctgaccgactggctgcgggctaaggccagcttcgtgatcgagggcctgaaggaggccgacaaggacgagttctgcagatgcgagctgaagctgcagaagtggtacggggacctgcggggaaagcccttcgccatcgaagccgagaacagcatcctggacatcagcggcttcagcaagcagtacaactgtgccttcatctggcagaaggacggcgtgaagaagctgaacctgtacctgatcatcaactacttcaagggcggcaagctgcggttcaagaagatcaaacctgaagccttcgaagccaacagattctacaccgtgatcaacaaaaagagcggcgagatcgtgcccatggaggtgaacttcaacttcgacgaccccaacctgatcatcctgcctctggcctttggcaagagacagggcagagaattcatctggaacgacctgctgtccctggaaaccggcagcctgaagctggccaacggaagagtgatcgagaagacactgtacaacagaagaacccggcaggatgagcctgccctgttcgtggccctgaccttcgagcggcgggaggtcctggactcctccaatatcaaaccaatgaacctgatcggcgtggcaagaggcgaaaacatccccgccgtgatcgccctgaccgaccccgagggctgcccactgagccggtttaaggatagcctgggaaacccaacccacatcctgagaatcggcgagagctataaggagaagcagcggaccatccaggccaagaaggaggtggagcagcggagagccggcggctacagccggaagtacgccagcaaagccaagaatctggcagacgatatggtgagaaacaccgctagagatctgctgtactacgccgtgacccaggatgccatgctgatcttcgccaacctgagccggggcttcggccggcagggcaagcggaccttcatggccgagagacagtacacacggatggaggactggctgaccgccaagctggcctacgagggcctgagcaagacctacctgtccaagacactggcccagtacacctccaagacatgcagcaactgtgggtttaccatcaccagcgccgactacgacagggtgctggagaagctgaagaagacagcaacaggctggatgaccacaattaacggcaaggagctgaaggtggagggccagattacctactacaacagatacaagagacagaacgtagtcaaggacctgtccgtcgagctggatagactgagcgaagaatctgtgaacaacgacatctcctcctggacaaagggcagaagcggagaagctctgagcctcctgaagaaaagattctcccatagacccgtgcaggagaagttcgtgtgcctgaactgcggcttcgagacacacgcagccgagcaagccgccctgaacatcgccagatcctggctgttcctgcggagccaggagtacaagaaataccagacaaacaagacaaccggcaacaccgataagagagccttcgtcgagacctggcagtccttttaccggaagaagcttaaggaggtgtggaaacctgccgtgcggtctggcggatctggcggaggctccacccaggtgagcgtgaccttcgacgacgtggccgtgaccttcacccaggaggagtggaggcagctggaccccgcccagaggaccctgtaccaggaggtgatgctggagaactgcaggctgctggtgagcctgggctgccccgtgcccaggctggagctgatcttccagctggagcagggccagaagctgtggaccgtgaagaaggacctgagcaggagcacctgccccggcaagaggtgcaggggcggcccaagcagcggcgcccctcctcccagcggcggcagcccagccggctccccaacctctaccgaggagggcacctctgagtccgccacccccgagagcggccctggcacctccaccgagcccagcgagggcagcgcacccggcagccctgccggcagccccacctccacagaggagggaaccagcaccgagcccagcgaaggcagcgccccaggcaccagcaccgagcctagtgagcaggagattaaacggatcaacaagatcagaagaagacttgtgaaagacagcaacaccaagaaggccggcaagacaggccccatgaaaaccctgctggttagagtgatgacacccgatctgagagagcggctggaaaacctgagaaagaagcctgaaaatatcccccagcccatcagcaatacatctagagccaacctgaataagctgctgaccgattacaccgaaatgaagaaggcgatcctgcatgtgtactgggaagagttccagaaggaccctgtgggcctgatgagccgggtggcccagcctgccagcaagaagatcgatcagaacaagctgaaacctgagatggacgagaagggcaacctgaccaccgccggctttgcctgctctcagtgtggccagcccctgttcgtgtacaagctggagcaggtgtctgagaagggcaaggcttacaccaactacttcggacggtgcaatgtggccgagcacgaaaagctgatcctgctggcccagctgaagcccgagaaggatagcgacgaagccgtgacatatagcctgggaaagtttgggcagagggccctggatttctacagcattcatgtgaccaaggagtccacccaccccgtgaagcccctggcccagatcgccggaaacagatacgcctccggacctgtgggaaaggccctgagcgacgcatgtatgggcacaatcgcctccttcctgtctaagtaccaggacatcatcatcgaacaccagaaggtggtgaagggcaaccagaagagactggagagcctgcgggagctggccggcaaggaaaacctggaataccctagcgtgaccctgccacctcagcctcacaccaaggagggcgttgatgcctacaacgaagtgatcgcccgggtgcgaatgtgggtgaacctgaacctgtggcagaagctgaagctaagcagagatgatgccaagcctctgctgagactgaagggattcccttcctttcctctggtcgagagacaggccaacgaagtggactggtgggacatggtgtgtaacgtgaagaagctgatcaacgagaaaaaggaggatggcaaggtgttttggcagaatctggctggctacaagagacaggaagccctgagaccatacctgagcagcgaggaagatcggaagaagggaaagaaattcgctcggtaccagctgggcgacctgctgctgcacctggaaaagaagcacggcgaggactggggaaaggtgtacgacgaggcctgggagcggattgacaagaaagtggaaggcctgagcaagcacatcaagctggaagaggaacggagaagcgaggacgcccagagcaaggccgccctgaccgactggctgcgggctaaggccagcttcgtgatcgagggcctgaaggaggccgacaaggacgagttctgcagatgcgagctgaagctgcagaagtggtacggggacctgcggggaaagcccttcgccatcgaagccgagaacagcatcctggacatcagcggcttcagcaagcagtacaactgtgccttcatctggcagaaggacggcgtgaagaagctgaacctgtacctgatcatcaactacttcaagggcggcaagctgcggttcaagaagatcaaacctgaagccttcgaagccaacagattctacaccgtgatcaacaaaaagagcggcgagatcgtgcccatggaggtgaacttcaacttcgacgaccccaacctgatcatcctgcctctggcctttggcaagagacagggcagagaattcatctggaacgacctgctgtccctggaaaccggcagcctgaagctggccaacggaagagtgatcgagaagacactgtacaacagaagaacccggcaggatgagcctgccctgttcgtggccctgaccttcgagcggcgggaggtcctggactcctccaatatcaaaccaatgaacctgatcggcgtggcaagaggcgaaaacatccccgccgtgatcgccctgaccgaccccgagggctgcccactgagccggtttaaggatagcctgggaaacccaacccacatcctgagaatcggcgagagctataaggagaagcagcggaccatccaggccaagaaggaggtggagcagcggagagccggcggctacagccggaagtacgccagcaaagccaagaatctggcagacgatatggtgagaaacaccgctagagatctgctgtactacgccgtgacccaggatgccatgctgatcttcgccaacctgagccggggcttcggccggcagggcaagcggaccttcatggccgagagacagtacacacggatggaggactggctgaccgccaagctggcctacgagggcctgagcaagacctacctgtccaagacactggcccagtacacctccaagacatgcagcaactgtgggtttaccatcaccagcgccgactacgacagggtgctggagaagctgaagaagacagcaacaggctggatgaccacaattaacggcaaggagctgaaggtggagggccagattacctactacaacagatacaagagacagaacgtagtcaaggacctgtccgtcgagctggatagactgagcgaagaatctgtgaacaacgacatctcctcctggacaaagggcagaagcggagaagctctgagcctcctgaagaaaagattctcccatagacccgtgcaggagaagttcgtgtgcctgaactgcggcttcgagacacacgcagccgagcaagccgccctgaacatcgccagatcctggctgttcctgcggagccaggagtacaagaaataccagacaaacaagacaaccggcaacaccgataagagagccttcgtcgagacctggcagtccttttaccggaagaagcttaaggaggtgtggaaacctgccgtgcggtctggcggatctggcggaggctcctacccaggtgagcgtgaccttcgacgacgtggccgtgaccttcacccaggaggagtggaggcagctggaccccgcccagaggaccctgtaccaggaggtgatgctggagaactgcaggctgctggtgagcctgggctgccccgtgcccaggctggagctgatcttccagctggagcagggccagaagctgtggaccgtgaagaaggacctgagcaggagcacctgccccggcaagaggtgcaggggatctggctccggcagcggccccaagaaaaagagaaaagtctaagctgccttctgcggggcttgccttctggccatgcccttcttctctcccttgcacctgtacctcttggtctttgaataaagcctgagtaggaaggctagcaaaaaaaaaaaaaaaaaaaaaaaaaaaaaaaaaaaaaaaaaaaaaaaaaaaaaaaaaaaaaaaaaaaaaaaaaaaaaaaa

SEQ ID NO: 16739 - RNA, 9485 nt, synthetic construct
  source 1..9485: mol_type = other RNA
aggaaataagagagaaaagaagagtaagaagaaatataagagccaccatggcccctaagaagaagcgtaaagtgagccggatggaacgcctcgtctacgaggtgcggcagaagtgcagaaacatcgaggacatctgcatctcctgcggatctctgaacgtgaccctggagcacccactgttcatcggcggcatgtgccagaactgtaaaaactgttttctggagtgtgcctatcaatacgacgatgacggctaccagagctactgcaccatctgttgcggcggaagagaggtgctgatgtgtggaaataacaactgctgccggtgcttctgcgtggaatgcgtggacctgctggtgggccccggcgccgcccaggccgctattaaggaagatccttggaactgctacatgtgcggccacaagggcacatacggcctgctgagacggagagaggactggcctagcagactgcagatgttcttcgccaataaccacgaccaggagttcgacccccctaaggtgtaccctcccgtccccgccgagaagagaaagcccatccgggtcctgagcctgttcgatggcatcgccaccggtctgctggtgctgaaggacctgggcatccaggtggataggtacattgcctccgaggtgtgcgaggactccatcaccgtgggaatggtgcgtcatcagggcaagatcatgtacgtgggcgacgtgcggagcgtgacacagaagcatatccaggagtggggccctttcgacctggtgatcggcggcagcccttgcaatgacctgagcatcgtgaacccagcccggaagggcctgtacgagggaaccggcagactgttcttcgagttttacagactgctgcacgacgcccggcctaaggaaggcgacgaccggcccttcttttggctgttcgagaatgtggtggccatgggagtcagcgacaagcgggatattagccggttcctggagagcaaccccgtgatgatcgatgccaaggaagtgagcgccgcccaccgggccagatacttctggggcaatctgcctggcatgaacagacccctggccagcaccgtgaacgacaagctggagctgcaggagtgcctggagcacggccggatcgccaagttcagcaaggtgagaaccatcaccacccgaagcaacagcatcaaacaaggcaaggaccagcactttcctgtgttcatgaacgagaaggaggacatcctgtggtgtaccgagatggagagagtgttcgggttcccagtccactacacagatgtcagcaacatgtctagactggccagacagagactgctgggaagaagctggtccgtccctgtgatcagacacctgttcgcccctctgaaggagtacttcgcctgcgtgagcagcggcaacagcaacgccaacagccggggccccagcttctctagcggcctggtgccactgtccctgagagggagccacatgggccccatggagatctacaaaaccgtgagcgcctggaagcggcagcctgtgcgcgtgctgagcctgtttcggaatatcgataaagtcctgaaaagcctgggattcctggagagcggctctggctccggcggtggcaccctgaagtacgtggaggatgtgacaaacgtggtcagacgggatgtggagaagtggggccccttcgatctggtgtacggcagcacccaacccctgggcagctcttgtgaccggtgccctggctggtacatgtttcagttccaccggatcctgcagtacgccctgccgagacaggagtcccagcggccattcttttggattttcatggacaacttgctgctgaccgaggatgaccaggaaactaccactcggttcctgcagaccgaagccgtgaccctgcaggacgtgagaggccgggactaccagaacgccatgcgggtgtggtccaacatccctggactgaaaagcaagcacgcacctctgacccctaaagaagaggagtacctgcaggcccaggtgcggagcagaagcaagctggacgcccctaaggtggatctgctggtgaagaattgcctcctgcccctgagagagtacttcaagtatttcagccagaatagtctgcccctgggaggcagcggcggcggcgccctggtgacatttgaggacgtcgccgtgcggttcacccaggaggaatgggctctgctggatccttctcagaaaatcctgtaccgggacgtgatgagagagacataccggaatctgacctccgtgggcatcaactgggaatgttgggaccttgaagcctgcttcagaagcctgggaagaaacctgagagtgcaggtggtgaagagaaagtgcgagctgaccaacagcggcccctgcgccgagggcggcccaagcagcggcgcccctcctcccagcggcggcagcccagccggctccccaacctctaccgaggagggcacctctgagtccgccacccccgagagcggccctggcacctccaccgagcccagcgagggcagcgcacccggcagccctgccggcagccccacctccacagaggagggaaccagcaccgagcccagcgaaggcagcgccccaggcaccagcaccgagcctagtgagcaggagattaaacggatcaacaagatcagaagaagacttgtgaaagacagcaacaccaagaaggccggcaagacaggccccatgaaaaccctgctggttagagtgatgacacccgatctgagagagcggctggaaaacctgagaaagaagcctgaaaatatcccccagcccatcagcaatacatctagagccaacctgaataagctgctgaccgattacaccgaaatgaagaaggcgatcctgcatgtgtactgggaagagttccagaaggaccctgtgggcctgatgagccgggtggcccagcctgccagcaagaagatcgatcagaacaagctgaaacctgagatggacgagaagggcaacctgaccaccgccggctttgcctgctctcagtgtggccagcccctgttcgtgtacaagctggagcaggtgtctgagaagggcaaggcttacaccaactacttcggacggtgcaatgtggccgagcacgaaaagctgatcctgctggcccagctgaagcccgagaaggatagcgacgaagccgtgacatatagcctgggaaagtttgggcagagggccctggatttctacagcattcatgtgaccaaggagtccacccaccccgtgaagcccctggcccagatcgccggaaacagatacgcctccggacctgtgggaaaggccctgagcgacgcatgtatgggcacaatcgcctccttcctgtctaagtaccaggacatcatcatcgaacaccagaaggtggtgaagggcaaccagaagagactggagagcctgcgggagctggccggcaaggaaaacctggaataccctagcgtgaccctgccacctcagcctcacaccaaggagggcgttgatgcctacaacgaagtgatcgcccgggtgcgaatgtgggtgaacctgaacctgtggcagaagctgaagctaagcagagatgatgccaagcctctgctgagactgaagggattcccttcctttcctctggtcgagagacaggccaacgaagtggactggtgggacatggtgtgtaacgtgaagaagctgatcaacgagaaaaaggaggatggcaaggtgttttggcagaatctggctggctacaagagacaggaagccctgagaccatacctgagcagcgaggaagatcggaagaagggaaagaaattcgctcggtaccagctgggcgacctgctgctgcacctggaaaagaagcacggcgaggactggggaaaggtgtacgacgaggcctgggagcggattgacaagaaagtggaaggcctgagcaagcacatcaagctggaagaggaacggagaagcgaggacgcccagagcaaggccgccctgaccgactggctgcgggctaaggccagcttcgtgatcgagggcctgaaggaggccgacaaggacgagttctgcagatgcgagctgaagctgcagaagtggtacggggacctgcggggaaagcccttcgccatcgaagccgagaacagcatcctggacatcagcggcttcagcaagcagtacaactgtgccttcatctggcagaaggacggcgtgaagaagctgaacctgtacctgatcatcaactacttcaagggcggcaagctgcggttcaagaagatcaaacctgaagccttcgaagccaacagattctacaccgtgatcaacaaaaagagcggcgagatcgtgcccatggaggtgaacttcaacttcgacgaccccaacctgatcatcctgcctctggcctttggcaagagacagggcagagaattcatctggaacgacctgctgtccctggaaaccggcagcctgaagctggccaacggaagagtgatcgagaagacactgtacaacagaagaacccggcaggatgagcctgccctgttcgtggccctgaccttcgagcggcgggaggtcctggactcctccaatatcaaaccaatgaacctgatcggcgtggcaagaggcgaaaacatccccgccgtgatcgccctgaccgaccccgagggctgcccactgagccggtttaaggatagcctgggaaacccaacccacatcctgagaatcggcgagagctataaggagaagcagcggaccatccaggccaagaaggaggtggagcagcggagagccggcggctacagccggaagtacgccagcaaagccaagaatctggcagacgatatggtgagaaacaccgctagagatctgctgtactacgccgtgacccaggatgccatgctgatcttcgccaacctgagccggggcttcggccggcagggcaagcggaccttcatggccgagagacagtacacacggatggaggactggctgaccgccaagctggcctacgagggcctgagcaagacctacctgtccaagacactggcccagtacacctccaagacatgcagcaactgtgggtttaccatcaccagcgccgactacgacagggtgctggagaagctgaagaagacagcaacaggctggatgaccacaattaacggcaaggagctgaaggtggagggccagattacctactacaacagatacaagagacagaacgtagtcaaggacctgtccgtcgagctggatagactgagcgaagaatctgtgaacaacgacatctcctcctggacaaagggcagaagcggagaagctctgagcctcctgaagaaaagattctcccatagacccgtgcaggagaagttcgtgtgcctgaactgcggcttcgagacacacgcagccgagcaagccgccctgaacatcgccagatcctggctgttcctgcggagccaggagtacaagaaataccagacaaacaagacaaccggcaacaccgataagagagccttcgtcgagacctggcagtccttttaccggaagaagcttaaggaggtgtggaaacctgccgtgcggtctggcggatctggcggaggctcccaggcccaggagaccctgaccttcgaggacgtggccgtggacttcacctgggaggagtggcagctgctggcccccccccagaaggacctgtacagggacgtgatgctggagaactacagcaacctgctgagcgtgggcttccaggccagcaagcccaacgtgctgagcaagctgggccagggcgagccctggaccatggaggacgagatccactgccagaccaggagcgagatctggaaggtgggcggcccaagcagcggcgcccctcctcccagcggcggcagcccagccggctccccaacctctaccgaggagggcacctctgagtccgccacccccgagagcggccctggcacctccaccgagcccagcgagggcagcgcacccggcagccctgccggcagccccacctccacagaggagggaaccagcaccgagcccagcgaaggcagcgccccaggcaccagcaccgagcctagtgagcaggagattaaacggatcaacaagatcagaagaagacttgtgaaagacagcaacaccaagaaggccggcaagacaggccccatgaaaaccctgctggttagagtgatgacacccgatctgagagagcggctggaaaacctgagaaagaagcctgaaaatatcccccagcccatcagcaatacatctagagccaacctgaataagctgctgaccgattacaccgaaatgaagaaggcgatcctgcatgtgtactgggaagagttccagaaggaccctgtgggcctgatgagccgggtggcccagcctgccagcaagaagatcgatcagaacaagctgaaacctgagatggacgagaagggcaacctgaccaccgccggctttgcctgctctcagtgtggccagcccctgttcgtgtacaagctggagcaggtgtctgagaagggcaaggcttacaccaactacttcggacggtgcaatgtggccgagcacgaaaagctgatcctgctggcccagctgaagcccgagaaggatagcgacgaagccgtgacatatagcctgggaaagtttgggcagagggccctggatttctacagcattcatgtgaccaaggagtccacccaccccgtgaagcccctggcccagatcgccggaaacagatacgcctccggacctgtgggaaaggccctgagcgacgcatgtatgggcacaatcgcctccttcctgtctaagtaccaggacatcatcatcgaacaccagaaggtggtgaagggcaaccagaagagactggagagcctgcgggagctggccggcaaggaaaacctggaataccctagcgtgaccctgccacctcagcctcacaccaaggagggcgttgatgcctacaacgaagtgatcgcccgggtgcgaatgtgggtgaacctgaacctgtggcagaagctgaagctaagcagagatgatgccaagcctctgctgagactgaagggattcccttcctttcctctggtcgagagacaggccaacgaagtggactggtgggacatggtgtgtaacgtgaagaagctgatcaacgagaaaaaggaggatggcaaggtgttttggcagaatctggctggctacaagagacaggaagccctgagaccatacctgagcagcgaggaagatcggaagaagggaaagaaattcgctcggtaccagctgggcgacctgctgctgcacctggaaaagaagcacggcgaggactggggaaaggtgtacgacgaggcctgggagcggattgacaagaaagtggaaggcctgagcaagcacatcaagctggaagaggaacggagaagcgaggacgcccagagcaaggccgccctgaccgactggctgcgggctaaggccagcttcgtgatcgagggcctgaaggaggccgacaaggacgagttctgcagatgcgagctgaagctgcagaagtggtacggggacctgcggggaaagcccttcgccatcgaagccgagaacagcatcctggacatcagcggcttcagcaagcagtacaactgtgccttcatctggcagaaggacggcgtgaagaagctgaacctgtacctgatcatcaactacttcaagggcggcaagctgcggttcaagaagatcaaacctgaagccttcgaagccaacagattctacaccgtgatcaacaaaaagagcggcgagatcgtgcccatggaggtgaacttcaacttcgacgaccccaacctgatcatcctgcctctggcctttggcaagagacagggcagagaattcatctggaacgacctgctgtccctggaaaccggcagcctgaagctggccaacggaagagtgatcgagaagacactgtacaacagaagaacccggcaggatgagcctgccctgttcgtggccctgaccttcgagcggcgggaggtcctggactcctccaatatcaaaccaatgaacctgatcggcgtggcaagaggcgaaaacatccccgccgtgatcgccctgaccgaccccgagggctgcccactgagccggtttaaggatagcctgggaaacccaacccacatcctgagaatcggcgagagctataaggagaagcagcggaccatccaggccaagaaggaggtggagcagcggagagccggcggctacagccggaagtacgccagcaaagccaagaatctggcagacgatatggtgagaaacaccgctagagatctgctgtactacgccgtgacccaggatgccatgctgatcttcgccaacctgagccggggcttcggccggcagggcaagcggaccttcatggccgagagacagtacacacggatggaggactggctgaccgccaagctggcctacgagggcctgagcaagacctacctgtccaagacactggcccagtacacctccaagacatgcagcaactgtgggtttaccatcaccagcgccgactacgacagggtgctggagaagctgaagaagacagcaacaggctggatgaccacaattaacggcaaggagctgaaggtggagggccagattacctactacaacagatacaagagacagaacgtagtcaaggacctgtccgtcgagctggatagactgagcgaagaatctgtgaacaacgacatctcctcctggacaaagggcagaagcggagaagctctgagcctcctgaagaaaagattctcccatagacccgtgcaggagaagttcgtgtgcctgaactgcggcttcgagacacacgcagccgagcaagccgccctgaacatcgccagatcctggctgttcctgcggagccaggagtacaagaaataccagacaaacaagacaaccggcaacaccgataagagagccttcgtcgagacctggcagtccttttaccggaagaagcttaaggaggtgtggaaacctgccgtgcggtctggcggatctggcggaggctcctcaggcccaggagaccctgaccttcgaggacgtggccgtggacttcacctgggaggagtggcagctgctggcccccccccagaaggacctgtacagggacgtgatgctggagaactacagcaacctgctgagcgtgggcttccaggccagcaagcccaacgtgctgagcaagctgggccagggcgagccctggaccatggaggacgagatccactgccagaccaggagcgagatctggaaggtgggatctggctccggcagcggccccaagaaaaagagaaaagtctaagctgccttctgcggggcttgccttctggccatgcccttcttctctcccttgcacctgtacctcttggtctttgaataaagcctgagtaggaaggctagcaaaaaaaaaaaaaaaaaaaaaaaaaaaaaaaaaaaaaaaaaaaaaaaaaaaaaaaaaaaaaaaaaaaaaaaaaaaaaaaa

SEQ ID NO: 16740 - RNA, 9485 nt, synthetic construct
  source 1..9485: mol_type = other RNA
aggaaataagagagaaaagaagagtaagaagaaatataagagccaccatggcccctaagaagaagcgtaaagtgagccggatggaacgcctcgtctacgaggtgcggcagaagtgcagaaacatcgaggacatctgcatctcctgcggatctctgaacgtgaccctggagcacccactgttcatcggcggcatgtgccagaactgtaaaaactgttttctggagtgtgcctatcaatacgacgatgacggctaccagagctactgcaccatctgttgcggcggaagagaggtgctgatgtgtggaaataacaactgctgccggtgcttctgcgtggaatgcgtggacctgctggtgggccccggcgccgcccaggccgctattaaggaagatccttggaactgctacatgtgcggccacaagggcacatacggcctgctgagacggagagaggactggcctagcagactgcagatgttcttcgccaataaccacgaccaggagttcgacccccctaaggtgtaccctcccgtccccgccgagaagagaaagcccatccgggtcctgagcctgttcgatggcatcgccaccggtctgctggtgctgaaggacctgggcatccaggtggataggtacattgcctccgaggtgtgcgaggactccatcaccgtgggaatggtgcgtcatcagggcaagatcatgtacgtgggcgacgtgcggagcgtgacacagaagcatatccaggagtggggccctttcgacctggtgatcggcggcagcccttgcaatgacctgagcatcgtgaacccagcccggaagggcctgtacgagggaaccggcagactgttcttcgagttttacagactgctgcacgacgcccggcctaaggaaggcgacgaccggcccttcttttggctgttcgagaatgtggtggccatgggagtcagcgacaagcgggatattagccggttcctggagagcaaccccgtgatgatcgatgccaaggaagtgagcgccgcccaccgggccagatacttctggggcaatctgcctggcatgaacagacccctggccagcaccgtgaacgacaagctggagctgcaggagtgcctggagcacggccggatcgccaagttcagcaaggtgagaaccatcaccacccgaagcaacagcatcaaacaaggcaaggaccagcactttcctgtgttcatgaacgagaaggaggacatcctgtggtgtaccgagatggagagagtgttcgggttcccagtccactacacagatgtcagcaacatgtctagactggccagacagagactgctgggaagaagctggtccgtccctgtgatcagacacctgttcgcccctctgaaggagtacttcgcctgcgtgagcagcggcaacagcaacgccaacagccggggccccagcttctctagcggcctggtgccactgtccctgagagggagccacatgggccccatggagatctacaaaaccgtgagcgcctggaagcggcagcctgtgcgcgtgctgagcctgtttcggaatatcgataaagtcctgaaaagcctgggattcctggagagcggctctggctccggcggtggcaccctgaagtacgtggaggatgtgacaaacgtggtcagacgggatgtggagaagtggggccccttcgatctggtgtacggcagcacccaacccctgggcagctcttgtgaccggtgccctggctggtacatgtttcagttccaccggatcctgcagtacgccctgccgagacaggagtcccagcggccattcttttggattttcatggacaacttgctgctgaccgaggatgaccaggaaactaccactcggttcctgcagaccgaagccgtgaccctgcaggacgtgagaggccgggactaccagaacgccatgcgggtgtggtccaacatccctggactgaaaagcaagcacgcacctctgacccctaaagaagaggagtacctgcaggcccaggtgcggagcagaagcaagctggacgcccctaaggtggatctgctggtgaagaattgcctcctgcccctgagagagtacttcaagtatttcagccagaatagtctgcccctgggaggcagcggcggcggcgccctggtgacatttgaggacgtcgccgtgcggttcacccaggaggaatgggctctgctggatccttctcagaaaatcctgtaccgggacgtgatgagagagacataccggaatctgacctccgtgggcatcaactgggaatgttgggaccttgaagcctgcttcagaagcctgggaagaaacctgagagtgcaggtggtgaagagaaagtgcgagctgaccaacagcggcccctgcgccgagggcggcccaagcagcggcgcccctcctcccagcggcggcagcccagccggctccccaacctctaccgaggagggcacctctgagtccgccacccccgagagcggccctggcacctccaccgagcccagcgagggcagcgcacccggcagccctgccggcagccccacctccacagaggagggaaccagcaccgagcccagcgaaggcagcgccccaggcaccagcaccgagcctagtgagcaggagattaaacggatcaacaagatcagaagaagacttgtgaaagacagcaacaccaagaaggccggcaagacaggccccatgaaaaccctgctggttagagtgatgacacccgatctgagagagcggctggaaaacctgagaaagaagcctgaaaatatcccccagcccatcagcaatacatctagagccaacctgaataagctgctgaccgattacaccgaaatgaagaaggcgatcctgcatgtgtactgggaagagttccagaaggaccctgtgggcctgatgagccgggtggcccagcctgccagcaagaagatcgatcagaacaagctgaaacctgagatggacgagaagggcaacctgaccaccgccggctttgcctgctctcagtgtggccagcccctgttcgtgtacaagctggagcaggtgtctgagaagggcaaggcttacaccaactacttcggacggtgcaatgtggccgagcacgaaaagctgatcctgctggcccagctgaagcccgagaaggatagcgacgaagccgtgacatatagcctgggaaagtttgggcagagggccctggatttctacagcattcatgtgaccaaggagtccacccaccccgtgaagcccctggcccagatcgccggaaacagatacgcctccggacctgtgggaaaggccctgagcgacgcatgtatgggcacaatcgcctccttcctgtctaagtaccaggacatcatcatcgaacaccagaaggtggtgaagggcaaccagaagagactggagagcctgcgggagctggccggcaaggaaaacctggaataccctagcgtgaccctgccacctcagcctcacaccaaggagggcgttgatgcctacaacgaagtgatcgcccgggtgcgaatgtgggtgaacctgaacctgtggcagaagctgaagctaagcagagatgatgccaagcctctgctgagactgaagggattcccttcctttcctctggtcgagagacaggccaacgaagtggactggtgggacatggtgtgtaacgtgaagaagctgatcaacgagaaaaaggaggatggcaaggtgttttggcagaatctggctggctacaagagacaggaagccctgagaccatacctgagcagcgaggaagatcggaagaagggaaagaaattcgctcggtaccagctgggcgacctgctgctgcacctggaaaagaagcacggcgaggactggggaaaggtgtacgacgaggcctgggagcggattgacaagaaagtggaaggcctgagcaagcacatcaagctggaagaggaacggagaagcgaggacgcccagagcaaggccgccctgaccgactggctgcgggctaaggccagcttcgtgatcgagggcctgaaggaggccgacaaggacgagttctgcagatgcgagctgaagctgcagaagtggtacggggacctgcggggaaagcccttcgccatcgaagccgagaacagcatcctggacatcagcggcttcagcaagcagtacaactgtgccttcatctggcagaaggacggcgtgaagaagctgaacctgtacctgatcatcaactacttcaagggcggcaagctgcggttcaagaagatcaaacctgaagccttcgaagccaacagattctacaccgtgatcaacaaaaagagcggcgagatcgtgcccatggaggtgaacttcaacttcgacgaccccaacctgatcatcctgcctctggcctttggcaagagacagggcagagaattcatctggaacgacctgctgtccctggaaaccggcagcctgaagctggccaacggaagagtgatcgagaagacactgtacaacagaagaacccggcaggatgagcctgccctgttcgtggccctgaccttcgagcggcgggaggtcctggactcctccaatatcaaaccaatgaacctgatcggcgtggcaagaggcgaaaacatccccgccgtgatcgccctgaccgaccccgagggctgcccactgagccggtttaaggatagcctgggaaacccaacccacatcctgagaatcggcgagagctataaggagaagcagcggaccatccaggccaagaaggaggtggagcagcggagagccggcggctacagccggaagtacgccagcaaagccaagaatctggcagacgatatggtgagaaacaccgctagagatctgctgtactacgccgtgacccaggatgccatgctgatcttcgccaacctgagccggggcttcggccggcagggcaagcggaccttcatggccgagagacagtacacacggatggaggactggctgaccgccaagctggcctacgagggcctgagcaagacctacctgtccaagacactggcccagtacacctccaagacatgcagcaactgtgggtttaccatcaccagcgccgactacgacagggtgctggagaagctgaagaagacagcaacaggctggatgaccacaattaacggcaaggagctgaaggtggagggccagattacctactacaacagatacaagagacagaacgtagtcaaggacctgtccgtcgagctggatagactgagcgaagaatctgtgaacaacgacatctcctcctggacaaagggcagaagcggagaagctctgagcctcctgaagaaaagattctcccatagacccgtgcaggagaagttcgtgtgcctgaactgcggcttcgagacacacgcagccgagcaagccgccctgaacatcgccagatcctggctgttcctgcggagccaggagtacaagaaataccagacaaacaagacaaccggcaacaccgataagagagccttcgtcgagacctggcagtccttttaccggaagaagcttaaggaggtgtggaaacctgccgtgcggtctggcggatctggcggaggctccccccagggcagcctgaccttcagggacgtggccatcgagttcagccaggaggagtggaagtgcctggaccccatccagaaggccctgtacagggacgtgatgctggagaactacaggaacctgggcttcctgggcctgtgcctgcccgacctgaacatcatcagcatgctggaggagggcaaggagccctggaccgtggtgagccaggtgaagatcgccaggaaccccaactggggcgagtgcggcggcccaagcagcggcgcccctcctcccagcggcggcagcccagccggctccccaacctctaccgaggagggcacctctgagtccgccacccccgagagcggccctggcacctccaccgagcccagcgagggcagcgcacccggcagccctgccggcagccccacctccacagaggagggaaccagcaccgagcccagcgaaggcagcgccccaggcaccagcaccgagcctagtgagcaggagattaaacggatcaacaagatcagaagaagacttgtgaaagacagcaacaccaagaaggccggcaagacaggccccatgaaaaccctgctggttagagtgatgacacccgatctgagagagcggctggaaaacctgagaaagaagcctgaaaatatcccccagcccatcagcaatacatctagagccaacctgaataagctgctgaccgattacaccgaaatgaagaaggcgatcctgcatgtgtactgggaagagttccagaaggaccctgtgggcctgatgagccgggtggcccagcctgccagcaagaagatcgatcagaacaagctgaaacctgagatggacgagaagggcaacctgaccaccgccggctttgcctgctctcagtgtggccagcccctgttcgtgtacaagctggagcaggtgtctgagaagggcaaggcttacaccaactacttcggacggtgcaatgtggccgagcacgaaaagctgatcctgctggcccagctgaagcccgagaaggatagcgacgaagccgtgacatatagcctgggaaagtttgggcagagggccctggatttctacagcattcatgtgaccaaggagtccacccaccccgtgaagcccctggcccagatcgccggaaacagatacgcctccggacctgtgggaaaggccctgagcgacgcatgtatgggcacaatcgcctccttcctgtctaagtaccaggacatcatcatcgaacaccagaaggtggtgaagggcaaccagaagagactggagagcctgcgggagctggccggcaaggaaaacctggaataccctagcgtgaccctgccacctcagcctcacaccaaggagggcgttgatgcctacaacgaagtgatcgcccgggtgcgaatgtgggtgaacctgaacctgtggcagaagctgaagctaagcagagatgatgccaagcctctgctgagactgaagggattcccttcctttcctctggtcgagagacaggccaacgaagtggactggtgggacatggtgtgtaacgtgaagaagctgatcaacgagaaaaaggaggatggcaaggtgttttggcagaatctggctggctacaagagacaggaagccctgagaccatacctgagcagcgaggaagatcggaagaagggaaagaaattcgctcggtaccagctgggcgacctgctgctgcacctggaaaagaagcacggcgaggactggggaaaggtgtacgacgaggcctgggagcggattgacaagaaagtggaaggcctgagcaagcacatcaagctggaagaggaacggagaagcgaggacgcccagagcaaggccgccctgaccgactggctgcgggctaaggccagcttcgtgatcgagggcctgaaggaggccgacaaggacgagttctgcagatgcgagctgaagctgcagaagtggtacggggacctgcggggaaagcccttcgccatcgaagccgagaacagcatcctggacatcagcggcttcagcaagcagtacaactgtgccttcatctggcagaaggacggcgtgaagaagctgaacctgtacctgatcatcaactacttcaagggcggcaagctgcggttcaagaagatcaaacctgaagccttcgaagccaacagattctacaccgtgatcaacaaaaagagcggcgagatcgtgcccatggaggtgaacttcaacttcgacgaccccaacctgatcatcctgcctctggcctttggcaagagacagggcagagaattcatctggaacgacctgctgtccctggaaaccggcagcctgaagctggccaacggaagagtgatcgagaagacactgtacaacagaagaacccggcaggatgagcctgccctgttcgtggccctgaccttcgagcggcgggaggtcctggactcctccaatatcaaaccaatgaacctgatcggcgtggcaagaggcgaaaacatccccgccgtgatcgccctgaccgaccccgagggctgcccactgagccggtttaaggatagcctgggaaacccaacccacatcctgagaatcggcgagagctataaggagaagcagcggaccatccaggccaagaaggaggtggagcagcggagagccggcggctacagccggaagtacgccagcaaagccaagaatctggcagacgatatggtgagaaacaccgctagagatctgctgtactacgccgtgacccaggatgccatgctgatcttcgccaacctgagccggggcttcggccggcagggcaagcggaccttcatggccgagagacagtacacacggatggaggactggctgaccgccaagctggcctacgagggcctgagcaagacctacctgtccaagacactggcccagtacacctccaagacatgcagcaactgtgggtttaccatcaccagcgccgactacgacagggtgctggagaagctgaagaagacagcaacaggctggatgaccacaattaacggcaaggagctgaaggtggagggccagattacctactacaacagatacaagagacagaacgtagtcaaggacctgtccgtcgagctggatagactgagcgaagaatctgtgaacaacgacatctcctcctggacaaagggcagaagcggagaagctctgagcctcctgaagaaaagattctcccatagacccgtgcaggagaagttcgtgtgcctgaactgcggcttcgagacacacgcagccgagcaagccgccctgaacatcgccagatcctggctgttcctgcggagccaggagtacaagaaataccagacaaacaagacaaccggcaacaccgataagagagccttcgtcgagacctggcagtccttttaccggaagaagcttaaggaggtgtggaaacctgccgtgcggtctggcggatctggcggaggctcctccccagggcagcctgaccttcagggacgtggccatcgagttcagccaggaggagtggaagtgcctggaccccatccagaaggccctgtacagggacgtgatgctggagaactacaggaacctgggcttcctgggcctgtgcctgcccgacctgaacatcatcagcatgctggaggagggcaaggagccctggaccgtggtgagccaggtgaagatcgccaggaaccccaactggggcgagtgcggatctggctccggcagcggccccaagaaaaagagaaaagtctaagctgccttctgcggggcttgccttctggccatgcccttcttctctcccttgcacctgtacctcttggtctttgaataaagcctgagtaggaaggctagcaaaaaaaaaaaaaaaaaaaaaaaaaaaaaaaaaaaaaaaaaaaaaaaaaaaaaaaaaaaaaaaaaaaaaaaaaaaaaaaa

SEQ ID NO: 16741 - RNA, 9503 nt, synthetic construct
  source 1..9503: mol_type = other RNA
aggaaataagagagaaaagaagagtaagaagaaatataagagccaccatggcccctaagaagaagcgtaaagtgagccggatggaacgcctcgtctacgaggtgcggcagaagtgcagaaacatcgaggacatctgcatctcctgcggatctctgaacgtgaccctggagcacccactgttcatcggcggcatgtgccagaactgtaaaaactgttttctggagtgtgcctatcaatacgacgatgacggctaccagagctactgcaccatctgttgcggcggaagagaggtgctgatgtgtggaaataacaactgctgccggtgcttctgcgtggaatgcgtggacctgctggtgggccccggcgccgcccaggccgctattaaggaagatccttggaactgctacatgtgcggccacaagggcacatacggcctgctgagacggagagaggactggcctagcagactgcagatgttcttcgccaataaccacgaccaggagttcgacccccctaaggtgtaccctcccgtccccgccgagaagagaaagcccatccgggtcctgagcctgttcgatggcatcgccaccggtctgctggtgctgaaggacctgggcatccaggtggataggtacattgcctccgaggtgtgcgaggactccatcaccgtgggaatggtgcgtcatcagggcaagatcatgtacgtgggcgacgtgcggagcgtgacacagaagcatatccaggagtggggccctttcgacctggtgatcggcggcagcccttgcaatgacctgagcatcgtgaacccagcccggaagggcctgtacgagggaaccggcagactgttcttcgagttttacagactgctgcacgacgcccggcctaaggaaggcgacgaccggcccttcttttggctgttcgagaatgtggtggccatgggagtcagcgacaagcgggatattagccggttcctggagagcaaccccgtgatgatcgatgccaaggaagtgagcgccgcccaccgggccagatacttctggggcaatctgcctggcatgaacagacccctggccagcaccgtgaacgacaagctggagctgcaggagtgcctggagcacggccggatcgccaagttcagcaaggtgagaaccatcaccacccgaagcaacagcatcaaacaaggcaaggaccagcactttcctgtgttcatgaacgagaaggaggacatcctgtggtgtaccgagatggagagagtgttcgggttcccagtccactacacagatgtcagcaacatgtctagactggccagacagagactgctgggaagaagctggtccgtccctgtgatcagacacctgttcgcccctctgaaggagtacttcgcctgcgtgagcagcggcaacagcaacgccaacagccggggccccagcttctctagcggcctggtgccactgtccctgagagggagccacatgggccccatggagatctacaaaaccgtgagcgcctggaagcggcagcctgtgcgcgtgctgagcctgtttcggaatatcgataaagtcctgaaaagcctgggattcctggagagcggctctggctccggcggtggcaccctgaagtacgtggaggatgtgacaaacgtggtcagacgggatgtggagaagtggggccccttcgatctggtgtacggcagcacccaacccctgggcagctcttgtgaccggtgccctggctggtacatgtttcagttccaccggatcctgcagtacgccctgccgagacaggagtcccagcggccattcttttggattttcatggacaacttgctgctgaccgaggatgaccaggaaactaccactcggttcctgcagaccgaagccgtgaccctgcaggacgtgagaggccgggactaccagaacgccatgcgggtgtggtccaacatccctggactgaaaagcaagcacgcacctctgacccctaaagaagaggagtacctgcaggcccaggtgcggagcagaagcaagctggacgcccctaaggtggatctgctggtgaagaattgcctcctgcccctgagagagtacttcaagtatttcagccagaatagtctgcccctgggaggcagcggcggcggcgccctggtgacatttgaggacgtcgccgtgcggttcacccaggaggaatgggctctgctggatccttctcagaaaatcctgtaccgggacgtgatgagagagacataccggaatctgacctccgtgggcatcaactgggaatgttgggaccttgaagcctgcttcagaagcctgggaagaaacctgagagtgcaggtggtgaagagaaagtgcgagctgaccaacagcggcccctgcgccgagggcggcccaagcagcggcgcccctcctcccagcggcggcagcccagccggctccccaacctctaccgaggagggcacctctgagtccgccacccccgagagcggccctggcacctccaccgagcccagcgagggcagcgcacccggcagccctgccggcagccccacctccacagaggagggaaccagcaccgagcccagcgaaggcagcgccccaggcaccagcaccgagcctagtgagcaggagattaaacggatcaacaagatcagaagaagacttgtgaaagacagcaacaccaagaaggccggcaagacaggccccatgaaaaccctgctggttagagtgatgacacccgatctgagagagcggctggaaaacctgagaaagaagcctgaaaatatcccccagcccatcagcaatacatctagagccaacctgaataagctgctgaccgattacaccgaaatgaagaaggcgatcctgcatgtgtactgggaagagttccagaaggaccctgtgggcctgatgagccgggtggcccagcctgccagcaagaagatcgatcagaacaagctgaaacctgagatggacgagaagggcaacctgaccaccgccggctttgcctgctctcagtgtggccagcccctgttcgtgtacaagctggagcaggtgtctgagaagggcaaggcttacaccaactacttcggacggtgcaatgtggccgagcacgaaaagctgatcctgctggcccagctgaagcccgagaaggatagcgacgaagccgtgacatatagcctgggaaagtttgggcagagggccctggatttctacagcattcatgtgaccaaggagtccacccaccccgtgaagcccctggcccagatcgccggaaacagatacgcctccggacctgtgggaaaggccctgagcgacgcatgtatgggcacaatcgcctccttcctgtctaagtaccaggacatcatcatcgaacaccagaaggtggtgaagggcaaccagaagagactggagagcctgcgggagctggccggcaaggaaaacctggaataccctagcgtgaccctgccacctcagcctcacaccaaggagggcgttgatgcctacaacgaagtgatcgcccgggtgcgaatgtgggtgaacctgaacctgtggcagaagctgaagctaagcagagatgatgccaagcctctgctgagactgaagggattcccttcctttcctctggtcgagagacaggccaacgaagtggactggtgggacatggtgtgtaacgtgaagaagctgatcaacgagaaaaaggaggatggcaaggtgttttggcagaatctggctggctacaagagacaggaagccctgagaccatacctgagcagcgaggaagatcggaagaagggaaagaaattcgctcggtaccagctgggcgacctgctgctgcacctggaaaagaagcacggcgaggactggggaaaggtgtacgacgaggcctgggagcggattgacaagaaagtggaaggcctgagcaagcacatcaagctggaagaggaacggagaagcgaggacgcccagagcaaggccgccctgaccgactggctgcgggctaaggccagcttcgtgatcgagggcctgaaggaggccgacaaggacgagttctgcagatgcgagctgaagctgcagaagtggtacggggacctgcggggaaagcccttcgccatcgaagccgagaacagcatcctggacatcagcggcttcagcaagcagtacaactgtgccttcatctggcagaaggacggcgtgaagaagctgaacctgtacctgatcatcaactacttcaagggcggcaagctgcggttcaagaagatcaaacctgaagccttcgaagccaacagattctacaccgtgatcaacaaaaagagcggcgagatcgtgcccatggaggtgaacttcaacttcgacgaccccaacctgatcatcctgcctctggcctttggcaagagacagggcagagaattcatctggaacgacctgctgtccctggaaaccggcagcctgaagctggccaacggaagagtgatcgagaagacactgtacaacagaagaacccggcaggatgagcctgccctgttcgtggccctgaccttcgagcggcgggaggtcctggactcctccaatatcaaaccaatgaacctgatcggcgtggcaagaggcgaaaacatccccgccgtgatcgccctgaccgaccccgagggctgcccactgagccggtttaaggatagcctgggaaacccaacccacatcctgagaatcggcgagagctataaggagaagcagcggaccatccaggccaagaaggaggtggagcagcggagagccggcggctacagccggaagtacgccagcaaagccaagaatctggcagacgatatggtgagaaacaccgctagagatctgctgtactacgccgtgacccaggatgccatgctgatcttcgccaacctgagccggggcttcggccggcagggcaagcggaccttcatggccgagagacagtacacacggatggaggactggctgaccgccaagctggcctacgagggcctgagcaagacctacctgtccaagacactggcccagtacacctccaagacatgcagcaactgtgggtttaccatcaccagcgccgactacgacagggtgctggagaagctgaagaagacagcaacaggctggatgaccacaattaacggcaaggagctgaaggtggagggccagattacctactacaacagatacaagagacagaacgtagtcaaggacctgtccgtcgagctggatagactgagcgaagaatctgtgaacaacgacatctcctcctggacaaagggcagaagcggagaagctctgagcctcctgaagaaaagattctcccatagacccgtgcaggagaagttcgtgtgcctgaactgcggcttcgagacacacgcagccgagcaagccgccctgaacatcgccagatcctggctgttcctgcggagccaggagtacaagaaataccagacaaacaagacaaccggcaacaccgataagagagccttcgtcgagacctggcagtccttttaccggaagaagcttaaggaggtgtggaaacctgccgtgcggtctggcggatctggcggaggctccgtgacctacaacgacgtgcacatcgacttcacctgggaggagtggaccctgctggacctgagccagaagaacctgtacaaggacgtgatgctggagacctactggaacctgctgaccatcggctacagctgggaggaccacaacatcgaggagcactgccagagcagcaggaggtacgagaggcacgagaggagccaggccggcgagaagcccagcatctacacccagtgcatcaaggccttcgagcacctgggcggcccaagcagcggcgcccctcctcccagcggcggcagcccagccggctccccaacctctaccgaggagggcacctctgagtccgccacccccgagagcggccctggcacctccaccgagcccagcgagggcagcgcacccggcagccctgccggcagccccacctccacagaggagggaaccagcaccgagcccagcgaaggcagcgccccaggcaccagcaccgagcctagtgagcaggagattaaacggatcaacaagatcagaagaagacttgtgaaagacagcaacaccaagaaggccggcaagacaggccccatgaaaaccctgctggttagagtgatgacacccgatctgagagagcggctggaaaacctgagaaagaagcctgaaaatatcccccagcccatcagcaatacatctagagccaacctgaataagctgctgaccgattacaccgaaatgaagaaggcgatcctgcatgtgtactgggaagagttccagaaggaccctgtgggcctgatgagccgggtggcccagcctgccagcaagaagatcgatcagaacaagctgaaacctgagatggacgagaagggcaacctgaccaccgccggctttgcctgctctcagtgtggccagcccctgttcgtgtacaagctggagcaggtgtctgagaagggcaaggcttacaccaactacttcggacggtgcaatgtggccgagcacgaaaagctgatcctgctggcccagctgaagcccgagaaggatagcgacgaagccgtgacatatagcctgggaaagtttgggcagagggccctggatttctacagcattcatgtgaccaaggagtccacccaccccgtgaagcccctggcccagatcgccggaaacagatacgcctccggacctgtgggaaaggccctgagcgacgcatgtatgggcacaatcgcctccttcctgtctaagtaccaggacatcatcatcgaacaccagaaggtggtgaagggcaaccagaagagactggagagcctgcgggagctggccggcaaggaaaacctggaataccctagcgtgaccctgccacctcagcctcacaccaaggagggcgttgatgcctacaacgaagtgatcgcccgggtgcgaatgtgggtgaacctgaacctgtggcagaagctgaagctaagcagagatgatgccaagcctctgctgagactgaagggattcccttcctttcctctggtcgagagacaggccaacgaagtggactggtgggacatggtgtgtaacgtgaagaagctgatcaacgagaaaaaggaggatggcaaggtgttttggcagaatctggctggctacaagagacaggaagccctgagaccatacctgagcagcgaggaagatcggaagaagggaaagaaattcgctcggtaccagctgggcgacctgctgctgcacctggaaaagaagcacggcgaggactggggaaaggtgtacgacgaggcctgggagcggattgacaagaaagtggaaggcctgagcaagcacatcaagctggaagaggaacggagaagcgaggacgcccagagcaaggccgccctgaccgactggctgcgggctaaggccagcttcgtgatcgagggcctgaaggaggccgacaaggacgagttctgcagatgcgagctgaagctgcagaagtggtacggggacctgcggggaaagcccttcgccatcgaagccgagaacagcatcctggacatcagcggcttcagcaagcagtacaactgtgccttcatctggcagaaggacggcgtgaagaagctgaacctgtacctgatcatcaactacttcaagggcggcaagctgcggttcaagaagatcaaacctgaagccttcgaagccaacagattctacaccgtgatcaacaaaaagagcggcgagatcgtgcccatggaggtgaacttcaacttcgacgaccccaacctgatcatcctgcctctggcctttggcaagagacagggcagagaattcatctggaacgacctgctgtccctggaaaccggcagcctgaagctggccaacggaagagtgatcgagaagacactgtacaacagaagaacccggcaggatgagcctgccctgttcgtggccctgaccttcgagcggcgggaggtcctggactcctccaatatcaaaccaatgaacctgatcggcgtggcaagaggcgaaaacatccccgccgtgatcgccctgaccgaccccgagggctgcccactgagccggtttaaggatagcctgggaaacccaacccacatcctgagaatcggcgagagctataaggagaagcagcggaccatccaggccaagaaggaggtggagcagcggagagccggcggctacagccggaagtacgccagcaaagccaagaatctggcagacgatatggtgagaaacaccgctagagatctgctgtactacgccgtgacccaggatgccatgctgatcttcgccaacctgagccggggcttcggccggcagggcaagcggaccttcatggccgagagacagtacacacggatggaggactggctgaccgccaagctggcctacgagggcctgagcaagacctacctgtccaagacactggcccagtacacctccaagacatgcagcaactgtgggtttaccatcaccagcgccgactacgacagggtgctggagaagctgaagaagacagcaacaggctggatgaccacaattaacggcaaggagctgaaggtggagggccagattacctactacaacagatacaagagacagaacgtagtcaaggacctgtccgtcgagctggatagactgagcgaagaatctgtgaacaacgacatctcctcctggacaaagggcagaagcggagaagctctgagcctcctgaagaaaagattctcccatagacccgtgcaggagaagttcgtgtgcctgaactgcggcttcgagacacacgcagccgagcaagccgccctgaacatcgccagatcctggctgttcctgcggagccaggagtacaagaaataccagacaaacaagacaaccggcaacaccgataagagagccttcgtcgagacctggcagtccttttaccggaagaagcttaaggaggtgtggaaacctgccgtgcggtctggcggatctggcggaggctcctgtgacctacaacgacgtgcacatcgacttcacctgggaggagtggaccctgctggacctgagccagaagaacctgtacaaggacgtgatgctggagacctactggaacctgctgaccatcggctacagctgggaggaccacaacatcgaggagcactgccagagcagcaggaggtacgagaggcacgagaggagccaggccggcgagaagcccagcatctacacccagtgcatcaaggccttcgagcacctgggatctggctccggcagcggccccaagaaaaagagaaaagtctaagctgccttctgcggggcttgccttctggccatgcccttcttctctcccttgcacctgtacctcttggtctttgaataaagcctgagtaggaaggctagcaaaaaaaaaaaaaaaaaaaaaaaaaaaaaaaaaaaaaaaaaaaaaaaaaaaaaaaaaaaaaaaaaaaaaaaaaaaaaaaa

SEQ ID NO: 16742 - RNA, 9485 nt, synthetic construct
  source 1..9485: mol_type = other RNA
aggaaataagagagaaaagaagagtaagaagaaatataagagccaccatggcccctaagaagaagcgtaaagtgagccggatggaacgcctcgtctacgaggtgcggcagaagtgcagaaacatcgaggacatctgcatctcctgcggatctctgaacgtgaccctggagcacccactgttcatcggcggcatgtgccagaactgtaaaaactgttttctggagtgtgcctatcaatacgacgatgacggctaccagagctactgcaccatctgttgcggcggaagagaggtgctgatgtgtggaaataacaactgctgccggtgcttctgcgtggaatgcgtggacctgctggtgggccccggcgccgcccaggccgctattaaggaagatccttggaactgctacatgtgcggccacaagggcacatacggcctgctgagacggagagaggactggcctagcagactgcagatgttcttcgccaataaccacgaccaggagttcgacccccctaaggtgtaccctcccgtccccgccgagaagagaaagcccatccgggtcctgagcctgttcgatggcatcgccaccggtctgctggtgctgaaggacctgggcatccaggtggataggtacattgcctccgaggtgtgcgaggactccatcaccgtgggaatggtgcgtcatcagggcaagatcatgtacgtgggcgacgtgcggagcgtgacacagaagcatatccaggagtggggccctttcgacctggtgatcggcggcagcccttgcaatgacctgagcatcgtgaacccagcccggaagggcctgtacgagggaaccggcagactgttcttcgagttttacagactgctgcacgacgcccggcctaaggaaggcgacgaccggcccttcttttggctgttcgagaatgtggtggccatgggagtcagcgacaagcgggatattagccggttcctggagagcaaccccgtgatgatcgatgccaaggaagtgagcgccgcccaccgggccagatacttctggggcaatctgcctggcatgaacagacccctggccagcaccgtgaacgacaagctggagctgcaggagtgcctggagcacggccggatcgccaagttcagcaaggtgagaaccatcaccacccgaagcaacagcatcaaacaaggcaaggaccagcactttcctgtgttcatgaacgagaaggaggacatcctgtggtgtaccgagatggagagagtgttcgggttcccagtccactacacagatgtcagcaacatgtctagactggccagacagagactgctgggaagaagctggtccgtccctgtgatcagacacctgttcgcccctctgaaggagtacttcgcctgcgtgagcagcggcaacagcaacgccaacagccggggccccagcttctctagcggcctggtgccactgtccctgagagggagccacatgggccccatggagatctacaaaaccgtgagcgcctggaagcggcagcctgtgcgcgtgctgagcctgtttcggaatatcgataaagtcctgaaaagcctgggattcctggagagcggctctggctccggcggtggcaccctgaagtacgtggaggatgtgacaaacgtggtcagacgggatgtggagaagtggggccccttcgatctggtgtacggcagcacccaacccctgggcagctcttgtgaccggtgccctggctggtacatgtttcagttccaccggatcctgcagtacgccctgccgagacaggagtcccagcggccattcttttggattttcatggacaacttgctgctgaccgaggatgaccaggaaactaccactcggttcctgcagaccgaagccgtgaccctgcaggacgtgagaggccgggactaccagaacgccatgcgggtgtggtccaacatccctggactgaaaagcaagcacgcacctctgacccctaaagaagaggagtacctgcaggcccaggtgcggagcagaagcaagctggacgcccctaaggtggatctgctggtgaagaattgcctcctgcccctgagagagtacttcaagtatttcagccagaatagtctgcccctgggaggcagcggcggcggcgccctggtgacatttgaggacgtcgccgtgcggttcacccaggaggaatgggctctgctggatccttctcagaaaatcctgtaccgggacgtgatgagagagacataccggaatctgacctccgtgggcatcaactgggaatgttgggaccttgaagcctgcttcagaagcctgggaagaaacctgagagtgcaggtggtgaagagaaagtgcgagctgaccaacagcggcccctgcgccgagggcggcccaagcagcggcgcccctcctcccagcggcggcagcccagccggctccccaacctctaccgaggagggcacctctgagtccgccacccccgagagcggccctggcacctccaccgagcccagcgagggcagcgcacccggcagccctgccggcagccccacctccacagaggagggaaccagcaccgagcccagcgaaggcagcgccccaggcaccagcaccgagcctagtgagcaggagattaaacggatcaacaagatcagaagaagacttgtgaaagacagcaacaccaagaaggccggcaagacaggccccatgaaaaccctgctggttagagtgatgacacccgatctgagagagcggctggaaaacctgagaaagaagcctgaaaatatcccccagcccatcagcaatacatctagagccaacctgaataagctgctgaccgattacaccgaaatgaagaaggcgatcctgcatgtgtactgggaagagttccagaaggaccctgtgggcctgatgagccgggtggcccagcctgccagcaagaagatcgatcagaacaagctgaaacctgagatggacgagaagggcaacctgaccaccgccggctttgcctgctctcagtgtggccagcccctgttcgtgtacaagctggagcaggtgtctgagaagggcaaggcttacaccaactacttcggacggtgcaatgtggccgagcacgaaaagctgatcctgctggcccagctgaagcccgagaaggatagcgacgaagccgtgacatatagcctgggaaagtttgggcagagggccctggatttctacagcattcatgtgaccaaggagtccacccaccccgtgaagcccctggcccagatcgccggaaacagatacgcctccggacctgtgggaaaggccctgagcgacgcatgtatgggcacaatcgcctccttcctgtctaagtaccaggacatcatcatcgaacaccagaaggtggtgaagggcaaccagaagagactggagagcctgcgggagctggccggcaaggaaaacctggaataccctagcgtgaccctgccacctcagcctcacaccaaggagggcgttgatgcctacaacgaagtgatcgcccgggtgcgaatgtgggtgaacctgaacctgtggcagaagctgaagctaagcagagatgatgccaagcctctgctgagactgaagggattcccttcctttcctctggtcgagagacaggccaacgaagtggactggtgggacatggtgtgtaacgtgaagaagctgatcaacgagaaaaaggaggatggcaaggtgttttggcagaatctggctggctacaagagacaggaagccctgagaccatacctgagcagcgaggaagatcggaagaagggaaagaaattcgctcggtaccagctgggcgacctgctgctgcacctggaaaagaagcacggcgaggactggggaaaggtgtacgacgaggcctgggagcggattgacaagaaagtggaaggcctgagcaagcacatcaagctggaagaggaacggagaagcgaggacgcccagagcaaggccgccctgaccgactggctgcgggctaaggccagcttcgtgatcgagggcctgaaggaggccgacaaggacgagttctgcagatgcgagctgaagctgcagaagtggtacggggacctgcggggaaagcccttcgccatcgaagccgagaacagcatcctggacatcagcggcttcagcaagcagtacaactgtgccttcatctggcagaaggacggcgtgaagaagctgaacctgtacctgatcatcaactacttcaagggcggcaagctgcggttcaagaagatcaaacctgaagccttcgaagccaacagattctacaccgtgatcaacaaaaagagcggcgagatcgtgcccatggaggtgaacttcaacttcgacgaccccaacctgatcatcctgcctctggcctttggcaagagacagggcagagaattcatctggaacgacctgctgtccctggaaaccggcagcctgaagctggccaacggaagagtgatcgagaagacactgtacaacagaagaacccggcaggatgagcctgccctgttcgtggccctgaccttcgagcggcgggaggtcctggactcctccaatatcaaaccaatgaacctgatcggcgtggcaagaggcgaaaacatccccgccgtgatcgccctgaccgaccccgagggctgcccactgagccggtttaaggatagcctgggaaacccaacccacatcctgagaatcggcgagagctataaggagaagcagcggaccatccaggccaagaaggaggtggagcagcggagagccggcggctacagccggaagtacgccagcaaagccaagaatctggcagacgatatggtgagaaacaccgctagagatctgctgtactacgccgtgacccaggatgccatgctgatcttcgccaacctgagccggggcttcggccggcagggcaagcggaccttcatggccgagagacagtacacacggatggaggactggctgaccgccaagctggcctacgagggcctgagcaagacctacctgtccaagacactggcccagtacacctccaagacatgcagcaactgtgggtttaccatcaccagcgccgactacgacagggtgctggagaagctgaagaagacagcaacaggctggatgaccacaattaacggcaaggagctgaaggtggagggccagattacctactacaacagatacaagagacagaacgtagtcaaggacctgtccgtcgagctggatagactgagcgaagaatctgtgaacaacgacatctcctcctggacaaagggcagaagcggagaagctctgagcctcctgaagaaaagattctcccatagacccgtgcaggagaagttcgtgtgcctgaactgcggcttcgagacacacgcagccgagcaagccgccctgaacatcgccagatcctggctgttcctgcggagccaggagtacaagaaataccagacaaacaagacaaccggcaacaccgataagagagccttcgtcgagacctggcagtccttttaccggaagaagcttaaggaggtgtggaaacctgccgtgcggtctggcggatctggcggaggctccctggccagcatcagcttcgaggacctggccgtgaccttcaccgaggaggagtgggagcacctggacctgggccagaggaacctgtaccaggaggtgatgctggagacctaccagctgctggtgagcctgggcgaccaggtgaggctggccccccccacccccggcacccccctgcccgccctgcccgcccagcccaggctgctgggcctgcccagccagcccctggacaggaggggcacccccggcggcccaagcagcggcgcccctcctcccagcggcggcagcccagccggctccccaacctctaccgaggagggcacctctgagtccgccacccccgagagcggccctggcacctccaccgagcccagcgagggcagcgcacccggcagccctgccggcagccccacctccacagaggagggaaccagcaccgagcccagcgaaggcagcgccccaggcaccagcaccgagcctagtgagcaggagattaaacggatcaacaagatcagaagaagacttgtgaaagacagcaacaccaagaaggccggcaagacaggccccatgaaaaccctgctggttagagtgatgacacccgatctgagagagcggctggaaaacctgagaaagaagcctgaaaatatcccccagcccatcagcaatacatctagagccaacctgaataagctgctgaccgattacaccgaaatgaagaaggcgatcctgcatgtgtactgggaagagttccagaaggaccctgtgggcctgatgagccgggtggcccagcctgccagcaagaagatcgatcagaacaagctgaaacctgagatggacgagaagggcaacctgaccaccgccggctttgcctgctctcagtgtggccagcccctgttcgtgtacaagctggagcaggtgtctgagaagggcaaggcttacaccaactacttcggacggtgcaatgtggccgagcacgaaaagctgatcctgctggcccagctgaagcccgagaaggatagcgacgaagccgtgacatatagcctgggaaagtttgggcagagggccctggatttctacagcattcatgtgaccaaggagtccacccaccccgtgaagcccctggcccagatcgccggaaacagatacgcctccggacctgtgggaaaggccctgagcgacgcatgtatgggcacaatcgcctccttcctgtctaagtaccaggacatcatcatcgaacaccagaaggtggtgaagggcaaccagaagagactggagagcctgcgggagctggccggcaaggaaaacctggaataccctagcgtgaccctgccacctcagcctcacaccaaggagggcgttgatgcctacaacgaagtgatcgcccgggtgcgaatgtgggtgaacctgaacctgtggcagaagctgaagctaagcagagatgatgccaagcctctgctgagactgaagggattcccttcctttcctctggtcgagagacaggccaacgaagtggactggtgggacatggtgtgtaacgtgaagaagctgatcaacgagaaaaaggaggatggcaaggtgttttggcagaatctggctggctacaagagacaggaagccctgagaccatacctgagcagcgaggaagatcggaagaagggaaagaaattcgctcggtaccagctgggcgacctgctgctgcacctggaaaagaagcacggcgaggactggggaaaggtgtacgacgaggcctgggagcggattgacaagaaagtggaaggcctgagcaagcacatcaagctggaagaggaacggagaagcgaggacgcccagagcaaggccgccctgaccgactggctgcgggctaaggccagcttcgtgatcgagggcctgaaggaggccgacaaggacgagttctgcagatgcgagctgaagctgcagaagtggtacggggacctgcggggaaagcccttcgccatcgaagccgagaacagcatcctggacatcagcggcttcagcaagcagtacaactgtgccttcatctggcagaaggacggcgtgaagaagctgaacctgtacctgatcatcaactacttcaagggcggcaagctgcggttcaagaagatcaaacctgaagccttcgaagccaacagattctacaccgtgatcaacaaaaagagcggcgagatcgtgcccatggaggtgaacttcaacttcgacgaccccaacctgatcatcctgcctctggcctttggcaagagacagggcagagaattcatctggaacgacctgctgtccctggaaaccggcagcctgaagctggccaacggaagagtgatcgagaagacactgtacaacagaagaacccggcaggatgagcctgccctgttcgtggccctgaccttcgagcggcgggaggtcctggactcctccaatatcaaaccaatgaacctgatcggcgtggcaagaggcgaaaacatccccgccgtgatcgccctgaccgaccccgagggctgcccactgagccggtttaaggatagcctgggaaacccaacccacatcctgagaatcggcgagagctataaggagaagcagcggaccatccaggccaagaaggaggtggagcagcggagagccggcggctacagccggaagtacgccagcaaagccaagaatctggcagacgatatggtgagaaacaccgctagagatctgctgtactacgccgtgacccaggatgccatgctgatcttcgccaacctgagccggggcttcggccggcagggcaagcggaccttcatggccgagagacagtacacacggatggaggactggctgaccgccaagctggcctacgagggcctgagcaagacctacctgtccaagacactggcccagtacacctccaagacatgcagcaactgtgggtttaccatcaccagcgccgactacgacagggtgctggagaagctgaagaagacagcaacaggctggatgaccacaattaacggcaaggagctgaaggtggagggccagattacctactacaacagatacaagagacagaacgtagtcaaggacctgtccgtcgagctggatagactgagcgaagaatctgtgaacaacgacatctcctcctggacaaagggcagaagcggagaagctctgagcctcctgaagaaaagattctcccatagacccgtgcaggagaagttcgtgtgcctgaactgcggcttcgagacacacgcagccgagcaagccgccctgaacatcgccagatcctggctgttcctgcggagccaggagtacaagaaataccagacaaacaagacaaccggcaacaccgataagagagccttcgtcgagacctggcagtccttttaccggaagaagcttaaggaggtgtggaaacctgccgtgcggtctggcggatctggcggaggctcctctggccagcatcagcttcgaggacctggccgtgaccttcaccgaggaggagtgggagcacctggacctgggccagaggaacctgtaccaggaggtgatgctggagacctaccagctgctggtgagcctgggcgaccaggtgaggctggccccccccacccccggcacccccctgcccgccctgcccgcccagcccaggctgctgggcctgcccagccagcccctggacaggaggggcacccccggatctggctccggcagcggccccaagaaaaagagaaaagtctaagctgccttctgcggggcttgccttctggccatgcccttcttctctcccttgcacctgtacctcttggtctttgaataaagcctgagtaggaaggctagcaaaaaaaaaaaaaaaaaaaaaaaaaaaaaaaaaaaaaaaaaaaaaaaaaaaaaaaaaaaaaaaaaaaaaaaaaaaaaaaa

SEQ ID NO: 16743 - RNA, 9485 nt, synthetic construct
  source 1..9485: mol_type = other RNA
aggaaataagagagaaaagaagagtaagaagaaatataagagccaccatggcccctaagaagaagcgtaaagtgagccggatggaacgcctcgtctacgaggtgcggcagaagtgcagaaacatcgaggacatctgcatctcctgcggatctctgaacgtgaccctggagcacccactgttcatcggcggcatgtgccagaactgtaaaaactgttttctggagtgtgcctatcaatacgacgatgacggctaccagagctactgcaccatctgttgcggcggaagagaggtgctgatgtgtggaaataacaactgctgccggtgcttctgcgtggaatgcgtggacctgctggtgggccccggcgccgcccaggccgctattaaggaagatccttggaactgctacatgtgcggccacaagggcacatacggcctgctgagacggagagaggactggcctagcagactgcagatgttcttcgccaataaccacgaccaggagttcgacccccctaaggtgtaccctcccgtccccgccgagaagagaaagcccatccgggtcctgagcctgttcgatggcatcgccaccggtctgctggtgctgaaggacctgggcatccaggtggataggtacattgcctccgaggtgtgcgaggactccatcaccgtgggaatggtgcgtcatcagggcaagatcatgtacgtgggcgacgtgcggagcgtgacacagaagcatatccaggagtggggccctttcgacctggtgatcggcggcagcccttgcaatgacctgagcatcgtgaacccagcccggaagggcctgtacgagggaaccggcagactgttcttcgagttttacagactgctgcacgacgcccggcctaaggaaggcgacgaccggcccttcttttggctgttcgagaatgtggtggccatgggagtcagcgacaagcgggatattagccggttcctggagagcaaccccgtgatgatcgatgccaaggaagtgagcgccgcccaccgggccagatacttctggggcaatctgcctggcatgaacagacccctggccagcaccgtgaacgacaagctggagctgcaggagtgcctggagcacggccggatcgccaagttcagcaaggtgagaaccatcaccacccgaagcaacagcatcaaacaaggcaaggaccagcactttcctgtgttcatgaacgagaaggaggacatcctgtggtgtaccgagatggagagagtgttcgggttcccagtccactacacagatgtcagcaacatgtctagactggccagacagagactgctgggaagaagctggtccgtccctgtgatcagacacctgttcgcccctctgaaggagtacttcgcctgcgtgagcagcggcaacagcaacgccaacagccggggccccagcttctctagcggcctggtgccactgtccctgagagggagccacatgggccccatggagatctacaaaaccgtgagcgcctggaagcggcagcctgtgcgcgtgctgagcctgtttcggaatatcgataaagtcctgaaaagcctgggattcctggagagcggctctggctccggcggtggcaccctgaagtacgtggaggatgtgacaaacgtggtcagacgggatgtggagaagtggggccccttcgatctggtgtacggcagcacccaacccctgggcagctcttgtgaccggtgccctggctggtacatgtttcagttccaccggatcctgcagtacgccctgccgagacaggagtcccagcggccattcttttggattttcatggacaacttgctgctgaccgaggatgaccaggaaactaccactcggttcctgcagaccgaagccgtgaccctgcaggacgtgagaggccgggactaccagaacgccatgcgggtgtggtccaacatccctggactgaaaagcaagcacgcacctctgacccctaaagaagaggagtacctgcaggcccaggtgcggagcagaagcaagctggacgcccctaaggtggatctgctggtgaagaattgcctcctgcccctgagagagtacttcaagtatttcagccagaatagtctgcccctgggaggcagcggcggcggcgccctggtgacatttgaggacgtcgccgtgcggttcacccaggaggaatgggctctgctggatccttctcagaaaatcctgtaccgggacgtgatgagagagacataccggaatctgacctccgtgggcatcaactgggaatgttgggaccttgaagcctgcttcagaagcctgggaagaaacctgagagtgcaggtggtgaagagaaagtgcgagctgaccaacagcggcccctgcgccgagggcggcccaagcagcggcgcccctcctcccagcggcggcagcccagccggctccccaacctctaccgaggagggcacctctgagtccgccacccccgagagcggccctggcacctccaccgagcccagcgagggcagcgcacccggcagccctgccggcagccccacctccacagaggagggaaccagcaccgagcccagcgaaggcagcgccccaggcaccagcaccgagcctagtgagcaggagattaaacggatcaacaagatcagaagaagacttgtgaaagacagcaacaccaagaaggccggcaagacaggccccatgaaaaccctgctggttagagtgatgacacccgatctgagagagcggctggaaaacctgagaaagaagcctgaaaatatcccccagcccatcagcaatacatctagagccaacctgaataagctgctgaccgattacaccgaaatgaagaaggcgatcctgcatgtgtactgggaagagttccagaaggaccctgtgggcctgatgagccgggtggcccagcctgccagcaagaagatcgatcagaacaagctgaaacctgagatggacgagaagggcaacctgaccaccgccggctttgcctgctctcagtgtggccagcccctgttcgtgtacaagctggagcaggtgtctgagaagggcaaggcttacaccaactacttcggacggtgcaatgtggccgagcacgaaaagctgatcctgctggcccagctgaagcccgagaaggatagcgacgaagccgtgacatatagcctgggaaagtttgggcagagggccctggatttctacagcattcatgtgaccaaggagtccacccaccccgtgaagcccctggcccagatcgccggaaacagatacgcctccggacctgtgggaaaggccctgagcgacgcatgtatgggcacaatcgcctccttcctgtctaagtaccaggacatcatcatcgaacaccagaaggtggtgaagggcaaccagaagagactggagagcctgcgggagctggccggcaaggaaaacctggaataccctagcgtgaccctgccacctcagcctcacaccaaggagggcgttgatgcctacaacgaagtgatcgcccgggtgcgaatgtgggtgaacctgaacctgtggcagaagctgaagctaagcagagatgatgccaagcctctgctgagactgaagggattcccttcctttcctctggtcgagagacaggccaacgaagtggactggtgggacatggtgtgtaacgtgaagaagctgatcaacgagaaaaaggaggatggcaaggtgttttggcagaatctggctggctacaagagacaggaagccctgagaccatacctgagcagcgaggaagatcggaagaagggaaagaaattcgctcggtaccagctgggcgacctgctgctgcacctggaaaagaagcacggcgaggactggggaaaggtgtacgacgaggcctgggagcggattgacaagaaagtggaaggcctgagcaagcacatcaagctggaagaggaacggagaagcgaggacgcccagagcaaggccgccctgaccgactggctgcgggctaaggccagcttcgtgatcgagggcctgaaggaggccgacaaggacgagttctgcagatgcgagctgaagctgcagaagtggtacggggacctgcggggaaagcccttcgccatcgaagccgagaacagcatcctggacatcagcggcttcagcaagcagtacaactgtgccttcatctggcagaaggacggcgtgaagaagctgaacctgtacctgatcatcaactacttcaagggcggcaagctgcggttcaagaagatcaaacctgaagccttcgaagccaacagattctacaccgtgatcaacaaaaagagcggcgagatcgtgcccatggaggtgaacttcaacttcgacgaccccaacctgatcatcctgcctctggcctttggcaagagacagggcagagaattcatctggaacgacctgctgtccctggaaaccggcagcctgaagctggccaacggaagagtgatcgagaagacactgtacaacagaagaacccggcaggatgagcctgccctgttcgtggccctgaccttcgagcggcgggaggtcctggactcctccaatatcaaaccaatgaacctgatcggcgtggcaagaggcgaaaacatccccgccgtgatcgccctgaccgaccccgagggctgcccactgagccggtttaaggatagcctgggaaacccaacccacatcctgagaatcggcgagagctataaggagaagcagcggaccatccaggccaagaaggaggtggagcagcggagagccggcggctacagccggaagtacgccagcaaagccaagaatctggcagacgatatggtgagaaacaccgctagagatctgctgtactacgccgtgacccaggatgccatgctgatcttcgccaacctgagccggggcttcggccggcagggcaagcggaccttcatggccgagagacagtacacacggatggaggactggctgaccgccaagctggcctacgagggcctgagcaagacctacctgtccaagacactggcccagtacacctccaagacatgcagcaactgtgggtttaccatcaccagcgccgactacgacagggtgctggagaagctgaagaagacagcaacaggctggatgaccacaattaacggcaaggagctgaaggtggagggccagattacctactacaacagatacaagagacagaacgtagtcaaggacctgtccgtcgagctggatagactgagcgaagaatctgtgaacaacgacatctcctcctggacaaagggcagaagcggagaagctctgagcctcctgaagaaaagattctcccatagacccgtgcaggagaagttcgtgtgcctgaactgcggcttcgagacacacgcagccgagcaagccgccctgaacatcgccagatcctggctgttcctgcggagccaggagtacaagaaataccagacaaacaagacaaccggcaacaccgataagagagccttcgtcgagacctggcagtccttttaccggaagaagcttaaggaggtgtggaaacctgccgtgcggtctggcggatctggcggaggctcccagatgcaggtgaccttcgaggaggtggccatcagcttcagccaggaggagtgggagtacctggacgaggagcagaaggagctgtacagggaggtgatgaaggagaactaccagaccctgatcagcctggccaccggcagccccaccgtgacccccaagatcatcgcccacatcgagaggggcgaggagccctacatcaggggcgagcccggcagcgaggagagggagaccggcaacagcagcggcggcccaagcagcggcgcccctcctcccagcggcggcagcccagccggctccccaacctctaccgaggagggcacctctgagtccgccacccccgagagcggccctggcacctccaccgagcccagcgagggcagcgcacccggcagccctgccggcagccccacctccacagaggagggaaccagcaccgagcccagcgaaggcagcgccccaggcaccagcaccgagcctagtgagcaggagattaaacggatcaacaagatcagaagaagacttgtgaaagacagcaacaccaagaaggccggcaagacaggccccatgaaaaccctgctggttagagtgatgacacccgatctgagagagcggctggaaaacctgagaaagaagcctgaaaatatcccccagcccatcagcaatacatctagagccaacctgaataagctgctgaccgattacaccgaaatgaagaaggcgatcctgcatgtgtactgggaagagttccagaaggaccctgtgggcctgatgagccgggtggcccagcctgccagcaagaagatcgatcagaacaagctgaaacctgagatggacgagaagggcaacctgaccaccgccggctttgcctgctctcagtgtggccagcccctgttcgtgtacaagctggagcaggtgtctgagaagggcaaggcttacaccaactacttcggacggtgcaatgtggccgagcacgaaaagctgatcctgctggcccagctgaagcccgagaaggatagcgacgaagccgtgacatatagcctgggaaagtttgggcagagggccctggatttctacagcattcatgtgaccaaggagtccacccaccccgtgaagcccctggcccagatcgccggaaacagatacgcctccggacctgtgggaaaggccctgagcgacgcatgtatgggcacaatcgcctccttcctgtctaagtaccaggacatcatcatcgaacaccagaaggtggtgaagggcaaccagaagagactggagagcctgcgggagctggccggcaaggaaaacctggaataccctagcgtgaccctgccacctcagcctcacaccaaggagggcgttgatgcctacaacgaagtgatcgcccgggtgcgaatgtgggtgaacctgaacctgtggcagaagctgaagctaagcagagatgatgccaagcctctgctgagactgaagggattcccttcctttcctctggtcgagagacaggccaacgaagtggactggtgggacatggtgtgtaacgtgaagaagctgatcaacgagaaaaaggaggatggcaaggtgttttggcagaatctggctggctacaagagacaggaagccctgagaccatacctgagcagcgaggaagatcggaagaagggaaagaaattcgctcggtaccagctgggcgacctgctgctgcacctggaaaagaagcacggcgaggactggggaaaggtgtacgacgaggcctgggagcggattgacaagaaagtggaaggcctgagcaagcacatcaagctggaagaggaacggagaagcgaggacgcccagagcaaggccgccctgaccgactggctgcgggctaaggccagcttcgtgatcgagggcctgaaggaggccgacaaggacgagttctgcagatgcgagctgaagctgcagaagtggtacggggacctgcggggaaagcccttcgccatcgaagccgagaacagcatcctggacatcagcggcttcagcaagcagtacaactgtgccttcatctggcagaaggacggcgtgaagaagctgaacctgtacctgatcatcaactacttcaagggcggcaagctgcggttcaagaagatcaaacctgaagccttcgaagccaacagattctacaccgtgatcaacaaaaagagcggcgagatcgtgcccatggaggtgaacttcaacttcgacgaccccaacctgatcatcctgcctctggcctttggcaagagacagggcagagaattcatctggaacgacctgctgtccctggaaaccggcagcctgaagctggccaacggaagagtgatcgagaagacactgtacaacagaagaacccggcaggatgagcctgccctgttcgtggccctgaccttcgagcggcgggaggtcctggactcctccaatatcaaaccaatgaacctgatcggcgtggcaagaggcgaaaacatccccgccgtgatcgccctgaccgaccccgagggctgcccactgagccggtttaaggatagcctgggaaacccaacccacatcctgagaatcggcgagagctataaggagaagcagcggaccatccaggccaagaaggaggtggagcagcggagagccggcggctacagccggaagtacgccagcaaagccaagaatctggcagacgatatggtgagaaacaccgctagagatctgctgtactacgccgtgacccaggatgccatgctgatcttcgccaacctgagccggggcttcggccggcagggcaagcggaccttcatggccgagagacagtacacacggatggaggactggctgaccgccaagctggcctacgagggcctgagcaagacctacctgtccaagacactggcccagtacacctccaagacatgcagcaactgtgggtttaccatcaccagcgccgactacgacagggtgctggagaagctgaagaagacagcaacaggctggatgaccacaattaacggcaaggagctgaaggtggagggccagattacctactacaacagatacaagagacagaacgtagtcaaggacctgtccgtcgagctggatagactgagcgaagaatctgtgaacaacgacatctcctcctggacaaagggcagaagcggagaagctctgagcctcctgaagaaaagattctcccatagacccgtgcaggagaagttcgtgtgcctgaactgcggcttcgagacacacgcagccgagcaagccgccctgaacatcgccagatcctggctgttcctgcggagccaggagtacaagaaataccagacaaacaagacaaccggcaacaccgataagagagccttcgtcgagacctggcagtccttttaccggaagaagcttaaggaggtgtggaaacctgccgtgcggtctggcggatctggcggaggctcctcagatgcaggtgaccttcgaggaggtggccatcagcttcagccaggaggagtgggagtacctggacgaggagcagaaggagctgtacagggaggtgatgaaggagaactaccagaccctgatcagcctggccaccggcagccccaccgtgacccccaagatcatcgcccacatcgagaggggcgaggagccctacatcaggggcgagcccggcagcgaggagagggagaccggcaacagcagcggatctggctccggcagcggccccaagaaaaagagaaaagtctaagctgccttctgcggggcttgccttctggccatgcccttcttctctcccttgcacctgtacctcttggtctttgaataaagcctgagtaggaaggctagcaaaaaaaaaaaaaaaaaaaaaaaaaaaaaaaaaaaaaaaaaaaaaaaaaaaaaaaaaaaaaaaaaaaaaaaaaaaaaaaa

SEQ ID NO: 16744 - RNA, 9485 nt, synthetic construct
  source 1..9485: mol_type = other RNA
aggaaataagagagaaaagaagagtaagaagaaatataagagccaccatggcccctaagaagaagcgtaaagtgagccggatggaacgcctcgtctacgaggtgcggcagaagtgcagaaacatcgaggacatctgcatctcctgcggatctctgaacgtgaccctggagcacccactgttcatcggcggcatgtgccagaactgtaaaaactgttttctggagtgtgcctatcaatacgacgatgacggctaccagagctactgcaccatctgttgcggcggaagagaggtgctgatgtgtggaaataacaactgctgccggtgcttctgcgtggaatgcgtggacctgctggtgggccccggcgccgcccaggccgctattaaggaagatccttggaactgctacatgtgcggccacaagggcacatacggcctgctgagacggagagaggactggcctagcagactgcagatgttcttcgccaataaccacgaccaggagttcgacccccctaaggtgtaccctcccgtccccgccgagaagagaaagcccatccgggtcctgagcctgttcgatggcatcgccaccggtctgctggtgctgaaggacctgggcatccaggtggataggtacattgcctccgaggtgtgcgaggactccatcaccgtgggaatggtgcgtcatcagggcaagatcatgtacgtgggcgacgtgcggagcgtgacacagaagcatatccaggagtggggccctttcgacctggtgatcggcggcagcccttgcaatgacctgagcatcgtgaacccagcccggaagggcctgtacgagggaaccggcagactgttcttcgagttttacagactgctgcacgacgcccggcctaaggaaggcgacgaccggcccttcttttggctgttcgagaatgtggtggccatgggagtcagcgacaagcgggatattagccggttcctggagagcaaccccgtgatgatcgatgccaaggaagtgagcgccgcccaccgggccagatacttctggggcaatctgcctggcatgaacagacccctggccagcaccgtgaacgacaagctggagctgcaggagtgcctggagcacggccggatcgccaagttcagcaaggtgagaaccatcaccacccgaagcaacagcatcaaacaaggcaaggaccagcactttcctgtgttcatgaacgagaaggaggacatcctgtggtgtaccgagatggagagagtgttcgggttcccagtccactacacagatgtcagcaacatgtctagactggccagacagagactgctgggaagaagctggtccgtccctgtgatcagacacctgttcgcccctctgaaggagtacttcgcctgcgtgagcagcggcaacagcaacgccaacagccggggccccagcttctctagcggcctggtgccactgtccctgagagggagccacatgggccccatggagatctacaaaaccgtgagcgcctggaagcggcagcctgtgcgcgtgctgagcctgtttcggaatatcgataaagtcctgaaaagcctgggattcctggagagcggctctggctccggcggtggcaccctgaagtacgtggaggatgtgacaaacgtggtcagacgggatgtggagaagtggggccccttcgatctggtgtacggcagcacccaacccctgggcagctcttgtgaccggtgccctggctggtacatgtttcagttccaccggatcctgcagtacgccctgccgagacaggagtcccagcggccattcttttggattttcatggacaacttgctgctgaccgaggatgaccaggaaactaccactcggttcctgcagaccgaagccgtgaccctgcaggacgtgagaggccgggactaccagaacgccatgcgggtgtggtccaacatccctggactgaaaagcaagcacgcacctctgacccctaaagaagaggagtacctgcaggcccaggtgcggagcagaagcaagctggacgcccctaaggtggatctgctggtgaagaattgcctcctgcccctgagagagtacttcaagtatttcagccagaatagtctgcccctgggaggcagcggcggcggcgccctggtgacatttgaggacgtcgccgtgcggttcacccaggaggaatgggctctgctggatccttctcagaaaatcctgtaccgggacgtgatgagagagacataccggaatctgacctccgtgggcatcaactgggaatgttgggaccttgaagcctgcttcagaagcctgggaagaaacctgagagtgcaggtggtgaagagaaagtgcgagctgaccaacagcggcccctgcgccgagggcggcccaagcagcggcgcccctcctcccagcggcggcagcccagccggctccccaacctctaccgaggagggcacctctgagtccgccacccccgagagcggccctggcacctccaccgagcccagcgagggcagcgcacccggcagccctgccggcagccccacctccacagaggagggaaccagcaccgagcccagcgaaggcagcgccccaggcaccagcaccgagcctagtgagcaggagattaaacggatcaacaagatcagaagaagacttgtgaaagacagcaacaccaagaaggccggcaagacaggccccatgaaaaccctgctggttagagtgatgacacccgatctgagagagcggctggaaaacctgagaaagaagcctgaaaatatcccccagcccatcagcaatacatctagagccaacctgaataagctgctgaccgattacaccgaaatgaagaaggcgatcctgcatgtgtactgggaagagttccagaaggaccctgtgggcctgatgagccgggtggcccagcctgccagcaagaagatcgatcagaacaagctgaaacctgagatggacgagaagggcaacctgaccaccgccggctttgcctgctctcagtgtggccagcccctgttcgtgtacaagctggagcaggtgtctgagaagggcaaggcttacaccaactacttcggacggtgcaatgtggccgagcacgaaaagctgatcctgctggcccagctgaagcccgagaaggatagcgacgaagccgtgacatatagcctgggaaagtttgggcagagggccctggatttctacagcattcatgtgaccaaggagtccacccaccccgtgaagcccctggcccagatcgccggaaacagatacgcctccggacctgtgggaaaggccctgagcgacgcatgtatgggcacaatcgcctccttcctgtctaagtaccaggacatcatcatcgaacaccagaaggtggtgaagggcaaccagaagagactggagagcctgcgggagctggccggcaaggaaaacctggaataccctagcgtgaccctgccacctcagcctcacaccaaggagggcgttgatgcctacaacgaagtgatcgcccgggtgcgaatgtgggtgaacctgaacctgtggcagaagctgaagctaagcagagatgatgccaagcctctgctgagactgaagggattcccttcctttcctctggtcgagagacaggccaacgaagtggactggtgggacatggtgtgtaacgtgaagaagctgatcaacgagaaaaaggaggatggcaaggtgttttggcagaatctggctggctacaagagacaggaagccctgagaccatacctgagcagcgaggaagatcggaagaagggaaagaaattcgctcggtaccagctgggcgacctgctgctgcacctggaaaagaagcacggcgaggactggggaaaggtgtacgacgaggcctgggagcggattgacaagaaagtggaaggcctgagcaagcacatcaagctggaagaggaacggagaagcgaggacgcccagagcaaggccgccctgaccgactggctgcgggctaaggccagcttcgtgatcgagggcctgaaggaggccgacaaggacgagttctgcagatgcgagctgaagctgcagaagtggtacggggacctgcggggaaagcccttcgccatcgaagccgagaacagcatcctggacatcagcggcttcagcaagcagtacaactgtgccttcatctggcagaaggacggcgtgaagaagctgaacctgtacctgatcatcaactacttcaagggcggcaagctgcggttcaagaagatcaaacctgaagccttcgaagccaacagattctacaccgtgatcaacaaaaagagcggcgagatcgtgcccatggaggtgaacttcaacttcgacgaccccaacctgatcatcctgcctctggcctttggcaagagacagggcagagaattcatctggaacgacctgctgtccctggaaaccggcagcctgaagctggccaacggaagagtgatcgagaagacactgtacaacagaagaacccggcaggatgagcctgccctgttcgtggccctgaccttcgagcggcgggaggtcctggactcctccaatatcaaaccaatgaacctgatcggcgtggcaagaggcgaaaacatccccgccgtgatcgccctgaccgaccccgagggctgcccactgagccggtttaaggatagcctgggaaacccaacccacatcctgagaatcggcgagagctataaggagaagcagcggaccatccaggccaagaaggaggtggagcagcggagagccggcggctacagccggaagtacgccagcaaagccaagaatctggcagacgatatggtgagaaacaccgctagagatctgctgtactacgccgtgacccaggatgccatgctgatcttcgccaacctgagccggggcttcggccggcagggcaagcggaccttcatggccgagagacagtacacacggatggaggactggctgaccgccaagctggcctacgagggcctgagcaagacctacctgtccaagacactggcccagtacacctccaagacatgcagcaactgtgggtttaccatcaccagcgccgactacgacagggtgctggagaagctgaagaagacagcaacaggctggatgaccacaattaacggcaaggagctgaaggtggagggccagattacctactacaacagatacaagagacagaacgtagtcaaggacctgtccgtcgagctggatagactgagcgaagaatctgtgaacaacgacatctcctcctggacaaagggcagaagcggagaagctctgagcctcctgaagaaaagattctcccatagacccgtgcaggagaagttcgtgtgcctgaactgcggcttcgagacacacgcagccgagcaagccgccctgaacatcgccagatcctggctgttcctgcggagccaggagtacaagaaataccagacaaacaagacaaccggcaacaccgataagagagccttcgtcgagacctggcagtccttttaccggaagaagcttaaggaggtgtggaaacctgccgtgcggtctggcggatctggcggaggctccgcccaggagagcgtgaccttcgaggacgtggccgtgaacttcaccaacagggagtggcagtgcctgacctacgcccagaggcacctgtacaaggacgtgatgctggagaactacggcaacatggtgagcctgggcttccccttccccaagccccccctgatcagccacctggagagggaggtggacccctgcgtgcaggacccccaggacagggagagcctgagctgcagctaccccgtgagcggcggcccaagcagcggcgcccctcctcccagcggcggcagcccagccggctccccaacctctaccgaggagggcacctctgagtccgccacccccgagagcggccctggcacctccaccgagcccagcgagggcagcgcacccggcagccctgccggcagccccacctccacagaggagggaaccagcaccgagcccagcgaaggcagcgccccaggcaccagcaccgagcctagtgagcaggagattaaacggatcaacaagatcagaagaagacttgtgaaagacagcaacaccaagaaggccggcaagacaggccccatgaaaaccctgctggttagagtgatgacacccgatctgagagagcggctggaaaacctgagaaagaagcctgaaaatatcccccagcccatcagcaatacatctagagccaacctgaataagctgctgaccgattacaccgaaatgaagaaggcgatcctgcatgtgtactgggaagagttccagaaggaccctgtgggcctgatgagccgggtggcccagcctgccagcaagaagatcgatcagaacaagctgaaacctgagatggacgagaagggcaacctgaccaccgccggctttgcctgctctcagtgtggccagcccctgttcgtgtacaagctggagcaggtgtctgagaagggcaaggcttacaccaactacttcggacggtgcaatgtggccgagcacgaaaagctgatcctgctggcccagctgaagcccgagaaggatagcgacgaagccgtgacatatagcctgggaaagtttgggcagagggccctggatttctacagcattcatgtgaccaaggagtccacccaccccgtgaagcccctggcccagatcgccggaaacagatacgcctccggacctgtgggaaaggccctgagcgacgcatgtatgggcacaatcgcctccttcctgtctaagtaccaggacatcatcatcgaacaccagaaggtggtgaagggcaaccagaagagactggagagcctgcgggagctggccggcaaggaaaacctggaataccctagcgtgaccctgccacctcagcctcacaccaaggagggcgttgatgcctacaacgaagtgatcgcccgggtgcgaatgtgggtgaacctgaacctgtggcagaagctgaagctaagcagagatgatgccaagcctctgctgagactgaagggattcccttcctttcctctggtcgagagacaggccaacgaagtggactggtgggacatggtgtgtaacgtgaagaagctgatcaacgagaaaaaggaggatggcaaggtgttttggcagaatctggctggctacaagagacaggaagccctgagaccatacctgagcagcgaggaagatcggaagaagggaaagaaattcgctcggtaccagctgggcgacctgctgctgcacctggaaaagaagcacggcgaggactggggaaaggtgtacgacgaggcctgggagcggattgacaagaaagtggaaggcctgagcaagcacatcaagctggaagaggaacggagaagcgaggacgcccagagcaaggccgccctgaccgactggctgcgggctaaggccagcttcgtgatcgagggcctgaaggaggccgacaaggacgagttctgcagatgcgagctgaagctgcagaagtggtacggggacctgcggggaaagcccttcgccatcgaagccgagaacagcatcctggacatcagcggcttcagcaagcagtacaactgtgccttcatctggcagaaggacggcgtgaagaagctgaacctgtacctgatcatcaactacttcaagggcggcaagctgcggttcaagaagatcaaacctgaagccttcgaagccaacagattctacaccgtgatcaacaaaaagagcggcgagatcgtgcccatggaggtgaacttcaacttcgacgaccccaacctgatcatcctgcctctggcctttggcaagagacagggcagagaattcatctggaacgacctgctgtccctggaaaccggcagcctgaagctggccaacggaagagtgatcgagaagacactgtacaacagaagaacccggcaggatgagcctgccctgttcgtggccctgaccttcgagcggcgggaggtcctggactcctccaatatcaaaccaatgaacctgatcggcgtggcaagaggcgaaaacatccccgccgtgatcgccctgaccgaccccgagggctgcccactgagccggtttaaggatagcctgggaaacccaacccacatcctgagaatcggcgagagctataaggagaagcagcggaccatccaggccaagaaggaggtggagcagcggagagccggcggctacagccggaagtacgccagcaaagccaagaatctggcagacgatatggtgagaaacaccgctagagatctgctgtactacgccgtgacccaggatgccatgctgatcttcgccaacctgagccggggcttcggccggcagggcaagcggaccttcatggccgagagacagtacacacggatggaggactggctgaccgccaagctggcctacgagggcctgagcaagacctacctgtccaagacactggcccagtacacctccaagacatgcagcaactgtgggtttaccatcaccagcgccgactacgacagggtgctggagaagctgaagaagacagcaacaggctggatgaccacaattaacggcaaggagctgaaggtggagggccagattacctactacaacagatacaagagacagaacgtagtcaaggacctgtccgtcgagctggatagactgagcgaagaatctgtgaacaacgacatctcctcctggacaaagggcagaagcggagaagctctgagcctcctgaagaaaagattctcccatagacccgtgcaggagaagttcgtgtgcctgaactgcggcttcgagacacacgcagccgagcaagccgccctgaacatcgccagatcctggctgttcctgcggagccaggagtacaagaaataccagacaaacaagacaaccggcaacaccgataagagagccttcgtcgagacctggcagtccttttaccggaagaagcttaaggaggtgtggaaacctgccgtgcggtctggcggatctggcggaggctcctgcccaggagagcgtgaccttcgaggacgtggccgtgaacttcaccaacagggagtggcagtgcctgacctacgcccagaggcacctgtacaaggacgtgatgctggagaactacggcaacatggtgagcctgggcttccccttccccaagccccccctgatcagccacctggagagggaggtggacccctgcgtgcaggacccccaggacagggagagcctgagctgcagctaccccgtgagcggatctggctccggcagcggccccaagaaaaagagaaaagtctaagctgccttctgcggggcttgccttctggccatgcccttcttctctcccttgcacctgtacctcttggtctttgaataaagcctgagtaggaaggctagcaaaaaaaaaaaaaaaaaaaaaaaaaaaaaaaaaaaaaaaaaaaaaaaaaaaaaaaaaaaaaaaaaaaaaaaaaaaaaaaa

SEQ ID NO: 16745 - RNA, 9485 nt, synthetic construct
  source 1..9485: mol_type = other RNA
aggaaataagagagaaaagaagagtaagaagaaatataagagccaccatggcccctaagaagaagcgtaaagtgagccggatggaacgcctcgtctacgaggtgcggcagaagtgcagaaacatcgaggacatctgcatctcctgcggatctctgaacgtgaccctggagcacccactgttcatcggcggcatgtgccagaactgtaaaaactgttttctggagtgtgcctatcaatacgacgatgacggctaccagagctactgcaccatctgttgcggcggaagagaggtgctgatgtgtggaaataacaactgctgccggtgcttctgcgtggaatgcgtggacctgctggtgggccccggcgccgcccaggccgctattaaggaagatccttggaactgctacatgtgcggccacaagggcacatacggcctgctgagacggagagaggactggcctagcagactgcagatgttcttcgccaataaccacgaccaggagttcgacccccctaaggtgtaccctcccgtccccgccgagaagagaaagcccatccgggtcctgagcctgttcgatggcatcgccaccggtctgctggtgctgaaggacctgggcatccaggtggataggtacattgcctccgaggtgtgcgaggactccatcaccgtgggaatggtgcgtcatcagggcaagatcatgtacgtgggcgacgtgcggagcgtgacacagaagcatatccaggagtggggccctttcgacctggtgatcggcggcagcccttgcaatgacctgagcatcgtgaacccagcccggaagggcctgtacgagggaaccggcagactgttcttcgagttttacagactgctgcacgacgcccggcctaaggaaggcgacgaccggcccttcttttggctgttcgagaatgtggtggccatgggagtcagcgacaagcgggatattagccggttcctggagagcaaccccgtgatgatcgatgccaaggaagtgagcgccgcccaccgggccagatacttctggggcaatctgcctggcatgaacagacccctggccagcaccgtgaacgacaagctggagctgcaggagtgcctggagcacggccggatcgccaagttcagcaaggtgagaaccatcaccacccgaagcaacagcatcaaacaaggcaaggaccagcactttcctgtgttcatgaacgagaaggaggacatcctgtggtgtaccgagatggagagagtgttcgggttcccagtccactacacagatgtcagcaacatgtctagactggccagacagagactgctgggaagaagctggtccgtccctgtgatcagacacctgttcgcccctctgaaggagtacttcgcctgcgtgagcagcggcaacagcaacgccaacagccggggccccagcttctctagcggcctggtgccactgtccctgagagggagccacatgggccccatggagatctacaaaaccgtgagcgcctggaagcggcagcctgtgcgcgtgctgagcctgtttcggaatatcgataaagtcctgaaaagcctgggattcctggagagcggctctggctccggcggtggcaccctgaagtacgtggaggatgtgacaaacgtggtcagacgggatgtggagaagtggggccccttcgatctggtgtacggcagcacccaacccctgggcagctcttgtgaccggtgccctggctggtacatgtttcagttccaccggatcctgcagtacgccctgccgagacaggagtcccagcggccattcttttggattttcatggacaacttgctgctgaccgaggatgaccaggaaactaccactcggttcctgcagaccgaagccgtgaccctgcaggacgtgagaggccgggactaccagaacgccatgcgggtgtggtccaacatccctggactgaaaagcaagcacgcacctctgacccctaaagaagaggagtacctgcaggcccaggtgcggagcagaagcaagctggacgcccctaaggtggatctgctggtgaagaattgcctcctgcccctgagagagtacttcaagtatttcagccagaatagtctgcccctgggaggcagcggcggcggcgccctggtgacatttgaggacgtcgccgtgcggttcacccaggaggaatgggctctgctggatccttctcagaaaatcctgtaccgggacgtgatgagagagacataccggaatctgacctccgtgggcatcaactgggaatgttgggaccttgaagcctgcttcagaagcctgggaagaaacctgagagtgcaggtggtgaagagaaagtgcgagctgaccaacagcggcccctgcgccgagggcggcccaagcagcggcgcccctcctcccagcggcggcagcccagccggctccccaacctctaccgaggagggcacctctgagtccgccacccccgagagcggccctggcacctccaccgagcccagcgagggcagcgcacccggcagccctgccggcagccccacctccacagaggagggaaccagcaccgagcccagcgaaggcagcgccccaggcaccagcaccgagcctagtgagcaggagattaaacggatcaacaagatcagaagaagacttgtgaaagacagcaacaccaagaaggccggcaagacaggccccatgaaaaccctgctggttagagtgatgacacccgatctgagagagcggctggaaaacctgagaaagaagcctgaaaatatcccccagcccatcagcaatacatctagagccaacctgaataagctgctgaccgattacaccgaaatgaagaaggcgatcctgcatgtgtactgggaagagttccagaaggaccctgtgggcctgatgagccgggtggcccagcctgccagcaagaagatcgatcagaacaagctgaaacctgagatggacgagaagggcaacctgaccaccgccggctttgcctgctctcagtgtggccagcccctgttcgtgtacaagctggagcaggtgtctgagaagggcaaggcttacaccaactacttcggacggtgcaatgtggccgagcacgaaaagctgatcctgctggcccagctgaagcccgagaaggatagcgacgaagccgtgacatatagcctgggaaagtttgggcagagggccctggatttctacagcattcatgtgaccaaggagtccacccaccccgtgaagcccctggcccagatcgccggaaacagatacgcctccggacctgtgggaaaggccctgagcgacgcatgtatgggcacaatcgcctccttcctgtctaagtaccaggacatcatcatcgaacaccagaaggtggtgaagggcaaccagaagagactggagagcctgcgggagctggccggcaaggaaaacctggaataccctagcgtgaccctgccacctcagcctcacaccaaggagggcgttgatgcctacaacgaagtgatcgcccgggtgcgaatgtgggtgaacctgaacctgtggcagaagctgaagctaagcagagatgatgccaagcctctgctgagactgaagggattcccttcctttcctctggtcgagagacaggccaacgaagtggactggtgggacatggtgtgtaacgtgaagaagctgatcaacgagaaaaaggaggatggcaaggtgttttggcagaatctggctggctacaagagacaggaagccctgagaccatacctgagcagcgaggaagatcggaagaagggaaagaaattcgctcggtaccagctgggcgacctgctgctgcacctggaaaagaagcacggcgaggactggggaaaggtgtacgacgaggcctgggagcggattgacaagaaagtggaaggcctgagcaagcacatcaagctggaagaggaacggagaagcgaggacgcccagagcaaggccgccctgaccgactggctgcgggctaaggccagcttcgtgatcgagggcctgaaggaggccgacaaggacgagttctgcagatgcgagctgaagctgcagaagtggtacggggacctgcggggaaagcccttcgccatcgaagccgagaacagcatcctggacatcagcggcttcagcaagcagtacaactgtgccttcatctggcagaaggacggcgtgaagaagctgaacctgtacctgatcatcaactacttcaagggcggcaagctgcggttcaagaagatcaaacctgaagccttcgaagccaacagattctacaccgtgatcaacaaaaagagcggcgagatcgtgcccatggaggtgaacttcaacttcgacgaccccaacctgatcatcctgcctctggcctttggcaagagacagggcagagaattcatctggaacgacctgctgtccctggaaaccggcagcctgaagctggccaacggaagagtgatcgagaagacactgtacaacagaagaacccggcaggatgagcctgccctgttcgtggccctgaccttcgagcggcgggaggtcctggactcctccaatatcaaaccaatgaacctgatcggcgtggcaagaggcgaaaacatccccgccgtgatcgccctgaccgaccccgagggctgcccactgagccggtttaaggatagcctgggaaacccaacccacatcctgagaatcggcgagagctataaggagaagcagcggaccatccaggccaagaaggaggtggagcagcggagagccggcggctacagccggaagtacgccagcaaagccaagaatctggcagacgatatggtgagaaacaccgctagagatctgctgtactacgccgtgacccaggatgccatgctgatcttcgccaacctgagccggggcttcggccggcagggcaagcggaccttcatggccgagagacagtacacacggatggaggactggctgaccgccaagctggcctacgagggcctgagcaagacctacctgtccaagacactggcccagtacacctccaagacatgcagcaactgtgggtttaccatcaccagcgccgactacgacagggtgctggagaagctgaagaagacagcaacaggctggatgaccacaattaacggcaaggagctgaaggtggagggccagattacctactacaacagatacaagagacagaacgtagtcaaggacctgtccgtcgagctggatagactgagcgaagaatctgtgaacaacgacatctcctcctggacaaagggcagaagcggagaagctctgagcctcctgaagaaaagattctcccatagacccgtgcaggagaagttcgtgtgcctgaactgcggcttcgagacacacgcagccgagcaagccgccctgaacatcgccagatcctggctgttcctgcggagccaggagtacaagaaataccagacaaacaagacaaccggcaacaccgataagagagccttcgtcgagacctggcagtccttttaccggaagaagcttaaggaggtgtggaaacctgccgtgcggtctggcggatctggcggaggctccgcccagggcagcgtgatgttcaccgacgtgagcatcgacttcagccaggaggagtgggagttcctgaaccccgaccagagggacctgtacaaggacgtgatgctggagaactacagcaacctggtgagcatgggcctgtacatccccaagccccaggtgatcagcctgctggagcagggcaaggagccctggatgatcggcagggagctgaccaggggcctgtgcagcgccctggagagcatgggcggcccaagcagcggcgcccctcctcccagcggcggcagcccagccggctccccaacctctaccgaggagggcacctctgagtccgccacccccgagagcggccctggcacctccaccgagcccagcgagggcagcgcacccggcagccctgccggcagccccacctccacagaggagggaaccagcaccgagcccagcgaaggcagcgccccaggcaccagcaccgagcctagtgagcaggagattaaacggatcaacaagatcagaagaagacttgtgaaagacagcaacaccaagaaggccggcaagacaggccccatgaaaaccctgctggttagagtgatgacacccgatctgagagagcggctggaaaacctgagaaagaagcctgaaaatatcccccagcccatcagcaatacatctagagccaacctgaataagctgctgaccgattacaccgaaatgaagaaggcgatcctgcatgtgtactgggaagagttccagaaggaccctgtgggcctgatgagccgggtggcccagcctgccagcaagaagatcgatcagaacaagctgaaacctgagatggacgagaagggcaacctgaccaccgccggctttgcctgctctcagtgtggccagcccctgttcgtgtacaagctggagcaggtgtctgagaagggcaaggcttacaccaactacttcggacggtgcaatgtggccgagcacgaaaagctgatcctgctggcccagctgaagcccgagaaggatagcgacgaagccgtgacatatagcctgggaaagtttgggcagagggccctggatttctacagcattcatgtgaccaaggagtccacccaccccgtgaagcccctggcccagatcgccggaaacagatacgcctccggacctgtgggaaaggccctgagcgacgcatgtatgggcacaatcgcctccttcctgtctaagtaccaggacatcatcatcgaacaccagaaggtggtgaagggcaaccagaagagactggagagcctgcgggagctggccggcaaggaaaacctggaataccctagcgtgaccctgccacctcagcctcacaccaaggagggcgttgatgcctacaacgaagtgatcgcccgggtgcgaatgtgggtgaacctgaacctgtggcagaagctgaagctaagcagagatgatgccaagcctctgctgagactgaagggattcccttcctttcctctggtcgagagacaggccaacgaagtggactggtgggacatggtgtgtaacgtgaagaagctgatcaacgagaaaaaggaggatggcaaggtgttttggcagaatctggctggctacaagagacaggaagccctgagaccatacctgagcagcgaggaagatcggaagaagggaaagaaattcgctcggtaccagctgggcgacctgctgctgcacctggaaaagaagcacggcgaggactggggaaaggtgtacgacgaggcctgggagcggattgacaagaaagtggaaggcctgagcaagcacatcaagctggaagaggaacggagaagcgaggacgcccagagcaaggccgccctgaccgactggctgcgggctaaggccagcttcgtgatcgagggcctgaaggaggccgacaaggacgagttctgcagatgcgagctgaagctgcagaagtggtacggggacctgcggggaaagcccttcgccatcgaagccgagaacagcatcctggacatcagcggcttcagcaagcagtacaactgtgccttcatctggcagaaggacggcgtgaagaagctgaacctgtacctgatcatcaactacttcaagggcggcaagctgcggttcaagaagatcaaacctgaagccttcgaagccaacagattctacaccgtgatcaacaaaaagagcggcgagatcgtgcccatggaggtgaacttcaacttcgacgaccccaacctgatcatcctgcctctggcctttggcaagagacagggcagagaattcatctggaacgacctgctgtccctggaaaccggcagcctgaagctggccaacggaagagtgatcgagaagacactgtacaacagaagaacccggcaggatgagcctgccctgttcgtggccctgaccttcgagcggcgggaggtcctggactcctccaatatcaaaccaatgaacctgatcggcgtggcaagaggcgaaaacatccccgccgtgatcgccctgaccgaccccgagggctgcccactgagccggtttaaggatagcctgggaaacccaacccacatcctgagaatcggcgagagctataaggagaagcagcggaccatccaggccaagaaggaggtggagcagcggagagccggcggctacagccggaagtacgccagcaaagccaagaatctggcagacgatatggtgagaaacaccgctagagatctgctgtactacgccgtgacccaggatgccatgctgatcttcgccaacctgagccggggcttcggccggcagggcaagcggaccttcatggccgagagacagtacacacggatggaggactggctgaccgccaagctggcctacgagggcctgagcaagacctacctgtccaagacactggcccagtacacctccaagacatgcagcaactgtgggtttaccatcaccagcgccgactacgacagggtgctggagaagctgaagaagacagcaacaggctggatgaccacaattaacggcaaggagctgaaggtggagggccagattacctactacaacagatacaagagacagaacgtagtcaaggacctgtccgtcgagctggatagactgagcgaagaatctgtgaacaacgacatctcctcctggacaaagggcagaagcggagaagctctgagcctcctgaagaaaagattctcccatagacccgtgcaggagaagttcgtgtgcctgaactgcggcttcgagacacacgcagccgagcaagccgccctgaacatcgccagatcctggctgttcctgcggagccaggagtacaagaaataccagacaaacaagacaaccggcaacaccgataagagagccttcgtcgagacctggcagtccttttaccggaagaagcttaaggaggtgtggaaacctgccgtgcggtctggcggatctggcggaggctcctgcccagggcagcgtgatgttcaccgacgtgagcatcgacttcagccaggaggagtgggagttcctgaaccccgaccagagggacctgtacaaggacgtgatgctggagaactacagcaacctggtgagcatgggcctgtacatccccaagccccaggtgatcagcctgctggagcagggcaaggagccctggatgatcggcagggagctgaccaggggcctgtgcagcgccctggagagcatgggatctggctccggcagcggccccaagaaaaagagaaaagtctaagctgccttctgcggggcttgccttctggccatgcccttcttctctcccttgcacctgtacctcttggtctttgaataaagcctgagtaggaaggctagcaaaaaaaaaaaaaaaaaaaaaaaaaaaaaaaaaaaaaaaaaaaaaaaaaaaaaaaaaaaaaaaaaaaaaaaaaaaaaaaa

SEQ ID NO: 16746 - RNA, 9485 nt, synthetic construct
  source 1..9485: mol_type = other RNA
aggaaataagagagaaaagaagagtaagaagaaatataagagccaccatggcccctaagaagaagcgtaaagtgagccggatggaacgcctcgtctacgaggtgcggcagaagtgcagaaacatcgaggacatctgcatctcctgcggatctctgaacgtgaccctggagcacccactgttcatcggcggcatgtgccagaactgtaaaaactgttttctggagtgtgcctatcaatacgacgatgacggctaccagagctactgcaccatctgttgcggcggaagagaggtgctgatgtgtggaaataacaactgctgccggtgcttctgcgtggaatgcgtggacctgctggtgggccccggcgccgcccaggccgctattaaggaagatccttggaactgctacatgtgcggccacaagggcacatacggcctgctgagacggagagaggactggcctagcagactgcagatgttcttcgccaataaccacgaccaggagttcgacccccctaaggtgtaccctcccgtccccgccgagaagagaaagcccatccgggtcctgagcctgttcgatggcatcgccaccggtctgctggtgctgaaggacctgggcatccaggtggataggtacattgcctccgaggtgtgcgaggactccatcaccgtgggaatggtgcgtcatcagggcaagatcatgtacgtgggcgacgtgcggagcgtgacacagaagcatatccaggagtggggccctttcgacctggtgatcggcggcagcccttgcaatgacctgagcatcgtgaacccagcccggaagggcctgtacgagggaaccggcagactgttcttcgagttttacagactgctgcacgacgcccggcctaaggaaggcgacgaccggcccttcttttggctgttcgagaatgtggtggccatgggagtcagcgacaagcgggatattagccggttcctggagagcaaccccgtgatgatcgatgccaaggaagtgagcgccgcccaccgggccagatacttctggggcaatctgcctggcatgaacagacccctggccagcaccgtgaacgacaagctggagctgcaggagtgcctggagcacggccggatcgccaagttcagcaaggtgagaaccatcaccacccgaagcaacagcatcaaacaaggcaaggaccagcactttcctgtgttcatgaacgagaaggaggacatcctgtggtgtaccgagatggagagagtgttcgggttcccagtccactacacagatgtcagcaacatgtctagactggccagacagagactgctgggaagaagctggtccgtccctgtgatcagacacctgttcgcccctctgaaggagtacttcgcctgcgtgagcagcggcaacagcaacgccaacagccggggccccagcttctctagcggcctggtgccactgtccctgagagggagccacatgggccccatggagatctacaaaaccgtgagcgcctggaagcggcagcctgtgcgcgtgctgagcctgtttcggaatatcgataaagtcctgaaaagcctgggattcctggagagcggctctggctccggcggtggcaccctgaagtacgtggaggatgtgacaaacgtggtcagacgggatgtggagaagtggggccccttcgatctggtgtacggcagcacccaacccctgggcagctcttgtgaccggtgccctggctggtacatgtttcagttccaccggatcctgcagtacgccctgccgagacaggagtcccagcggccattcttttggattttcatggacaacttgctgctgaccgaggatgaccaggaaactaccactcggttcctgcagaccgaagccgtgaccctgcaggacgtgagaggccgggactaccagaacgccatgcgggtgtggtccaacatccctggactgaaaagcaagcacgcacctctgacccctaaagaagaggagtacctgcaggcccaggtgcggagcagaagcaagctggacgcccctaaggtggatctgctggtgaagaattgcctcctgcccctgagagagtacttcaagtatttcagccagaatagtctgcccctgggaggcagcggcggcggcgccctggtgacatttgaggacgtcgccgtgcggttcacccaggaggaatgggctctgctggatccttctcagaaaatcctgtaccgggacgtgatgagagagacataccggaatctgacctccgtgggcatcaactgggaatgttgggaccttgaagcctgcttcagaagcctgggaagaaacctgagagtgcaggtggtgaagagaaagtgcgagctgaccaacagcggcccctgcgccgagggcggcccaagcagcggcgcccctcctcccagcggcggcagcccagccggctccccaacctctaccgaggagggcacctctgagtccgccacccccgagagcggccctggcacctccaccgagcccagcgagggcagcgcacccggcagccctgccggcagccccacctccacagaggagggaaccagcaccgagcccagcgaaggcagcgccccaggcaccagcaccgagcctagtgagcaggagattaaacggatcaacaagatcagaagaagacttgtgaaagacagcaacaccaagaaggccggcaagacaggccccatgaaaaccctgctggttagagtgatgacacccgatctgagagagcggctggaaaacctgagaaagaagcctgaaaatatcccccagcccatcagcaatacatctagagccaacctgaataagctgctgaccgattacaccgaaatgaagaaggcgatcctgcatgtgtactgggaagagttccagaaggaccctgtgggcctgatgagccgggtggcccagcctgccagcaagaagatcgatcagaacaagctgaaacctgagatggacgagaagggcaacctgaccaccgccggctttgcctgctctcagtgtggccagcccctgttcgtgtacaagctggagcaggtgtctgagaagggcaaggcttacaccaactacttcggacggtgcaatgtggccgagcacgaaaagctgatcctgctggcccagctgaagcccgagaaggatagcgacgaagccgtgacatatagcctgggaaagtttgggcagagggccctggatttctacagcattcatgtgaccaaggagtccacccaccccgtgaagcccctggcccagatcgccggaaacagatacgcctccggacctgtgggaaaggccctgagcgacgcatgtatgggcacaatcgcctccttcctgtctaagtaccaggacatcatcatcgaacaccagaaggtggtgaagggcaaccagaagagactggagagcctgcgggagctggccggcaaggaaaacctggaataccctagcgtgaccctgccacctcagcctcacaccaaggagggcgttgatgcctacaacgaagtgatcgcccgggtgcgaatgtgggtgaacctgaacctgtggcagaagctgaagctaagcagagatgatgccaagcctctgctgagactgaagggattcccttcctttcctctggtcgagagacaggccaacgaagtggactggtgggacatggtgtgtaacgtgaagaagctgatcaacgagaaaaaggaggatggcaaggtgttttggcagaatctggctggctacaagagacaggaagccctgagaccatacctgagcagcgaggaagatcggaagaagggaaagaaattcgctcggtaccagctgggcgacctgctgctgcacctggaaaagaagcacggcgaggactggggaaaggtgtacgacgaggcctgggagcggattgacaagaaagtggaaggcctgagcaagcacatcaagctggaagaggaacggagaagcgaggacgcccagagcaaggccgccctgaccgactggctgcgggctaaggccagcttcgtgatcgagggcctgaaggaggccgacaaggacgagttctgcagatgcgagctgaagctgcagaagtggtacggggacctgcggggaaagcccttcgccatcgaagccgagaacagcatcctggacatcagcggcttcagcaagcagtacaactgtgccttcatctggcagaaggacggcgtgaagaagctgaacctgtacctgatcatcaactacttcaagggcggcaagctgcggttcaagaagatcaaacctgaagccttcgaagccaacagattctacaccgtgatcaacaaaaagagcggcgagatcgtgcccatggaggtgaacttcaacttcgacgaccccaacctgatcatcctgcctctggcctttggcaagagacagggcagagaattcatctggaacgacctgctgtccctggaaaccggcagcctgaagctggccaacggaagagtgatcgagaagacactgtacaacagaagaacccggcaggatgagcctgccctgttcgtggccctgaccttcgagcggcgggaggtcctggactcctccaatatcaaaccaatgaacctgatcggcgtggcaagaggcgaaaacatccccgccgtgatcgccctgaccgaccccgagggctgcccactgagccggtttaaggatagcctgggaaacccaacccacatcctgagaatcggcgagagctataaggagaagcagcggaccatccaggccaagaaggaggtggagcagcggagagccggcggctacagccggaagtacgccagcaaagccaagaatctggcagacgatatggtgagaaacaccgctagagatctgctgtactacgccgtgacccaggatgccatgctgatcttcgccaacctgagccggggcttcggccggcagggcaagcggaccttcatggccgagagacagtacacacggatggaggactggctgaccgccaagctggcctacgagggcctgagcaagacctacctgtccaagacactggcccagtacacctccaagacatgcagcaactgtgggtttaccatcaccagcgccgactacgacagggtgctggagaagctgaagaagacagcaacaggctggatgaccacaattaacggcaaggagctgaaggtggagggccagattacctactacaacagatacaagagacagaacgtagtcaaggacctgtccgtcgagctggatagactgagcgaagaatctgtgaacaacgacatctcctcctggacaaagggcagaagcggagaagctctgagcctcctgaagaaaagattctcccatagacccgtgcaggagaagttcgtgtgcctgaactgcggcttcgagacacacgcagccgagcaagccgccctgaacatcgccagatcctggctgttcctgcggagccaggagtacaagaaataccagacaaacaagacaaccggcaacaccgataagagagccttcgtcgagacctggcagtccttttaccggaagaagcttaaggaggtgtggaaacctgccgtgcggtctggcggatctggcggaggctccccccaggacctgatgaccttcgacgacgtggccgtggagttcacccagtgggagtggggccagctgaaccccgcccagaaggacctgtacagggaggtgatgctggagaacttcaggaacctgaccctgctgggcctgctggtgagcaagccctacatgatctgccagctggaggagggcggcgagcccttcatggtgaacaccgagatcagcgtgggcgcccacagcgactgggagaggaggggcggcccaagcagcggcgcccctcctcccagcggcggcagcccagccggctccccaacctctaccgaggagggcacctctgagtccgccacccccgagagcggccctggcacctccaccgagcccagcgagggcagcgcacccggcagccctgccggcagccccacctccacagaggagggaaccagcaccgagcccagcgaaggcagcgccccaggcaccagcaccgagcctagtgagcaggagattaaacggatcaacaagatcagaagaagacttgtgaaagacagcaacaccaagaaggccggcaagacaggccccatgaaaaccctgctggttagagtgatgacacccgatctgagagagcggctggaaaacctgagaaagaagcctgaaaatatcccccagcccatcagcaatacatctagagccaacctgaataagctgctgaccgattacaccgaaatgaagaaggcgatcctgcatgtgtactgggaagagttccagaaggaccctgtgggcctgatgagccgggtggcccagcctgccagcaagaagatcgatcagaacaagctgaaacctgagatggacgagaagggcaacctgaccaccgccggctttgcctgctctcagtgtggccagcccctgttcgtgtacaagctggagcaggtgtctgagaagggcaaggcttacaccaactacttcggacggtgcaatgtggccgagcacgaaaagctgatcctgctggcccagctgaagcccgagaaggatagcgacgaagccgtgacatatagcctgggaaagtttgggcagagggccctggatttctacagcattcatgtgaccaaggagtccacccaccccgtgaagcccctggcccagatcgccggaaacagatacgcctccggacctgtgggaaaggccctgagcgacgcatgtatgggcacaatcgcctccttcctgtctaagtaccaggacatcatcatcgaacaccagaaggtggtgaagggcaaccagaagagactggagagcctgcgggagctggccggcaaggaaaacctggaataccctagcgtgaccctgccacctcagcctcacaccaaggagggcgttgatgcctacaacgaagtgatcgcccgggtgcgaatgtgggtgaacctgaacctgtggcagaagctgaagctaagcagagatgatgccaagcctctgctgagactgaagggattcccttcctttcctctggtcgagagacaggccaacgaagtggactggtgggacatggtgtgtaacgtgaagaagctgatcaacgagaaaaaggaggatggcaaggtgttttggcagaatctggctggctacaagagacaggaagccctgagaccatacctgagcagcgaggaagatcggaagaagggaaagaaattcgctcggtaccagctgggcgacctgctgctgcacctggaaaagaagcacggcgaggactggggaaaggtgtacgacgaggcctgggagcggattgacaagaaagtggaaggcctgagcaagcacatcaagctggaagaggaacggagaagcgaggacgcccagagcaaggccgccctgaccgactggctgcgggctaaggccagcttcgtgatcgagggcctgaaggaggccgacaaggacgagttctgcagatgcgagctgaagctgcagaagtggtacggggacctgcggggaaagcccttcgccatcgaagccgagaacagcatcctggacatcagcggcttcagcaagcagtacaactgtgccttcatctggcagaaggacggcgtgaagaagctgaacctgtacctgatcatcaactacttcaagggcggcaagctgcggttcaagaagatcaaacctgaagccttcgaagccaacagattctacaccgtgatcaacaaaaagagcggcgagatcgtgcccatggaggtgaacttcaacttcgacgaccccaacctgatcatcctgcctctggcctttggcaagagacagggcagagaattcatctggaacgacctgctgtccctggaaaccggcagcctgaagctggccaacggaagagtgatcgagaagacactgtacaacagaagaacccggcaggatgagcctgccctgttcgtggccctgaccttcgagcggcgggaggtcctggactcctccaatatcaaaccaatgaacctgatcggcgtggcaagaggcgaaaacatccccgccgtgatcgccctgaccgaccccgagggctgcccactgagccggtttaaggatagcctgggaaacccaacccacatcctgagaatcggcgagagctataaggagaagcagcggaccatccaggccaagaaggaggtggagcagcggagagccggcggctacagccggaagtacgccagcaaagccaagaatctggcagacgatatggtgagaaacaccgctagagatctgctgtactacgccgtgacccaggatgccatgctgatcttcgccaacctgagccggggcttcggccggcagggcaagcggaccttcatggccgagagacagtacacacggatggaggactggctgaccgccaagctggcctacgagggcctgagcaagacctacctgtccaagacactggcccagtacacctccaagacatgcagcaactgtgggtttaccatcaccagcgccgactacgacagggtgctggagaagctgaagaagacagcaacaggctggatgaccacaattaacggcaaggagctgaaggtggagggccagattacctactacaacagatacaagagacagaacgtagtcaaggacctgtccgtcgagctggatagactgagcgaagaatctgtgaacaacgacatctcctcctggacaaagggcagaagcggagaagctctgagcctcctgaagaaaagattctcccatagacccgtgcaggagaagttcgtgtgcctgaactgcggcttcgagacacacgcagccgagcaagccgccctgaacatcgccagatcctggctgttcctgcggagccaggagtacaagaaataccagacaaacaagacaaccggcaacaccgataagagagccttcgtcgagacctggcagtccttttaccggaagaagcttaaggaggtgtggaaacctgccgtgcggtctggcggatctggcggaggctcctccccaggacctgatgaccttcgacgacgtggccgtggagttcacccagtgggagtggggccagctgaaccccgcccagaaggacctgtacagggaggtgatgctggagaacttcaggaacctgaccctgctgggcctgctggtgagcaagccctacatgatctgccagctggaggagggcggcgagcccttcatggtgaacaccgagatcagcgtgggcgcccacagcgactgggagaggaggggatctggctccggcagcggccccaagaaaaagagaaaagtctaagctgccttctgcggggcttgccttctggccatgcccttcttctctcccttgcacctgtacctcttggtctttgaataaagcctgagtaggaaggctagcaaaaaaaaaaaaaaaaaaaaaaaaaaaaaaaaaaaaaaaaaaaaaaaaaaaaaaaaaaaaaaaaaaaaaaaaaaaaaaaa

SEQ ID NO: 16747 - RNA, 9485 nt, synthetic construct
  source 1..9485: mol_type = other RNA
aggaaataagagagaaaagaagagtaagaagaaatataagagccaccatggcccctaagaagaagcgtaaagtgagccggatggaacgcctcgtctacgaggtgcggcagaagtgcagaaacatcgaggacatctgcatctcctgcggatctctgaacgtgaccctggagcacccactgttcatcggcggcatgtgccagaactgtaaaaactgttttctggagtgtgcctatcaatacgacgatgacggctaccagagctactgcaccatctgttgcggcggaagagaggtgctgatgtgtggaaataacaactgctgccggtgcttctgcgtggaatgcgtggacctgctggtgggccccggcgccgcccaggccgctattaaggaagatccttggaactgctacatgtgcggccacaagggcacatacggcctgctgagacggagagaggactggcctagcagactgcagatgttcttcgccaataaccacgaccaggagttcgacccccctaaggtgtaccctcccgtccccgccgagaagagaaagcccatccgggtcctgagcctgttcgatggcatcgccaccggtctgctggtgctgaaggacctgggcatccaggtggataggtacattgcctccgaggtgtgcgaggactccatcaccgtgggaatggtgcgtcatcagggcaagatcatgtacgtgggcgacgtgcggagcgtgacacagaagcatatccaggagtggggccctttcgacctggtgatcggcggcagcccttgcaatgacctgagcatcgtgaacccagcccggaagggcctgtacgagggaaccggcagactgttcttcgagttttacagactgctgcacgacgcccggcctaaggaaggcgacgaccggcccttcttttggctgttcgagaatgtggtggccatgggagtcagcgacaagcgggatattagccggttcctggagagcaaccccgtgatgatcgatgccaaggaagtgagcgccgcccaccgggccagatacttctggggcaatctgcctggcatgaacagacccctggccagcaccgtgaacgacaagctggagctgcaggagtgcctggagcacggccggatcgccaagttcagcaaggtgagaaccatcaccacccgaagcaacagcatcaaacaaggcaaggaccagcactttcctgtgttcatgaacgagaaggaggacatcctgtggtgtaccgagatggagagagtgttcgggttcccagtccactacacagatgtcagcaacatgtctagactggccagacagagactgctgggaagaagctggtccgtccctgtgatcagacacctgttcgcccctctgaaggagtacttcgcctgcgtgagcagcggcaacagcaacgccaacagccggggccccagcttctctagcggcctggtgccactgtccctgagagggagccacatgggccccatggagatctacaaaaccgtgagcgcctggaagcggcagcctgtgcgcgtgctgagcctgtttcggaatatcgataaagtcctgaaaagcctgggattcctggagagcggctctggctccggcggtggcaccctgaagtacgtggaggatgtgacaaacgtggtcagacgggatgtggagaagtggggccccttcgatctggtgtacggcagcacccaacccctgggcagctcttgtgaccggtgccctggctggtacatgtttcagttccaccggatcctgcagtacgccctgccgagacaggagtcccagcggccattcttttggattttcatggacaacttgctgctgaccgaggatgaccaggaaactaccactcggttcctgcagaccgaagccgtgaccctgcaggacgtgagaggccgggactaccagaacgccatgcgggtgtggtccaacatccctggactgaaaagcaagcacgcacctctgacccctaaagaagaggagtacctgcaggcccaggtgcggagcagaagcaagctggacgcccctaaggtggatctgctggtgaagaattgcctcctgcccctgagagagtacttcaagtatttcagccagaatagtctgcccctgggaggcagcggcggcggcgccctggtgacatttgaggacgtcgccgtgcggttcacccaggaggaatgggctctgctggatccttctcagaaaatcctgtaccgggacgtgatgagagagacataccggaatctgacctccgtgggcatcaactgggaatgttgggaccttgaagcctgcttcagaagcctgggaagaaacctgagagtgcaggtggtgaagagaaagtgcgagctgaccaacagcggcccctgcgccgagggcggcccaagcagcggcgcccctcctcccagcggcggcagcccagccggctccccaacctctaccgaggagggcacctctgagtccgccacccccgagagcggccctggcacctccaccgagcccagcgagggcagcgcacccggcagccctgccggcagccccacctccacagaggagggaaccagcaccgagcccagcgaaggcagcgccccaggcaccagcaccgagcctagtgagcaggagattaaacggatcaacaagatcagaagaagacttgtgaaagacagcaacaccaagaaggccggcaagacaggccccatgaaaaccctgctggttagagtgatgacacccgatctgagagagcggctggaaaacctgagaaagaagcctgaaaatatcccccagcccatcagcaatacatctagagccaacctgaataagctgctgaccgattacaccgaaatgaagaaggcgatcctgcatgtgtactgggaagagttccagaaggaccctgtgggcctgatgagccgggtggcccagcctgccagcaagaagatcgatcagaacaagctgaaacctgagatggacgagaagggcaacctgaccaccgccggctttgcctgctctcagtgtggccagcccctgttcgtgtacaagctggagcaggtgtctgagaagggcaaggcttacaccaactacttcggacggtgcaatgtggccgagcacgaaaagctgatcctgctggcccagctgaagcccgagaaggatagcgacgaagccgtgacatatagcctgggaaagtttgggcagagggccctggatttctacagcattcatgtgaccaaggagtccacccaccccgtgaagcccctggcccagatcgccggaaacagatacgcctccggacctgtgggaaaggccctgagcgacgcatgtatgggcacaatcgcctccttcctgtctaagtaccaggacatcatcatcgaacaccagaaggtggtgaagggcaaccagaagagactggagagcctgcgggagctggccggcaaggaaaacctggaataccctagcgtgaccctgccacctcagcctcacaccaaggagggcgttgatgcctacaacgaagtgatcgcccgggtgcgaatgtgggtgaacctgaacctgtggcagaagctgaagctaagcagagatgatgccaagcctctgctgagactgaagggattcccttcctttcctctggtcgagagacaggccaacgaagtggactggtgggacatggtgtgtaacgtgaagaagctgatcaacgagaaaaaggaggatggcaaggtgttttggcagaatctggctggctacaagagacaggaagccctgagaccatacctgagcagcgaggaagatcggaagaagggaaagaaattcgctcggtaccagctgggcgacctgctgctgcacctggaaaagaagcacggcgaggactggggaaaggtgtacgacgaggcctgggagcggattgacaagaaagtggaaggcctgagcaagcacatcaagctggaagaggaacggagaagcgaggacgcccagagcaaggccgccctgaccgactggctgcgggctaaggccagcttcgtgatcgagggcctgaaggaggccgacaaggacgagttctgcagatgcgagctgaagctgcagaagtggtacggggacctgcggggaaagcccttcgccatcgaagccgagaacagcatcctggacatcagcggcttcagcaagcagtacaactgtgccttcatctggcagaaggacggcgtgaagaagctgaacctgtacctgatcatcaactacttcaagggcggcaagctgcggttcaagaagatcaaacctgaagccttcgaagccaacagattctacaccgtgatcaacaaaaagagcggcgagatcgtgcccatggaggtgaacttcaacttcgacgaccccaacctgatcatcctgcctctggcctttggcaagagacagggcagagaattcatctggaacgacctgctgtccctggaaaccggcagcctgaagctggccaacggaagagtgatcgagaagacactgtacaacagaagaacccggcaggatgagcctgccctgttcgtggccctgaccttcgagcggcgggaggtcctggactcctccaatatcaaaccaatgaacctgatcggcgtggcaagaggcgaaaacatccccgccgtgatcgccctgaccgaccccgagggctgcccactgagccggtttaaggatagcctgggaaacccaacccacatcctgagaatcggcgagagctataaggagaagcagcggaccatccaggccaagaaggaggtggagcagcggagagccggcggctacagccggaagtacgccagcaaagccaagaatctggcagacgatatggtgagaaacaccgctagagatctgctgtactacgccgtgacccaggatgccatgctgatcttcgccaacctgagccggggcttcggccggcagggcaagcggaccttcatggccgagagacagtacacacggatggaggactggctgaccgccaagctggcctacgagggcctgagcaagacctacctgtccaagacactggcccagtacacctccaagacatgcagcaactgtgggtttaccatcaccagcgccgactacgacagggtgctggagaagctgaagaagacagcaacaggctggatgaccacaattaacggcaaggagctgaaggtggagggccagattacctactacaacagatacaagagacagaacgtagtcaaggacctgtccgtcgagctggatagactgagcgaagaatctgtgaacaacgacatctcctcctggacaaagggcagaagcggagaagctctgagcctcctgaagaaaagattctcccatagacccgtgcaggagaagttcgtgtgcctgaactgcggcttcgagacacacgcagccgagcaagccgccctgaacatcgccagatcctggctgttcctgcggagccaggagtacaagaaataccagacaaacaagacaaccggcaacaccgataagagagccttcgtcgagacctggcagtccttttaccggaagaagcttaaggaggtgtggaaacctgccgtgcggtctggcggatctggcggaggctccaggagggagagcgtgaccttcgaggacgtggccgtgtacttcagcgagaacgagtggatcggcctgggccccgcccagagggccctgtacagggacgtgatgctggagaactacggcgccgtggccagcctggccttccccttccccaagcccgccctgatcagccagctggagaggggcgagaccccctggtgcagcgtgccccagggcgccctggacggcgaggcccccaggggcatcagcggcggcccaagcagcggcgcccctcctcccagcggcggcagcccagccggctccccaacctctaccgaggagggcacctctgagtccgccacccccgagagcggccctggcacctccaccgagcccagcgagggcagcgcacccggcagccctgccggcagccccacctccacagaggagggaaccagcaccgagcccagcgaaggcagcgccccaggcaccagcaccgagcctagtgagcaggagattaaacggatcaacaagatcagaagaagacttgtgaaagacagcaacaccaagaaggccggcaagacaggccccatgaaaaccctgctggttagagtgatgacacccgatctgagagagcggctggaaaacctgagaaagaagcctgaaaatatcccccagcccatcagcaatacatctagagccaacctgaataagctgctgaccgattacaccgaaatgaagaaggcgatcctgcatgtgtactgggaagagttccagaaggaccctgtgggcctgatgagccgggtggcccagcctgccagcaagaagatcgatcagaacaagctgaaacctgagatggacgagaagggcaacctgaccaccgccggctttgcctgctctcagtgtggccagcccctgttcgtgtacaagctggagcaggtgtctgagaagggcaaggcttacaccaactacttcggacggtgcaatgtggccgagcacgaaaagctgatcctgctggcccagctgaagcccgagaaggatagcgacgaagccgtgacatatagcctgggaaagtttgggcagagggccctggatttctacagcattcatgtgaccaaggagtccacccaccccgtgaagcccctggcccagatcgccggaaacagatacgcctccggacctgtgggaaaggccctgagcgacgcatgtatgggcacaatcgcctccttcctgtctaagtaccaggacatcatcatcgaacaccagaaggtggtgaagggcaaccagaagagactggagagcctgcgggagctggccggcaaggaaaacctggaataccctagcgtgaccctgccacctcagcctcacaccaaggagggcgttgatgcctacaacgaagtgatcgcccgggtgcgaatgtgggtgaacctgaacctgtggcagaagctgaagctaagcagagatgatgccaagcctctgctgagactgaagggattcccttcctttcctctggtcgagagacaggccaacgaagtggactggtgggacatggtgtgtaacgtgaagaagctgatcaacgagaaaaaggaggatggcaaggtgttttggcagaatctggctggctacaagagacaggaagccctgagaccatacctgagcagcgaggaagatcggaagaagggaaagaaattcgctcggtaccagctgggcgacctgctgctgcacctggaaaagaagcacggcgaggactggggaaaggtgtacgacgaggcctgggagcggattgacaagaaagtggaaggcctgagcaagcacatcaagctggaagaggaacggagaagcgaggacgcccagagcaaggccgccctgaccgactggctgcgggctaaggccagcttcgtgatcgagggcctgaaggaggccgacaaggacgagttctgcagatgcgagctgaagctgcagaagtggtacggggacctgcggggaaagcccttcgccatcgaagccgagaacagcatcctggacatcagcggcttcagcaagcagtacaactgtgccttcatctggcagaaggacggcgtgaagaagctgaacctgtacctgatcatcaactacttcaagggcggcaagctgcggttcaagaagatcaaacctgaagccttcgaagccaacagattctacaccgtgatcaacaaaaagagcggcgagatcgtgcccatggaggtgaacttcaacttcgacgaccccaacctgatcatcctgcctctggcctttggcaagagacagggcagagaattcatctggaacgacctgctgtccctggaaaccggcagcctgaagctggccaacggaagagtgatcgagaagacactgtacaacagaagaacccggcaggatgagcctgccctgttcgtggccctgaccttcgagcggcgggaggtcctggactcctccaatatcaaaccaatgaacctgatcggcgtggcaagaggcgaaaacatccccgccgtgatcgccctgaccgaccccgagggctgcccactgagccggtttaaggatagcctgggaaacccaacccacatcctgagaatcggcgagagctataaggagaagcagcggaccatccaggccaagaaggaggtggagcagcggagagccggcggctacagccggaagtacgccagcaaagccaagaatctggcagacgatatggtgagaaacaccgctagagatctgctgtactacgccgtgacccaggatgccatgctgatcttcgccaacctgagccggggcttcggccggcagggcaagcggaccttcatggccgagagacagtacacacggatggaggactggctgaccgccaagctggcctacgagggcctgagcaagacctacctgtccaagacactggcccagtacacctccaagacatgcagcaactgtgggtttaccatcaccagcgccgactacgacagggtgctggagaagctgaagaagacagcaacaggctggatgaccacaattaacggcaaggagctgaaggtggagggccagattacctactacaacagatacaagagacagaacgtagtcaaggacctgtccgtcgagctggatagactgagcgaagaatctgtgaacaacgacatctcctcctggacaaagggcagaagcggagaagctctgagcctcctgaagaaaagattctcccatagacccgtgcaggagaagttcgtgtgcctgaactgcggcttcgagacacacgcagccgagcaagccgccctgaacatcgccagatcctggctgttcctgcggagccaggagtacaagaaataccagacaaacaagacaaccggcaacaccgataagagagccttcgtcgagacctggcagtccttttaccggaagaagcttaaggaggtgtggaaacctgccgtgcggtctggcggatctggcggaggctcctaggagggagagcgtgaccttcgaggacgtggccgtgtacttcagcgagaacgagtggatcggcctgggccccgcccagagggccctgtacagggacgtgatgctggagaactacggcgccgtggccagcctggccttccccttccccaagcccgccctgatcagccagctggagaggggcgagaccccctggtgcagcgtgccccagggcgccctggacggcgaggcccccaggggcatcagcggatctggctccggcagcggccccaagaaaaagagaaaagtctaagctgccttctgcggggcttgccttctggccatgcccttcttctctcccttgcacctgtacctcttggtctttgaataaagcctgagtaggaaggctagcaaaaaaaaaaaaaaaaaaaaaaaaaaaaaaaaaaaaaaaaaaaaaaaaaaaaaaaaaaaaaaaaaaaaaaaaaaaaaaaa

SEQ ID NO: 16748 - RNA, 9485 nt, synthetic construct
  source 1..9485: mol_type = other RNA
aggaaataagagagaaaagaagagtaagaagaaatataagagccaccatggcccctaagaagaagcgtaaagtgagccggatggaacgcctcgtctacgaggtgcggcagaagtgcagaaacatcgaggacatctgcatctcctgcggatctctgaacgtgaccctggagcacccactgttcatcggcggcatgtgccagaactgtaaaaactgttttctggagtgtgcctatcaatacgacgatgacggctaccagagctactgcaccatctgttgcggcggaagagaggtgctgatgtgtggaaataacaactgctgccggtgcttctgcgtggaatgcgtggacctgctggtgggccccggcgccgcccaggccgctattaaggaagatccttggaactgctacatgtgcggccacaagggcacatacggcctgctgagacggagagaggactggcctagcagactgcagatgttcttcgccaataaccacgaccaggagttcgacccccctaaggtgtaccctcccgtccccgccgagaagagaaagcccatccgggtcctgagcctgttcgatggcatcgccaccggtctgctggtgctgaaggacctgggcatccaggtggataggtacattgcctccgaggtgtgcgaggactccatcaccgtgggaatggtgcgtcatcagggcaagatcatgtacgtgggcgacgtgcggagcgtgacacagaagcatatccaggagtggggccctttcgacctggtgatcggcggcagcccttgcaatgacctgagcatcgtgaacccagcccggaagggcctgtacgagggaaccggcagactgttcttcgagttttacagactgctgcacgacgcccggcctaaggaaggcgacgaccggcccttcttttggctgttcgagaatgtggtggccatgggagtcagcgacaagcgggatattagccggttcctggagagcaaccccgtgatgatcgatgccaaggaagtgagcgccgcccaccgggccagatacttctggggcaatctgcctggcatgaacagacccctggccagcaccgtgaacgacaagctggagctgcaggagtgcctggagcacggccggatcgccaagttcagcaaggtgagaaccatcaccacccgaagcaacagcatcaaacaaggcaaggaccagcactttcctgtgttcatgaacgagaaggaggacatcctgtggtgtaccgagatggagagagtgttcgggttcccagtccactacacagatgtcagcaacatgtctagactggccagacagagactgctgggaagaagctggtccgtccctgtgatcagacacctgttcgcccctctgaaggagtacttcgcctgcgtgagcagcggcaacagcaacgccaacagccggggccccagcttctctagcggcctggtgccactgtccctgagagggagccacatgggccccatggagatctacaaaaccgtgagcgcctggaagcggcagcctgtgcgcgtgctgagcctgtttcggaatatcgataaagtcctgaaaagcctgggattcctggagagcggctctggctccggcggtggcaccctgaagtacgtggaggatgtgacaaacgtggtcagacgggatgtggagaagtggggccccttcgatctggtgtacggcagcacccaacccctgggcagctcttgtgaccggtgccctggctggtacatgtttcagttccaccggatcctgcagtacgccctgccgagacaggagtcccagcggccattcttttggattttcatggacaacttgctgctgaccgaggatgaccaggaaactaccactcggttcctgcagaccgaagccgtgaccctgcaggacgtgagaggccgggactaccagaacgccatgcgggtgtggtccaacatccctggactgaaaagcaagcacgcacctctgacccctaaagaagaggagtacctgcaggcccaggtgcggagcagaagcaagctggacgcccctaaggtggatctgctggtgaagaattgcctcctgcccctgagagagtacttcaagtatttcagccagaatagtctgcccctgggaggcagcggcggcggcgccctggtgacatttgaggacgtcgccgtgcggttcacccaggaggaatgggctctgctggatccttctcagaaaatcctgtaccgggacgtgatgagagagacataccggaatctgacctccgtgggcatcaactgggaatgttgggaccttgaagcctgcttcagaagcctgggaagaaacctgagagtgcaggtggtgaagagaaagtgcgagctgaccaacagcggcccctgcgccgagggcggcccaagcagcggcgcccctcctcccagcggcggcagcccagccggctccccaacctctaccgaggagggcacctctgagtccgccacccccgagagcggccctggcacctccaccgagcccagcgagggcagcgcacccggcagccctgccggcagccccacctccacagaggagggaaccagcaccgagcccagcgaaggcagcgccccaggcaccagcaccgagcctagtgagcaggagattaaacggatcaacaagatcagaagaagacttgtgaaagacagcaacaccaagaaggccggcaagacaggccccatgaaaaccctgctggttagagtgatgacacccgatctgagagagcggctggaaaacctgagaaagaagcctgaaaatatcccccagcccatcagcaatacatctagagccaacctgaataagctgctgaccgattacaccgaaatgaagaaggcgatcctgcatgtgtactgggaagagttccagaaggaccctgtgggcctgatgagccgggtggcccagcctgccagcaagaagatcgatcagaacaagctgaaacctgagatggacgagaagggcaacctgaccaccgccggctttgcctgctctcagtgtggccagcccctgttcgtgtacaagctggagcaggtgtctgagaagggcaaggcttacaccaactacttcggacggtgcaatgtggccgagcacgaaaagctgatcctgctggcccagctgaagcccgagaaggatagcgacgaagccgtgacatatagcctgggaaagtttgggcagagggccctggatttctacagcattcatgtgaccaaggagtccacccaccccgtgaagcccctggcccagatcgccggaaacagatacgcctccggacctgtgggaaaggccctgagcgacgcatgtatgggcacaatcgcctccttcctgtctaagtaccaggacatcatcatcgaacaccagaaggtggtgaagggcaaccagaagagactggagagcctgcgggagctggccggcaaggaaaacctggaataccctagcgtgaccctgccacctcagcctcacaccaaggagggcgttgatgcctacaacgaagtgatcgcccgggtgcgaatgtgggtgaacctgaacctgtggcagaagctgaagctaagcagagatgatgccaagcctctgctgagactgaagggattcccttcctttcctctggtcgagagacaggccaacgaagtggactggtgggacatggtgtgtaacgtgaagaagctgatcaacgagaaaaaggaggatggcaaggtgttttggcagaatctggctggctacaagagacaggaagccctgagaccatacctgagcagcgaggaagatcggaagaagggaaagaaattcgctcggtaccagctgggcgacctgctgctgcacctggaaaagaagcacggcgaggactggggaaaggtgtacgacgaggcctgggagcggattgacaagaaagtggaaggcctgagcaagcacatcaagctggaagaggaacggagaagcgaggacgcccagagcaaggccgccctgaccgactggctgcgggctaaggccagcttcgtgatcgagggcctgaaggaggccgacaaggacgagttctgcagatgcgagctgaagctgcagaagtggtacggggacctgcggggaaagcccttcgccatcgaagccgagaacagcatcctggacatcagcggcttcagcaagcagtacaactgtgccttcatctggcagaaggacggcgtgaagaagctgaacctgtacctgatcatcaactacttcaagggcggcaagctgcggttcaagaagatcaaacctgaagccttcgaagccaacagattctacaccgtgatcaacaaaaagagcggcgagatcgtgcccatggaggtgaacttcaacttcgacgaccccaacctgatcatcctgcctctggcctttggcaagagacagggcagagaattcatctggaacgacctgctgtccctggaaaccggcagcctgaagctggccaacggaagagtgatcgagaagacactgtacaacagaagaacccggcaggatgagcctgccctgttcgtggccctgaccttcgagcggcgggaggtcctggactcctccaatatcaaaccaatgaacctgatcggcgtggcaagaggcgaaaacatccccgccgtgatcgccctgaccgaccccgagggctgcccactgagccggtttaaggatagcctgggaaacccaacccacatcctgagaatcggcgagagctataaggagaagcagcggaccatccaggccaagaaggaggtggagcagcggagagccggcggctacagccggaagtacgccagcaaagccaagaatctggcagacgatatggtgagaaacaccgctagagatctgctgtactacgccgtgacccaggatgccatgctgatcttcgccaacctgagccggggcttcggccggcagggcaagcggaccttcatggccgagagacagtacacacggatggaggactggctgaccgccaagctggcctacgagggcctgagcaagacctacctgtccaagacactggcccagtacacctccaagacatgcagcaactgtgggtttaccatcaccagcgccgactacgacagggtgctggagaagctgaagaagacagcaacaggctggatgaccacaattaacggcaaggagctgaaggtggagggccagattacctactacaacagatacaagagacagaacgtagtcaaggacctgtccgtcgagctggatagactgagcgaagaatctgtgaacaacgacatctcctcctggacaaagggcagaagcggagaagctctgagcctcctgaagaaaagattctcccatagacccgtgcaggagaagttcgtgtgcctgaactgcggcttcgagacacacgcagccgagcaagccgccctgaacatcgccagatcctggctgttcctgcggagccaggagtacaagaaataccagacaaacaagacaaccggcaacaccgataagagagccttcgtcgagacctggcagtccttttaccggaagaagcttaaggaggtgtggaaacctgccgtgcggtctggcggatctggcggaggctcccaggccgaggtgaccttcgaggacgtggccgtgtacctgagcagggaggagtggggcaggctgggccccgcccagaggggcctgtacagggacgtgatgctggagacctacggcaacctggtgagcctgggcgtgggccccgccggccccaagcccggcgtgatcagccagctggagaggggcgacgagccctgggtgctggacgtgcagggcaccagcggcaaggagcacctgagggtgaacggcggcccaagcagcggcgcccctcctcccagcggcggcagcccagccggctccccaacctctaccgaggagggcacctctgagtccgccacccccgagagcggccctggcacctccaccgagcccagcgagggcagcgcacccggcagccctgccggcagccccacctccacagaggagggaaccagcaccgagcccagcgaaggcagcgccccaggcaccagcaccgagcctagtgagcaggagattaaacggatcaacaagatcagaagaagacttgtgaaagacagcaacaccaagaaggccggcaagacaggccccatgaaaaccctgctggttagagtgatgacacccgatctgagagagcggctggaaaacctgagaaagaagcctgaaaatatcccccagcccatcagcaatacatctagagccaacctgaataagctgctgaccgattacaccgaaatgaagaaggcgatcctgcatgtgtactgggaagagttccagaaggaccctgtgggcctgatgagccgggtggcccagcctgccagcaagaagatcgatcagaacaagctgaaacctgagatggacgagaagggcaacctgaccaccgccggctttgcctgctctcagtgtggccagcccctgttcgtgtacaagctggagcaggtgtctgagaagggcaaggcttacaccaactacttcggacggtgcaatgtggccgagcacgaaaagctgatcctgctggcccagctgaagcccgagaaggatagcgacgaagccgtgacatatagcctgggaaagtttgggcagagggccctggatttctacagcattcatgtgaccaaggagtccacccaccccgtgaagcccctggcccagatcgccggaaacagatacgcctccggacctgtgggaaaggccctgagcgacgcatgtatgggcacaatcgcctccttcctgtctaagtaccaggacatcatcatcgaacaccagaaggtggtgaagggcaaccagaagagactggagagcctgcgggagctggccggcaaggaaaacctggaataccctagcgtgaccctgccacctcagcctcacaccaaggagggcgttgatgcctacaacgaagtgatcgcccgggtgcgaatgtgggtgaacctgaacctgtggcagaagctgaagctaagcagagatgatgccaagcctctgctgagactgaagggattcccttcctttcctctggtcgagagacaggccaacgaagtggactggtgggacatggtgtgtaacgtgaagaagctgatcaacgagaaaaaggaggatggcaaggtgttttggcagaatctggctggctacaagagacaggaagccctgagaccatacctgagcagcgaggaagatcggaagaagggaaagaaattcgctcggtaccagctgggcgacctgctgctgcacctggaaaagaagcacggcgaggactggggaaaggtgtacgacgaggcctgggagcggattgacaagaaagtggaaggcctgagcaagcacatcaagctggaagaggaacggagaagcgaggacgcccagagcaaggccgccctgaccgactggctgcgggctaaggccagcttcgtgatcgagggcctgaaggaggccgacaaggacgagttctgcagatgcgagctgaagctgcagaagtggtacggggacctgcggggaaagcccttcgccatcgaagccgagaacagcatcctggacatcagcggcttcagcaagcagtacaactgtgccttcatctggcagaaggacggcgtgaagaagctgaacctgtacctgatcatcaactacttcaagggcggcaagctgcggttcaagaagatcaaacctgaagccttcgaagccaacagattctacaccgtgatcaacaaaaagagcggcgagatcgtgcccatggaggtgaacttcaacttcgacgaccccaacctgatcatcctgcctctggcctttggcaagagacagggcagagaattcatctggaacgacctgctgtccctggaaaccggcagcctgaagctggccaacggaagagtgatcgagaagacactgtacaacagaagaacccggcaggatgagcctgccctgttcgtggccctgaccttcgagcggcgggaggtcctggactcctccaatatcaaaccaatgaacctgatcggcgtggcaagaggcgaaaacatccccgccgtgatcgccctgaccgaccccgagggctgcccactgagccggtttaaggatagcctgggaaacccaacccacatcctgagaatcggcgagagctataaggagaagcagcggaccatccaggccaagaaggaggtggagcagcggagagccggcggctacagccggaagtacgccagcaaagccaagaatctggcagacgatatggtgagaaacaccgctagagatctgctgtactacgccgtgacccaggatgccatgctgatcttcgccaacctgagccggggcttcggccggcagggcaagcggaccttcatggccgagagacagtacacacggatggaggactggctgaccgccaagctggcctacgagggcctgagcaagacctacctgtccaagacactggcccagtacacctccaagacatgcagcaactgtgggtttaccatcaccagcgccgactacgacagggtgctggagaagctgaagaagacagcaacaggctggatgaccacaattaacggcaaggagctgaaggtggagggccagattacctactacaacagatacaagagacagaacgtagtcaaggacctgtccgtcgagctggatagactgagcgaagaatctgtgaacaacgacatctcctcctggacaaagggcagaagcggagaagctctgagcctcctgaagaaaagattctcccatagacccgtgcaggagaagttcgtgtgcctgaactgcggcttcgagacacacgcagccgagcaagccgccctgaacatcgccagatcctggctgttcctgcggagccaggagtacaagaaataccagacaaacaagacaaccggcaacaccgataagagagccttcgtcgagacctggcagtccttttaccggaagaagcttaaggaggtgtggaaacctgccgtgcggtctggcggatctggcggaggctcctcaggccgaggtgaccttcgaggacgtggccgtgtacctgagcagggaggagtggggcaggctgggccccgcccagaggggcctgtacagggacgtgatgctggagacctacggcaacctggtgagcctgggcgtgggccccgccggccccaagcccggcgtgatcagccagctggagaggggcgacgagccctgggtgctggacgtgcagggcaccagcggcaaggagcacctgagggtgaacggatctggctccggcagcggccccaagaaaaagagaaaagtctaagctgccttctgcggggcttgccttctggccatgcccttcttctctcccttgcacctgtacctcttggtctttgaataaagcctgagtaggaaggctagcaaaaaaaaaaaaaaaaaaaaaaaaaaaaaaaaaaaaaaaaaaaaaaaaaaaaaaaaaaaaaaaaaaaaaaaaaaaaaaaa

SEQ ID NO: 16749 - RNA, 9485 nt, synthetic construct
  source 1..9485: mol_type = other RNA
aggaaataagagagaaaagaagagtaagaagaaatataagagccaccatggcccctaagaagaagcgtaaagtgagccggatggaacgcctcgtctacgaggtgcggcagaagtgcagaaacatcgaggacatctgcatctcctgcggatctctgaacgtgaccctggagcacccactgttcatcggcggcatgtgccagaactgtaaaaactgttttctggagtgtgcctatcaatacgacgatgacggctaccagagctactgcaccatctgttgcggcggaagagaggtgctgatgtgtggaaataacaactgctgccggtgcttctgcgtggaatgcgtggacctgctggtgggccccggcgccgcccaggccgctattaaggaagatccttggaactgctacatgtgcggccacaagggcacatacggcctgctgagacggagagaggactggcctagcagactgcagatgttcttcgccaataaccacgaccaggagttcgacccccctaaggtgtaccctcccgtccccgccgagaagagaaagcccatccgggtcctgagcctgttcgatggcatcgccaccggtctgctggtgctgaaggacctgggcatccaggtggataggtacattgcctccgaggtgtgcgaggactccatcaccgtgggaatggtgcgtcatcagggcaagatcatgtacgtgggcgacgtgcggagcgtgacacagaagcatatccaggagtggggccctttcgacctggtgatcggcggcagcccttgcaatgacctgagcatcgtgaacccagcccggaagggcctgtacgagggaaccggcagactgttcttcgagttttacagactgctgcacgacgcccggcctaaggaaggcgacgaccggcccttcttttggctgttcgagaatgtggtggccatgggagtcagcgacaagcgggatattagccggttcctggagagcaaccccgtgatgatcgatgccaaggaagtgagcgccgcccaccgggccagatacttctggggcaatctgcctggcatgaacagacccctggccagcaccgtgaacgacaagctggagctgcaggagtgcctggagcacggccggatcgccaagttcagcaaggtgagaaccatcaccacccgaagcaacagcatcaaacaaggcaaggaccagcactttcctgtgttcatgaacgagaaggaggacatcctgtggtgtaccgagatggagagagtgttcgggttcccagtccactacacagatgtcagcaacatgtctagactggccagacagagactgctgggaagaagctggtccgtccctgtgatcagacacctgttcgcccctctgaaggagtacttcgcctgcgtgagcagcggcaacagcaacgccaacagccggggccccagcttctctagcggcctggtgccactgtccctgagagggagccacatgggccccatggagatctacaaaaccgtgagcgcctggaagcggcagcctgtgcgcgtgctgagcctgtttcggaatatcgataaagtcctgaaaagcctgggattcctggagagcggctctggctccggcggtggcaccctgaagtacgtggaggatgtgacaaacgtggtcagacgggatgtggagaagtggggccccttcgatctggtgtacggcagcacccaacccctgggcagctcttgtgaccggtgccctggctggtacatgtttcagttccaccggatcctgcagtacgccctgccgagacaggagtcccagcggccattcttttggattttcatggacaacttgctgctgaccgaggatgaccaggaaactaccactcggttcctgcagaccgaagccgtgaccctgcaggacgtgagaggccgggactaccagaacgccatgcgggtgtggtccaacatccctggactgaaaagcaagcacgcacctctgacccctaaagaagaggagtacctgcaggcccaggtgcggagcagaagcaagctggacgcccctaaggtggatctgctggtgaagaattgcctcctgcccctgagagagtacttcaagtatttcagccagaatagtctgcccctgggaggcagcggcggcggcgccctggtgacatttgaggacgtcgccgtgcggttcacccaggaggaatgggctctgctggatccttctcagaaaatcctgtaccgggacgtgatgagagagacataccggaatctgacctccgtgggcatcaactgggaatgttgggaccttgaagcctgcttcagaagcctgggaagaaacctgagagtgcaggtggtgaagagaaagtgcgagctgaccaacagcggcccctgcgccgagggcggcccaagcagcggcgcccctcctcccagcggcggcagcccagccggctccccaacctctaccgaggagggcacctctgagtccgccacccccgagagcggccctggcacctccaccgagcccagcgagggcagcgcacccggcagccctgccggcagccccacctccacagaggagggaaccagcaccgagcccagcgaaggcagcgccccaggcaccagcaccgagcctagtgagcaggagattaaacggatcaacaagatcagaagaagacttgtgaaagacagcaacaccaagaaggccggcaagacaggccccatgaaaaccctgctggttagagtgatgacacccgatctgagagagcggctggaaaacctgagaaagaagcctgaaaatatcccccagcccatcagcaatacatctagagccaacctgaataagctgctgaccgattacaccgaaatgaagaaggcgatcctgcatgtgtactgggaagagttccagaaggaccctgtgggcctgatgagccgggtggcccagcctgccagcaagaagatcgatcagaacaagctgaaacctgagatggacgagaagggcaacctgaccaccgccggctttgcctgctctcagtgtggccagcccctgttcgtgtacaagctggagcaggtgtctgagaagggcaaggcttacaccaactacttcggacggtgcaatgtggccgagcacgaaaagctgatcctgctggcccagctgaagcccgagaaggatagcgacgaagccgtgacatatagcctgggaaagtttgggcagagggccctggatttctacagcattcatgtgaccaaggagtccacccaccccgtgaagcccctggcccagatcgccggaaacagatacgcctccggacctgtgggaaaggccctgagcgacgcatgtatgggcacaatcgcctccttcctgtctaagtaccaggacatcatcatcgaacaccagaaggtggtgaagggcaaccagaagagactggagagcctgcgggagctggccggcaaggaaaacctggaataccctagcgtgaccctgccacctcagcctcacaccaaggagggcgttgatgcctacaacgaagtgatcgcccgggtgcgaatgtgggtgaacctgaacctgtggcagaagctgaagctaagcagagatgatgccaagcctctgctgagactgaagggattcccttcctttcctctggtcgagagacaggccaacgaagtggactggtgggacatggtgtgtaacgtgaagaagctgatcaacgagaaaaaggaggatggcaaggtgttttggcagaatctggctggctacaagagacaggaagccctgagaccatacctgagcagcgaggaagatcggaagaagggaaagaaattcgctcggtaccagctgggcgacctgctgctgcacctggaaaagaagcacggcgaggactggggaaaggtgtacgacgaggcctgggagcggattgacaagaaagtggaaggcctgagcaagcacatcaagctggaagaggaacggagaagcgaggacgcccagagcaaggccgccctgaccgactggctgcgggctaaggccagcttcgtgatcgagggcctgaaggaggccgacaaggacgagttctgcagatgcgagctgaagctgcagaagtggtacggggacctgcggggaaagcccttcgccatcgaagccgagaacagcatcctggacatcagcggcttcagcaagcagtacaactgtgccttcatctggcagaaggacggcgtgaagaagctgaacctgtacctgatcatcaactacttcaagggcggcaagctgcggttcaagaagatcaaacctgaagccttcgaagccaacagattctacaccgtgatcaacaaaaagagcggcgagatcgtgcccatggaggtgaacttcaacttcgacgaccccaacctgatcatcctgcctctggcctttggcaagagacagggcagagaattcatctggaacgacctgctgtccctggaaaccggcagcctgaagctggccaacggaagagtgatcgagaagacactgtacaacagaagaacccggcaggatgagcctgccctgttcgtggccctgaccttcgagcggcgggaggtcctggactcctccaatatcaaaccaatgaacctgatcggcgtggcaagaggcgaaaacatccccgccgtgatcgccctgaccgaccccgagggctgcccactgagccggtttaaggatagcctgggaaacccaacccacatcctgagaatcggcgagagctataaggagaagcagcggaccatccaggccaagaaggaggtggagcagcggagagccggcggctacagccggaagtacgccagcaaagccaagaatctggcagacgatatggtgagaaacaccgctagagatctgctgtactacgccgtgacccaggatgccatgctgatcttcgccaacctgagccggggcttcggccggcagggcaagcggaccttcatggccgagagacagtacacacggatggaggactggctgaccgccaagctggcctacgagggcctgagcaagacctacctgtccaagacactggcccagtacacctccaagacatgcagcaactgtgggtttaccatcaccagcgccgactacgacagggtgctggagaagctgaagaagacagcaacaggctggatgaccacaattaacggcaaggagctgaaggtggagggccagattacctactacaacagatacaagagacagaacgtagtcaaggacctgtccgtcgagctggatagactgagcgaagaatctgtgaacaacgacatctcctcctggacaaagggcagaagcggagaagctctgagcctcctgaagaaaagattctcccatagacccgtgcaggagaagttcgtgtgcctgaactgcggcttcgagacacacgcagccgagcaagccgccctgaacatcgccagatcctggctgttcctgcggagccaggagtacaagaaataccagacaaacaagacaaccggcaacaccgataagagagccttcgtcgagacctggcagtccttttaccggaagaagcttaaggaggtgtggaaacctgccgtgcggtctggcggatctggcggaggctccgcccagggccaggtgaacttcgaggacgtggccgtgtacttcagccccgaggagtggggcctgctggacgaggcccagaggctgctgtacagggacgtgatgctggagaacctggccctgatggccagcctgggctacgagagcagcatgagccacggcttcgccagcctggagctgggcagcaagccctggggcagcgactgggccgacgtgacccccgccaggaccagggacacccagggcggcggcccaagcagcggcgcccctcctcccagcggcggcagcccagccggctccccaacctctaccgaggagggcacctctgagtccgccacccccgagagcggccctggcacctccaccgagcccagcgagggcagcgcacccggcagccctgccggcagccccacctccacagaggagggaaccagcaccgagcccagcgaaggcagcgccccaggcaccagcaccgagcctagtgagcaggagattaaacggatcaacaagatcagaagaagacttgtgaaagacagcaacaccaagaaggccggcaagacaggccccatgaaaaccctgctggttagagtgatgacacccgatctgagagagcggctggaaaacctgagaaagaagcctgaaaatatcccccagcccatcagcaatacatctagagccaacctgaataagctgctgaccgattacaccgaaatgaagaaggcgatcctgcatgtgtactgggaagagttccagaaggaccctgtgggcctgatgagccgggtggcccagcctgccagcaagaagatcgatcagaacaagctgaaacctgagatggacgagaagggcaacctgaccaccgccggctttgcctgctctcagtgtggccagcccctgttcgtgtacaagctggagcaggtgtctgagaagggcaaggcttacaccaactacttcggacggtgcaatgtggccgagcacgaaaagctgatcctgctggcccagctgaagcccgagaaggatagcgacgaagccgtgacatatagcctgggaaagtttgggcagagggccctggatttctacagcattcatgtgaccaaggagtccacccaccccgtgaagcccctggcccagatcgccggaaacagatacgcctccggacctgtgggaaaggccctgagcgacgcatgtatgggcacaatcgcctccttcctgtctaagtaccaggacatcatcatcgaacaccagaaggtggtgaagggcaaccagaagagactggagagcctgcgggagctggccggcaaggaaaacctggaataccctagcgtgaccctgccacctcagcctcacaccaaggagggcgttgatgcctacaacgaagtgatcgcccgggtgcgaatgtgggtgaacctgaacctgtggcagaagctgaagctaagcagagatgatgccaagcctctgctgagactgaagggattcccttcctttcctctggtcgagagacaggccaacgaagtggactggtgggacatggtgtgtaacgtgaagaagctgatcaacgagaaaaaggaggatggcaaggtgttttggcagaatctggctggctacaagagacaggaagccctgagaccatacctgagcagcgaggaagatcggaagaagggaaagaaattcgctcggtaccagctgggcgacctgctgctgcacctggaaaagaagcacggcgaggactggggaaaggtgtacgacgaggcctgggagcggattgacaagaaagtggaaggcctgagcaagcacatcaagctggaagaggaacggagaagcgaggacgcccagagcaaggccgccctgaccgactggctgcgggctaaggccagcttcgtgatcgagggcctgaaggaggccgacaaggacgagttctgcagatgcgagctgaagctgcagaagtggtacggggacctgcggggaaagcccttcgccatcgaagccgagaacagcatcctggacatcagcggcttcagcaagcagtacaactgtgccttcatctggcagaaggacggcgtgaagaagctgaacctgtacctgatcatcaactacttcaagggcggcaagctgcggttcaagaagatcaaacctgaagccttcgaagccaacagattctacaccgtgatcaacaaaaagagcggcgagatcgtgcccatggaggtgaacttcaacttcgacgaccccaacctgatcatcctgcctctggcctttggcaagagacagggcagagaattcatctggaacgacctgctgtccctggaaaccggcagcctgaagctggccaacggaagagtgatcgagaagacactgtacaacagaagaacccggcaggatgagcctgccctgttcgtggccctgaccttcgagcggcgggaggtcctggactcctccaatatcaaaccaatgaacctgatcggcgtggcaagaggcgaaaacatccccgccgtgatcgccctgaccgaccccgagggctgcccactgagccggtttaaggatagcctgggaaacccaacccacatcctgagaatcggcgagagctataaggagaagcagcggaccatccaggccaagaaggaggtggagcagcggagagccggcggctacagccggaagtacgccagcaaagccaagaatctggcagacgatatggtgagaaacaccgctagagatctgctgtactacgccgtgacccaggatgccatgctgatcttcgccaacctgagccggggcttcggccggcagggcaagcggaccttcatggccgagagacagtacacacggatggaggactggctgaccgccaagctggcctacgagggcctgagcaagacctacctgtccaagacactggcccagtacacctccaagacatgcagcaactgtgggtttaccatcaccagcgccgactacgacagggtgctggagaagctgaagaagacagcaacaggctggatgaccacaattaacggcaaggagctgaaggtggagggccagattacctactacaacagatacaagagacagaacgtagtcaaggacctgtccgtcgagctggatagactgagcgaagaatctgtgaacaacgacatctcctcctggacaaagggcagaagcggagaagctctgagcctcctgaagaaaagattctcccatagacccgtgcaggagaagttcgtgtgcctgaactgcggcttcgagacacacgcagccgagcaagccgccctgaacatcgccagatcctggctgttcctgcggagccaggagtacaagaaataccagacaaacaagacaaccggcaacaccgataagagagccttcgtcgagacctggcagtccttttaccggaagaagcttaaggaggtgtggaaacctgccgtgcggtctggcggatctggcggaggctcctgcccagggccaggtgaacttcgaggacgtggccgtgtacttcagccccgaggagtggggcctgctggacgaggcccagaggctgctgtacagggacgtgatgctggagaacctggccctgatggccagcctgggctacgagagcagcatgagccacggcttcgccagcctggagctgggcagcaagccctggggcagcgactgggccgacgtgacccccgccaggaccagggacacccagggcggatctggctccggcagcggccccaagaaaaagagaaaagtctaagctgccttctgcggggcttgccttctggccatgcccttcttctctcccttgcacctgtacctcttggtctttgaataaagcctgagtaggaaggctagcaaaaaaaaaaaaaaaaaaaaaaaaaaaaaaaaaaaaaaaaaaaaaaaaaaaaaaaaaaaaaaaaaaaaaaaaaaaaaaaa

SEQ ID NO: 16750 - RNA, 9485 nt, synthetic construct
  source 1..9485: mol_type = other RNA
aggaaataagagagaaaagaagagtaagaagaaatataagagccaccatggcccctaagaagaagcgtaaagtgagccggatggaacgcctcgtctacgaggtgcggcagaagtgcagaaacatcgaggacatctgcatctcctgcggatctctgaacgtgaccctggagcacccactgttcatcggcggcatgtgccagaactgtaaaaactgttttctggagtgtgcctatcaatacgacgatgacggctaccagagctactgcaccatctgttgcggcggaagagaggtgctgatgtgtggaaataacaactgctgccggtgcttctgcgtggaatgcgtggacctgctggtgggccccggcgccgcccaggccgctattaaggaagatccttggaactgctacatgtgcggccacaagggcacatacggcctgctgagacggagagaggactggcctagcagactgcagatgttcttcgccaataaccacgaccaggagttcgacccccctaaggtgtaccctcccgtccccgccgagaagagaaagcccatccgggtcctgagcctgttcgatggcatcgccaccggtctgctggtgctgaaggacctgggcatccaggtggataggtacattgcctccgaggtgtgcgaggactccatcaccgtgggaatggtgcgtcatcagggcaagatcatgtacgtgggcgacgtgcggagcgtgacacagaagcatatccaggagtggggccctttcgacctggtgatcggcggcagcccttgcaatgacctgagcatcgtgaacccagcccggaagggcctgtacgagggaaccggcagactgttcttcgagttttacagactgctgcacgacgcccggcctaaggaaggcgacgaccggcccttcttttggctgttcgagaatgtggtggccatgggagtcagcgacaagcgggatattagccggttcctggagagcaaccccgtgatgatcgatgccaaggaagtgagcgccgcccaccgggccagatacttctggggcaatctgcctggcatgaacagacccctggccagcaccgtgaacgacaagctggagctgcaggagtgcctggagcacggccggatcgccaagttcagcaaggtgagaaccatcaccacccgaagcaacagcatcaaacaaggcaaggaccagcactttcctgtgttcatgaacgagaaggaggacatcctgtggtgtaccgagatggagagagtgttcgggttcccagtccactacacagatgtcagcaacatgtctagactggccagacagagactgctgggaagaagctggtccgtccctgtgatcagacacctgttcgcccctctgaaggagtacttcgcctgcgtgagcagcggcaacagcaacgccaacagccggggccccagcttctctagcggcctggtgccactgtccctgagagggagccacatgggccccatggagatctacaaaaccgtgagcgcctggaagcggcagcctgtgcgcgtgctgagcctgtttcggaatatcgataaagtcctgaaaagcctgggattcctggagagcggctctggctccggcggtggcaccctgaagtacgtggaggatgtgacaaacgtggtcagacgggatgtggagaagtggggccccttcgatctggtgtacggcagcacccaacccctgggcagctcttgtgaccggtgccctggctggtacatgtttcagttccaccggatcctgcagtacgccctgccgagacaggagtcccagcggccattcttttggattttcatggacaacttgctgctgaccgaggatgaccaggaaactaccactcggttcctgcagaccgaagccgtgaccctgcaggacgtgagaggccgggactaccagaacgccatgcgggtgtggtccaacatccctggactgaaaagcaagcacgcacctctgacccctaaagaagaggagtacctgcaggcccaggtgcggagcagaagcaagctggacgcccctaaggtggatctgctggtgaagaattgcctcctgcccctgagagagtacttcaagtatttcagccagaatagtctgcccctgggaggcagcggcggcggcgccctggtgacatttgaggacgtcgccgtgcggttcacccaggaggaatgggctctgctggatccttctcagaaaatcctgtaccgggacgtgatgagagagacataccggaatctgacctccgtgggcatcaactgggaatgttgggaccttgaagcctgcttcagaagcctgggaagaaacctgagagtgcaggtggtgaagagaaagtgcgagctgaccaacagcggcccctgcgccgagggcggcccaagcagcggcgcccctcctcccagcggcggcagcccagccggctccccaacctctaccgaggagggcacctctgagtccgccacccccgagagcggccctggcacctccaccgagcccagcgagggcagcgcacccggcagccctgccggcagccccacctccacagaggagggaaccagcaccgagcccagcgaaggcagcgccccaggcaccagcaccgagcctagtgagcaggagattaaacggatcaacaagatcagaagaagacttgtgaaagacagcaacaccaagaaggccggcaagacaggccccatgaaaaccctgctggttagagtgatgacacccgatctgagagagcggctggaaaacctgagaaagaagcctgaaaatatcccccagcccatcagcaatacatctagagccaacctgaataagctgctgaccgattacaccgaaatgaagaaggcgatcctgcatgtgtactgggaagagttccagaaggaccctgtgggcctgatgagccgggtggcccagcctgccagcaagaagatcgatcagaacaagctgaaacctgagatggacgagaagggcaacctgaccaccgccggctttgcctgctctcagtgtggccagcccctgttcgtgtacaagctggagcaggtgtctgagaagggcaaggcttacaccaactacttcggacggtgcaatgtggccgagcacgaaaagctgatcctgctggcccagctgaagcccgagaaggatagcgacgaagccgtgacatatagcctgggaaagtttgggcagagggccctggatttctacagcattcatgtgaccaaggagtccacccaccccgtgaagcccctggcccagatcgccggaaacagatacgcctccggacctgtgggaaaggccctgagcgacgcatgtatgggcacaatcgcctccttcctgtctaagtaccaggacatcatcatcgaacaccagaaggtggtgaagggcaaccagaagagactggagagcctgcgggagctggccggcaaggaaaacctggaataccctagcgtgaccctgccacctcagcctcacaccaaggagggcgttgatgcctacaacgaagtgatcgcccgggtgcgaatgtgggtgaacctgaacctgtggcagaagctgaagctaagcagagatgatgccaagcctctgctgagactgaagggattcccttcctttcctctggtcgagagacaggccaacgaagtggactggtgggacatggtgtgtaacgtgaagaagctgatcaacgagaaaaaggaggatggcaaggtgttttggcagaatctggctggctacaagagacaggaagccctgagaccatacctgagcagcgaggaagatcggaagaagggaaagaaattcgctcggtaccagctgggcgacctgctgctgcacctggaaaagaagcacggcgaggactggggaaaggtgtacgacgaggcctgggagcggattgacaagaaagtggaaggcctgagcaagcacatcaagctggaagaggaacggagaagcgaggacgcccagagcaaggccgccctgaccgactggctgcgggctaaggccagcttcgtgatcgagggcctgaaggaggccgacaaggacgagttctgcagatgcgagctgaagctgcagaagtggtacggggacctgcggggaaagcccttcgccatcgaagccgagaacagcatcctggacatcagcggcttcagcaagcagtacaactgtgccttcatctggcagaaggacggcgtgaagaagctgaacctgtacctgatcatcaactacttcaagggcggcaagctgcggttcaagaagatcaaacctgaagccttcgaagccaacagattctacaccgtgatcaacaaaaagagcggcgagatcgtgcccatggaggtgaacttcaacttcgacgaccccaacctgatcatcctgcctctggcctttggcaagagacagggcagagaattcatctggaacgacctgctgtccctggaaaccggcagcctgaagctggccaacggaagagtgatcgagaagacactgtacaacagaagaacccggcaggatgagcctgccctgttcgtggccctgaccttcgagcggcgggaggtcctggactcctccaatatcaaaccaatgaacctgatcggcgtggcaagaggcgaaaacatccccgccgtgatcgccctgaccgaccccgagggctgcccactgagccggtttaaggatagcctgggaaacccaacccacatcctgagaatcggcgagagctataaggagaagcagcggaccatccaggccaagaaggaggtggagcagcggagagccggcggctacagccggaagtacgccagcaaagccaagaatctggcagacgatatggtgagaaacaccgctagagatctgctgtactacgccgtgacccaggatgccatgctgatcttcgccaacctgagccggggcttcggccggcagggcaagcggaccttcatggccgagagacagtacacacggatggaggactggctgaccgccaagctggcctacgagggcctgagcaagacctacctgtccaagacactggcccagtacacctccaagacatgcagcaactgtgggtttaccatcaccagcgccgactacgacagggtgctggagaagctgaagaagacagcaacaggctggatgaccacaattaacggcaaggagctgaaggtggagggccagattacctactacaacagatacaagagacagaacgtagtcaaggacctgtccgtcgagctggatagactgagcgaagaatctgtgaacaacgacatctcctcctggacaaagggcagaagcggagaagctctgagcctcctgaagaaaagattctcccatagacccgtgcaggagaagttcgtgtgcctgaactgcggcttcgagacacacgcagccgagcaagccgccctgaacatcgccagatcctggctgttcctgcggagccaggagtacaagaaataccagacaaacaagacaaccggcaacaccgataagagagccttcgtcgagacctggcagtccttttaccggaagaagcttaaggaggtgtggaaacctgccgtgcggtctggcggatctggcggaggctcccaggccgaggtgaccttcgaggacgtggccgtgctgctgagccaggaggagtggggcctgctgggccccagccagaagggcctgtacagggaggtgatgctggagacctacaggaacctgctgagcctgggcgccggcctggccgaccccaagcccgaggtgatcgtgcagctggagaggggcgacgagctgtgggtgctggacatgcacggcgccgagcagcccagcgtggacggcagcgccggcggcccaagcagcggcgcccctcctcccagcggcggcagcccagccggctccccaacctctaccgaggagggcacctctgagtccgccacccccgagagcggccctggcacctccaccgagcccagcgagggcagcgcacccggcagccctgccggcagccccacctccacagaggagggaaccagcaccgagcccagcgaaggcagcgccccaggcaccagcaccgagcctagtgagcaggagattaaacggatcaacaagatcagaagaagacttgtgaaagacagcaacaccaagaaggccggcaagacaggccccatgaaaaccctgctggttagagtgatgacacccgatctgagagagcggctggaaaacctgagaaagaagcctgaaaatatcccccagcccatcagcaatacatctagagccaacctgaataagctgctgaccgattacaccgaaatgaagaaggcgatcctgcatgtgtactgggaagagttccagaaggaccctgtgggcctgatgagccgggtggcccagcctgccagcaagaagatcgatcagaacaagctgaaacctgagatggacgagaagggcaacctgaccaccgccggctttgcctgctctcagtgtggccagcccctgttcgtgtacaagctggagcaggtgtctgagaagggcaaggcttacaccaactacttcggacggtgcaatgtggccgagcacgaaaagctgatcctgctggcccagctgaagcccgagaaggatagcgacgaagccgtgacatatagcctgggaaagtttgggcagagggccctggatttctacagcattcatgtgaccaaggagtccacccaccccgtgaagcccctggcccagatcgccggaaacagatacgcctccggacctgtgggaaaggccctgagcgacgcatgtatgggcacaatcgcctccttcctgtctaagtaccaggacatcatcatcgaacaccagaaggtggtgaagggcaaccagaagagactggagagcctgcgggagctggccggcaaggaaaacctggaataccctagcgtgaccctgccacctcagcctcacaccaaggagggcgttgatgcctacaacgaagtgatcgcccgggtgcgaatgtgggtgaacctgaacctgtggcagaagctgaagctaagcagagatgatgccaagcctctgctgagactgaagggattcccttcctttcctctggtcgagagacaggccaacgaagtggactggtgggacatggtgtgtaacgtgaagaagctgatcaacgagaaaaaggaggatggcaaggtgttttggcagaatctggctggctacaagagacaggaagccctgagaccatacctgagcagcgaggaagatcggaagaagggaaagaaattcgctcggtaccagctgggcgacctgctgctgcacctggaaaagaagcacggcgaggactggggaaaggtgtacgacgaggcctgggagcggattgacaagaaagtggaaggcctgagcaagcacatcaagctggaagaggaacggagaagcgaggacgcccagagcaaggccgccctgaccgactggctgcgggctaaggccagcttcgtgatcgagggcctgaaggaggccgacaaggacgagttctgcagatgcgagctgaagctgcagaagtggtacggggacctgcggggaaagcccttcgccatcgaagccgagaacagcatcctggacatcagcggcttcagcaagcagtacaactgtgccttcatctggcagaaggacggcgtgaagaagctgaacctgtacctgatcatcaactacttcaagggcggcaagctgcggttcaagaagatcaaacctgaagccttcgaagccaacagattctacaccgtgatcaacaaaaagagcggcgagatcgtgcccatggaggtgaacttcaacttcgacgaccccaacctgatcatcctgcctctggcctttggcaagagacagggcagagaattcatctggaacgacctgctgtccctggaaaccggcagcctgaagctggccaacggaagagtgatcgagaagacactgtacaacagaagaacccggcaggatgagcctgccctgttcgtggccctgaccttcgagcggcgggaggtcctggactcctccaatatcaaaccaatgaacctgatcggcgtggcaagaggcgaaaacatccccgccgtgatcgccctgaccgaccccgagggctgcccactgagccggtttaaggatagcctgggaaacccaacccacatcctgagaatcggcgagagctataaggagaagcagcggaccatccaggccaagaaggaggtggagcagcggagagccggcggctacagccggaagtacgccagcaaagccaagaatctggcagacgatatggtgagaaacaccgctagagatctgctgtactacgccgtgacccaggatgccatgctgatcttcgccaacctgagccggggcttcggccggcagggcaagcggaccttcatggccgagagacagtacacacggatggaggactggctgaccgccaagctggcctacgagggcctgagcaagacctacctgtccaagacactggcccagtacacctccaagacatgcagcaactgtgggtttaccatcaccagcgccgactacgacagggtgctggagaagctgaagaagacagcaacaggctggatgaccacaattaacggcaaggagctgaaggtggagggccagattacctactacaacagatacaagagacagaacgtagtcaaggacctgtccgtcgagctggatagactgagcgaagaatctgtgaacaacgacatctcctcctggacaaagggcagaagcggagaagctctgagcctcctgaagaaaagattctcccatagacccgtgcaggagaagttcgtgtgcctgaactgcggcttcgagacacacgcagccgagcaagccgccctgaacatcgccagatcctggctgttcctgcggagccaggagtacaagaaataccagacaaacaagacaaccggcaacaccgataagagagccttcgtcgagacctggcagtccttttaccggaagaagcttaaggaggtgtggaaacctgccgtgcggtctggcggatctggcggaggctcctcaggccgaggtgaccttcgaggacgtggccgtgctgctgagccaggaggagtggggcctgctgggccccagccagaagggcctgtacagggaggtgatgctggagacctacaggaacctgctgagcctgggcgccggcctggccgaccccaagcccgaggtgatcgtgcagctggagaggggcgacgagctgtgggtgctggacatgcacggcgccgagcagcccagcgtggacggcagcgccggatctggctccggcagcggccccaagaaaaagagaaaagtctaagctgccttctgcggggcttgccttctggccatgcccttcttctctcccttgcacctgtacctcttggtctttgaataaagcctgagtaggaaggctagcaaaaaaaaaaaaaaaaaaaaaaaaaaaaaaaaaaaaaaaaaaaaaaaaaaaaaaaaaaaaaaaaaaaaaaaaaaaaaaaa

SEQ ID NO: 16751 - RNA, 9485 nt, synthetic construct
  source 1..9485: mol_type = other RNA
aggaaataagagagaaaagaagagtaagaagaaatataagagccaccatggcccctaagaagaagcgtaaagtgagccggatggaacgcctcgtctacgaggtgcggcagaagtgcagaaacatcgaggacatctgcatctcctgcggatctctgaacgtgaccctggagcacccactgttcatcggcggcatgtgccagaactgtaaaaactgttttctggagtgtgcctatcaatacgacgatgacggctaccagagctactgcaccatctgttgcggcggaagagaggtgctgatgtgtggaaataacaactgctgccggtgcttctgcgtggaatgcgtggacctgctggtgggccccggcgccgcccaggccgctattaaggaagatccttggaactgctacatgtgcggccacaagggcacatacggcctgctgagacggagagaggactggcctagcagactgcagatgttcttcgccaataaccacgaccaggagttcgacccccctaaggtgtaccctcccgtccccgccgagaagagaaagcccatccgggtcctgagcctgttcgatggcatcgccaccggtctgctggtgctgaaggacctgggcatccaggtggataggtacattgcctccgaggtgtgcgaggactccatcaccgtgggaatggtgcgtcatcagggcaagatcatgtacgtgggcgacgtgcggagcgtgacacagaagcatatccaggagtggggccctttcgacctggtgatcggcggcagcccttgcaatgacctgagcatcgtgaacccagcccggaagggcctgtacgagggaaccggcagactgttcttcgagttttacagactgctgcacgacgcccggcctaaggaaggcgacgaccggcccttcttttggctgttcgagaatgtggtggccatgggagtcagcgacaagcgggatattagccggttcctggagagcaaccccgtgatgatcgatgccaaggaagtgagcgccgcccaccgggccagatacttctggggcaatctgcctggcatgaacagacccctggccagcaccgtgaacgacaagctggagctgcaggagtgcctggagcacggccggatcgccaagttcagcaaggtgagaaccatcaccacccgaagcaacagcatcaaacaaggcaaggaccagcactttcctgtgttcatgaacgagaaggaggacatcctgtggtgtaccgagatggagagagtgttcgggttcccagtccactacacagatgtcagcaacatgtctagactggccagacagagactgctgggaagaagctggtccgtccctgtgatcagacacctgttcgcccctctgaaggagtacttcgcctgcgtgagcagcggcaacagcaacgccaacagccggggccccagcttctctagcggcctggtgccactgtccctgagagggagccacatgggccccatggagatctacaaaaccgtgagcgcctggaagcggcagcctgtgcgcgtgctgagcctgtttcggaatatcgataaagtcctgaaaagcctgggattcctggagagcggctctggctccggcggtggcaccctgaagtacgtggaggatgtgacaaacgtggtcagacgggatgtggagaagtggggccccttcgatctggtgtacggcagcacccaacccctgggcagctcttgtgaccggtgccctggctggtacatgtttcagttccaccggatcctgcagtacgccctgccgagacaggagtcccagcggccattcttttggattttcatggacaacttgctgctgaccgaggatgaccaggaaactaccactcggttcctgcagaccgaagccgtgaccctgcaggacgtgagaggccgggactaccagaacgccatgcgggtgtggtccaacatccctggactgaaaagcaagcacgcacctctgacccctaaagaagaggagtacctgcaggcccaggtgcggagcagaagcaagctggacgcccctaaggtggatctgctggtgaagaattgcctcctgcccctgagagagtacttcaagtatttcagccagaatagtctgcccctgggaggcagcggcggcggcgccctggtgacatttgaggacgtcgccgtgcggttcacccaggaggaatgggctctgctggatccttctcagaaaatcctgtaccgggacgtgatgagagagacataccggaatctgacctccgtgggcatcaactgggaatgttgggaccttgaagcctgcttcagaagcctgggaagaaacctgagagtgcaggtggtgaagagaaagtgcgagctgaccaacagcggcccctgcgccgagggcggcccaagcagcggcgcccctcctcccagcggcggcagcccagccggctccccaacctctaccgaggagggcacctctgagtccgccacccccgagagcggccctggcacctccaccgagcccagcgagggcagcgcacccggcagccctgccggcagccccacctccacagaggagggaaccagcaccgagcccagcgaaggcagcgccccaggcaccagcaccgagcctagtgagcaggagattaaacggatcaacaagatcagaagaagacttgtgaaagacagcaacaccaagaaggccggcaagacaggccccatgaaaaccctgctggttagagtgatgacacccgatctgagagagcggctggaaaacctgagaaagaagcctgaaaatatcccccagcccatcagcaatacatctagagccaacctgaataagctgctgaccgattacaccgaaatgaagaaggcgatcctgcatgtgtactgggaagagttccagaaggaccctgtgggcctgatgagccgggtggcccagcctgccagcaagaagatcgatcagaacaagctgaaacctgagatggacgagaagggcaacctgaccaccgccggctttgcctgctctcagtgtggccagcccctgttcgtgtacaagctggagcaggtgtctgagaagggcaaggcttacaccaactacttcggacggtgcaatgtggccgagcacgaaaagctgatcctgctggcccagctgaagcccgagaaggatagcgacgaagccgtgacatatagcctgggaaagtttgggcagagggccctggatttctacagcattcatgtgaccaaggagtccacccaccccgtgaagcccctggcccagatcgccggaaacagatacgcctccggacctgtgggaaaggccctgagcgacgcatgtatgggcacaatcgcctccttcctgtctaagtaccaggacatcatcatcgaacaccagaaggtggtgaagggcaaccagaagagactggagagcctgcgggagctggccggcaaggaaaacctggaataccctagcgtgaccctgccacctcagcctcacaccaaggagggcgttgatgcctacaacgaagtgatcgcccgggtgcgaatgtgggtgaacctgaacctgtggcagaagctgaagctaagcagagatgatgccaagcctctgctgagactgaagggattcccttcctttcctctggtcgagagacaggccaacgaagtggactggtgggacatggtgtgtaacgtgaagaagctgatcaacgagaaaaaggaggatggcaaggtgttttggcagaatctggctggctacaagagacaggaagccctgagaccatacctgagcagcgaggaagatcggaagaagggaaagaaattcgctcggtaccagctgggcgacctgctgctgcacctggaaaagaagcacggcgaggactggggaaaggtgtacgacgaggcctgggagcggattgacaagaaagtggaaggcctgagcaagcacatcaagctggaagaggaacggagaagcgaggacgcccagagcaaggccgccctgaccgactggctgcgggctaaggccagcttcgtgatcgagggcctgaaggaggccgacaaggacgagttctgcagatgcgagctgaagctgcagaagtggtacggggacctgcggggaaagcccttcgccatcgaagccgagaacagcatcctggacatcagcggcttcagcaagcagtacaactgtgccttcatctggcagaaggacggcgtgaagaagctgaacctgtacctgatcatcaactacttcaagggcggcaagctgcggttcaagaagatcaaacctgaagccttcgaagccaacagattctacaccgtgatcaacaaaaagagcggcgagatcgtgcccatggaggtgaacttcaacttcgacgaccccaacctgatcatcctgcctctggcctttggcaagagacagggcagagaattcatctggaacgacctgctgtccctggaaaccggcagcctgaagctggccaacggaagagtgatcgagaagacactgtacaacagaagaacccggcaggatgagcctgccctgttcgtggccctgaccttcgagcggcgggaggtcctggactcctccaatatcaaaccaatgaacctgatcggcgtggcaagaggcgaaaacatccccgccgtgatcgccctgaccgaccccgagggctgcccactgagccggtttaaggatagcctgggaaacccaacccacatcctgagaatcggcgagagctataaggagaagcagcggaccatccaggccaagaaggaggtggagcagcggagagccggcggctacagccggaagtacgccagcaaagccaagaatctggcagacgatatggtgagaaacaccgctagagatctgctgtactacgccgtgacccaggatgccatgctgatcttcgccaacctgagccggggcttcggccggcagggcaagcggaccttcatggccgagagacagtacacacggatggaggactggctgaccgccaagctggcctacgagggcctgagcaagacctacctgtccaagacactggcccagtacacctccaagacatgcagcaactgtgggtttaccatcaccagcgccgactacgacagggtgctggagaagctgaagaagacagcaacaggctggatgaccacaattaacggcaaggagctgaaggtggagggccagattacctactacaacagatacaagagacagaacgtagtcaaggacctgtccgtcgagctggatagactgagcgaagaatctgtgaacaacgacatctcctcctggacaaagggcagaagcggagaagctctgagcctcctgaagaaaagattctcccatagacccgtgcaggagaagttcgtgtgcctgaactgcggcttcgagacacacgcagccgagcaagccgccctgaacatcgccagatcctggctgttcctgcggagccaggagtacaagaaataccagacaaacaagacaaccggcaacaccgataagagagccttcgtcgagacctggcagtccttttaccggaagaagcttaaggaggtgtggaaacctgccgtgcggtctggcggatctggcggaggctccttcgaggagctggtgaccttcgaggacgtggccgtgtacttcagcgagaacgagtggaccagcctggcccccacccagagggtgctgtacagggacgtgatgctggagaactacggcgccgtggccagcctggccgccttccccttccccaagcccgccctgatcagccagctggagaggggcgaggccccctggtgcaaggccccccagggcgccctggacggcgagggccccaggggcatcggcggcccaagcagcggcgcccctcctcccagcggcggcagcccagccggctccccaacctctaccgaggagggcacctctgagtccgccacccccgagagcggccctggcacctccaccgagcccagcgagggcagcgcacccggcagccctgccggcagccccacctccacagaggagggaaccagcaccgagcccagcgaaggcagcgccccaggcaccagcaccgagcctagtgagcaggagattaaacggatcaacaagatcagaagaagacttgtgaaagacagcaacaccaagaaggccggcaagacaggccccatgaaaaccctgctggttagagtgatgacacccgatctgagagagcggctggaaaacctgagaaagaagcctgaaaatatcccccagcccatcagcaatacatctagagccaacctgaataagctgctgaccgattacaccgaaatgaagaaggcgatcctgcatgtgtactgggaagagttccagaaggaccctgtgggcctgatgagccgggtggcccagcctgccagcaagaagatcgatcagaacaagctgaaacctgagatggacgagaagggcaacctgaccaccgccggctttgcctgctctcagtgtggccagcccctgttcgtgtacaagctggagcaggtgtctgagaagggcaaggcttacaccaactacttcggacggtgcaatgtggccgagcacgaaaagctgatcctgctggcccagctgaagcccgagaaggatagcgacgaagccgtgacatatagcctgggaaagtttgggcagagggccctggatttctacagcattcatgtgaccaaggagtccacccaccccgtgaagcccctggcccagatcgccggaaacagatacgcctccggacctgtgggaaaggccctgagcgacgcatgtatgggcacaatcgcctccttcctgtctaagtaccaggacatcatcatcgaacaccagaaggtggtgaagggcaaccagaagagactggagagcctgcgggagctggccggcaaggaaaacctggaataccctagcgtgaccctgccacctcagcctcacaccaaggagggcgttgatgcctacaacgaagtgatcgcccgggtgcgaatgtgggtgaacctgaacctgtggcagaagctgaagctaagcagagatgatgccaagcctctgctgagactgaagggattcccttcctttcctctggtcgagagacaggccaacgaagtggactggtgggacatggtgtgtaacgtgaagaagctgatcaacgagaaaaaggaggatggcaaggtgttttggcagaatctggctggctacaagagacaggaagccctgagaccatacctgagcagcgaggaagatcggaagaagggaaagaaattcgctcggtaccagctgggcgacctgctgctgcacctggaaaagaagcacggcgaggactggggaaaggtgtacgacgaggcctgggagcggattgacaagaaagtggaaggcctgagcaagcacatcaagctggaagaggaacggagaagcgaggacgcccagagcaaggccgccctgaccgactggctgcgggctaaggccagcttcgtgatcgagggcctgaaggaggccgacaaggacgagttctgcagatgcgagctgaagctgcagaagtggtacggggacctgcggggaaagcccttcgccatcgaagccgagaacagcatcctggacatcagcggcttcagcaagcagtacaactgtgccttcatctggcagaaggacggcgtgaagaagctgaacctgtacctgatcatcaactacttcaagggcggcaagctgcggttcaagaagatcaaacctgaagccttcgaagccaacagattctacaccgtgatcaacaaaaagagcggcgagatcgtgcccatggaggtgaacttcaacttcgacgaccccaacctgatcatcctgcctctggcctttggcaagagacagggcagagaattcatctggaacgacctgctgtccctggaaaccggcagcctgaagctggccaacggaagagtgatcgagaagacactgtacaacagaagaacccggcaggatgagcctgccctgttcgtggccctgaccttcgagcggcgggaggtcctggactcctccaatatcaaaccaatgaacctgatcggcgtggcaagaggcgaaaacatccccgccgtgatcgccctgaccgaccccgagggctgcccactgagccggtttaaggatagcctgggaaacccaacccacatcctgagaatcggcgagagctataaggagaagcagcggaccatccaggccaagaaggaggtggagcagcggagagccggcggctacagccggaagtacgccagcaaagccaagaatctggcagacgatatggtgagaaacaccgctagagatctgctgtactacgccgtgacccaggatgccatgctgatcttcgccaacctgagccggggcttcggccggcagggcaagcggaccttcatggccgagagacagtacacacggatggaggactggctgaccgccaagctggcctacgagggcctgagcaagacctacctgtccaagacactggcccagtacacctccaagacatgcagcaactgtgggtttaccatcaccagcgccgactacgacagggtgctggagaagctgaagaagacagcaacaggctggatgaccacaattaacggcaaggagctgaaggtggagggccagattacctactacaacagatacaagagacagaacgtagtcaaggacctgtccgtcgagctggatagactgagcgaagaatctgtgaacaacgacatctcctcctggacaaagggcagaagcggagaagctctgagcctcctgaagaaaagattctcccatagacccgtgcaggagaagttcgtgtgcctgaactgcggcttcgagacacacgcagccgagcaagccgccctgaacatcgccagatcctggctgttcctgcggagccaggagtacaagaaataccagacaaacaagacaaccggcaacaccgataagagagccttcgtcgagacctggcagtccttttaccggaagaagcttaaggaggtgtggaaacctgccgtgcggtctggcggatctggcggaggctcctttcgaggagctggtgaccttcgaggacgtggccgtgtacttcagcgagaacgagtggaccagcctggcccccacccagagggtgctgtacagggacgtgatgctggagaactacggcgccgtggccagcctggccgccttccccttccccaagcccgccctgatcagccagctggagaggggcgaggccccctggtgcaaggccccccagggcgccctggacggcgagggccccaggggcatcggatctggctccggcagcggccccaagaaaaagagaaaagtctaagctgccttctgcggggcttgccttctggccatgcccttcttctctcccttgcacctgtacctcttggtctttgaataaagcctgagtaggaaggctagcaaaaaaaaaaaaaaaaaaaaaaaaaaaaaaaaaaaaaaaaaaaaaaaaaaaaaaaaaaaaaaaaaaaaaaaaaaaaaaaa

SEQ ID NO: 16752 - RNA, 9485 nt, synthetic construct
  source 1..9485: mol_type = other RNA
aggaaataagagagaaaagaagagtaagaagaaatataagagccaccatggcccctaagaagaagcgtaaagtgagccggatggaacgcctcgtctacgaggtgcggcagaagtgcagaaacatcgaggacatctgcatctcctgcggatctctgaacgtgaccctggagcacccactgttcatcggcggcatgtgccagaactgtaaaaactgttttctggagtgtgcctatcaatacgacgatgacggctaccagagctactgcaccatctgttgcggcggaagagaggtgctgatgtgtggaaataacaactgctgccggtgcttctgcgtggaatgcgtggacctgctggtgggccccggcgccgcccaggccgctattaaggaagatccttggaactgctacatgtgcggccacaagggcacatacggcctgctgagacggagagaggactggcctagcagactgcagatgttcttcgccaataaccacgaccaggagttcgacccccctaaggtgtaccctcccgtccccgccgagaagagaaagcccatccgggtcctgagcctgttcgatggcatcgccaccggtctgctggtgctgaaggacctgggcatccaggtggataggtacattgcctccgaggtgtgcgaggactccatcaccgtgggaatggtgcgtcatcagggcaagatcatgtacgtgggcgacgtgcggagcgtgacacagaagcatatccaggagtggggccctttcgacctggtgatcggcggcagcccttgcaatgacctgagcatcgtgaacccagcccggaagggcctgtacgagggaaccggcagactgttcttcgagttttacagactgctgcacgacgcccggcctaaggaaggcgacgaccggcccttcttttggctgttcgagaatgtggtggccatgggagtcagcgacaagcgggatattagccggttcctggagagcaaccccgtgatgatcgatgccaaggaagtgagcgccgcccaccgggccagatacttctggggcaatctgcctggcatgaacagacccctggccagcaccgtgaacgacaagctggagctgcaggagtgcctggagcacggccggatcgccaagttcagcaaggtgagaaccatcaccacccgaagcaacagcatcaaacaaggcaaggaccagcactttcctgtgttcatgaacgagaaggaggacatcctgtggtgtaccgagatggagagagtgttcgggttcccagtccactacacagatgtcagcaacatgtctagactggccagacagagactgctgggaagaagctggtccgtccctgtgatcagacacctgttcgcccctctgaaggagtacttcgcctgcgtgagcagcggcaacagcaacgccaacagccggggccccagcttctctagcggcctggtgccactgtccctgagagggagccacatgggccccatggagatctacaaaaccgtgagcgcctggaagcggcagcctgtgcgcgtgctgagcctgtttcggaatatcgataaagtcctgaaaagcctgggattcctggagagcggctctggctccggcggtggcaccctgaagtacgtggaggatgtgacaaacgtggtcagacgggatgtggagaagtggggccccttcgatctggtgtacggcagcacccaacccctgggcagctcttgtgaccggtgccctggctggtacatgtttcagttccaccggatcctgcagtacgccctgccgagacaggagtcccagcggccattcttttggattttcatggacaacttgctgctgaccgaggatgaccaggaaactaccactcggttcctgcagaccgaagccgtgaccctgcaggacgtgagaggccgggactaccagaacgccatgcgggtgtggtccaacatccctggactgaaaagcaagcacgcacctctgacccctaaagaagaggagtacctgcaggcccaggtgcggagcagaagcaagctggacgcccctaaggtggatctgctggtgaagaattgcctcctgcccctgagagagtacttcaagtatttcagccagaatagtctgcccctgggaggcagcggcggcggcgccctggtgacatttgaggacgtcgccgtgcggttcacccaggaggaatgggctctgctggatccttctcagaaaatcctgtaccgggacgtgatgagagagacataccggaatctgacctccgtgggcatcaactgggaatgttgggaccttgaagcctgcttcagaagcctgggaagaaacctgagagtgcaggtggtgaagagaaagtgcgagctgaccaacagcggcccctgcgccgagggcggcccaagcagcggcgcccctcctcccagcggcggcagcccagccggctccccaacctctaccgaggagggcacctctgagtccgccacccccgagagcggccctggcacctccaccgagcccagcgagggcagcgcacccggcagccctgccggcagccccacctccacagaggagggaaccagcaccgagcccagcgaaggcagcgccccaggcaccagcaccgagcctagtgagcaggagattaaacggatcaacaagatcagaagaagacttgtgaaagacagcaacaccaagaaggccggcaagacaggccccatgaaaaccctgctggttagagtgatgacacccgatctgagagagcggctggaaaacctgagaaagaagcctgaaaatatcccccagcccatcagcaatacatctagagccaacctgaataagctgctgaccgattacaccgaaatgaagaaggcgatcctgcatgtgtactgggaagagttccagaaggaccctgtgggcctgatgagccgggtggcccagcctgccagcaagaagatcgatcagaacaagctgaaacctgagatggacgagaagggcaacctgaccaccgccggctttgcctgctctcagtgtggccagcccctgttcgtgtacaagctggagcaggtgtctgagaagggcaaggcttacaccaactacttcggacggtgcaatgtggccgagcacgaaaagctgatcctgctggcccagctgaagcccgagaaggatagcgacgaagccgtgacatatagcctgggaaagtttgggcagagggccctggatttctacagcattcatgtgaccaaggagtccacccaccccgtgaagcccctggcccagatcgccggaaacagatacgcctccggacctgtgggaaaggccctgagcgacgcatgtatgggcacaatcgcctccttcctgtctaagtaccaggacatcatcatcgaacaccagaaggtggtgaagggcaaccagaagagactggagagcctgcgggagctggccggcaaggaaaacctggaataccctagcgtgaccctgccacctcagcctcacaccaaggagggcgttgatgcctacaacgaagtgatcgcccgggtgcgaatgtgggtgaacctgaacctgtggcagaagctgaagctaagcagagatgatgccaagcctctgctgagactgaagggattcccttcctttcctctggtcgagagacaggccaacgaagtggactggtgggacatggtgtgtaacgtgaagaagctgatcaacgagaaaaaggaggatggcaaggtgttttggcagaatctggctggctacaagagacaggaagccctgagaccatacctgagcagcgaggaagatcggaagaagggaaagaaattcgctcggtaccagctgggcgacctgctgctgcacctggaaaagaagcacggcgaggactggggaaaggtgtacgacgaggcctgggagcggattgacaagaaagtggaaggcctgagcaagcacatcaagctggaagaggaacggagaagcgaggacgcccagagcaaggccgccctgaccgactggctgcgggctaaggccagcttcgtgatcgagggcctgaaggaggccgacaaggacgagttctgcagatgcgagctgaagctgcagaagtggtacggggacctgcggggaaagcccttcgccatcgaagccgagaacagcatcctggacatcagcggcttcagcaagcagtacaactgtgccttcatctggcagaaggacggcgtgaagaagctgaacctgtacctgatcatcaactacttcaagggcggcaagctgcggttcaagaagatcaaacctgaagccttcgaagccaacagattctacaccgtgatcaacaaaaagagcggcgagatcgtgcccatggaggtgaacttcaacttcgacgaccccaacctgatcatcctgcctctggcctttggcaagagacagggcagagaattcatctggaacgacctgctgtccctggaaaccggcagcctgaagctggccaacggaagagtgatcgagaagacactgtacaacagaagaacccggcaggatgagcctgccctgttcgtggccctgaccttcgagcggcgggaggtcctggactcctccaatatcaaaccaatgaacctgatcggcgtggcaagaggcgaaaacatccccgccgtgatcgccctgaccgaccccgagggctgcccactgagccggtttaaggatagcctgggaaacccaacccacatcctgagaatcggcgagagctataaggagaagcagcggaccatccaggccaagaaggaggtggagcagcggagagccggcggctacagccggaagtacgccagcaaagccaagaatctggcagacgatatggtgagaaacaccgctagagatctgctgtactacgccgtgacccaggatgccatgctgatcttcgccaacctgagccggggcttcggccggcagggcaagcggaccttcatggccgagagacagtacacacggatggaggactggctgaccgccaagctggcctacgagggcctgagcaagacctacctgtccaagacactggcccagtacacctccaagacatgcagcaactgtgggtttaccatcaccagcgccgactacgacagggtgctggagaagctgaagaagacagcaacaggctggatgaccacaattaacggcaaggagctgaaggtggagggccagattacctactacaacagatacaagagacagaacgtagtcaaggacctgtccgtcgagctggatagactgagcgaagaatctgtgaacaacgacatctcctcctggacaaagggcagaagcggagaagctctgagcctcctgaagaaaagattctcccatagacccgtgcaggagaagttcgtgtgcctgaactgcggcttcgagacacacgcagccgagcaagccgccctgaacatcgccagatcctggctgttcctgcggagccaggagtacaagaaataccagacaaacaagacaaccggcaacaccgataagagagccttcgtcgagacctggcagtccttttaccggaagaagcttaaggaggtgtggaaacctgccgtgcggtctggcggatctggcggaggctccccccaggagagcgtggccttcgacgacgtggccgtgtacttcaccaagaaggagtgggccatcatggtgcccgaccagagggccctgtacagggacgtgatgctggagaactacgaggccgtggccttcgtggccgtgccccccaccagcaagcccgccctggtgagccacctggagcagggcaaggagccctgcttcacccagccccagggcgtgctgagcaggagggactggagggccggcggcggcccaagcagcggcgcccctcctcccagcggcggcagcccagccggctccccaacctctaccgaggagggcacctctgagtccgccacccccgagagcggccctggcacctccaccgagcccagcgagggcagcgcacccggcagccctgccggcagccccacctccacagaggagggaaccagcaccgagcccagcgaaggcagcgccccaggcaccagcaccgagcctagtgagcaggagattaaacggatcaacaagatcagaagaagacttgtgaaagacagcaacaccaagaaggccggcaagacaggccccatgaaaaccctgctggttagagtgatgacacccgatctgagagagcggctggaaaacctgagaaagaagcctgaaaatatcccccagcccatcagcaatacatctagagccaacctgaataagctgctgaccgattacaccgaaatgaagaaggcgatcctgcatgtgtactgggaagagttccagaaggaccctgtgggcctgatgagccgggtggcccagcctgccagcaagaagatcgatcagaacaagctgaaacctgagatggacgagaagggcaacctgaccaccgccggctttgcctgctctcagtgtggccagcccctgttcgtgtacaagctggagcaggtgtctgagaagggcaaggcttacaccaactacttcggacggtgcaatgtggccgagcacgaaaagctgatcctgctggcccagctgaagcccgagaaggatagcgacgaagccgtgacatatagcctgggaaagtttgggcagagggccctggatttctacagcattcatgtgaccaaggagtccacccaccccgtgaagcccctggcccagatcgccggaaacagatacgcctccggacctgtgggaaaggccctgagcgacgcatgtatgggcacaatcgcctccttcctgtctaagtaccaggacatcatcatcgaacaccagaaggtggtgaagggcaaccagaagagactggagagcctgcgggagctggccggcaaggaaaacctggaataccctagcgtgaccctgccacctcagcctcacaccaaggagggcgttgatgcctacaacgaagtgatcgcccgggtgcgaatgtgggtgaacctgaacctgtggcagaagctgaagctaagcagagatgatgccaagcctctgctgagactgaagggattcccttcctttcctctggtcgagagacaggccaacgaagtggactggtgggacatggtgtgtaacgtgaagaagctgatcaacgagaaaaaggaggatggcaaggtgttttggcagaatctggctggctacaagagacaggaagccctgagaccatacctgagcagcgaggaagatcggaagaagggaaagaaattcgctcggtaccagctgggcgacctgctgctgcacctggaaaagaagcacggcgaggactggggaaaggtgtacgacgaggcctgggagcggattgacaagaaagtggaaggcctgagcaagcacatcaagctggaagaggaacggagaagcgaggacgcccagagcaaggccgccctgaccgactggctgcgggctaaggccagcttcgtgatcgagggcctgaaggaggccgacaaggacgagttctgcagatgcgagctgaagctgcagaagtggtacggggacctgcggggaaagcccttcgccatcgaagccgagaacagcatcctggacatcagcggcttcagcaagcagtacaactgtgccttcatctggcagaaggacggcgtgaagaagctgaacctgtacctgatcatcaactacttcaagggcggcaagctgcggttcaagaagatcaaacctgaagccttcgaagccaacagattctacaccgtgatcaacaaaaagagcggcgagatcgtgcccatggaggtgaacttcaacttcgacgaccccaacctgatcatcctgcctctggcctttggcaagagacagggcagagaattcatctggaacgacctgctgtccctggaaaccggcagcctgaagctggccaacggaagagtgatcgagaagacactgtacaacagaagaacccggcaggatgagcctgccctgttcgtggccctgaccttcgagcggcgggaggtcctggactcctccaatatcaaaccaatgaacctgatcggcgtggcaagaggcgaaaacatccccgccgtgatcgccctgaccgaccccgagggctgcccactgagccggtttaaggatagcctgggaaacccaacccacatcctgagaatcggcgagagctataaggagaagcagcggaccatccaggccaagaaggaggtggagcagcggagagccggcggctacagccggaagtacgccagcaaagccaagaatctggcagacgatatggtgagaaacaccgctagagatctgctgtactacgccgtgacccaggatgccatgctgatcttcgccaacctgagccggggcttcggccggcagggcaagcggaccttcatggccgagagacagtacacacggatggaggactggctgaccgccaagctggcctacgagggcctgagcaagacctacctgtccaagacactggcccagtacacctccaagacatgcagcaactgtgggtttaccatcaccagcgccgactacgacagggtgctggagaagctgaagaagacagcaacaggctggatgaccacaattaacggcaaggagctgaaggtggagggccagattacctactacaacagatacaagagacagaacgtagtcaaggacctgtccgtcgagctggatagactgagcgaagaatctgtgaacaacgacatctcctcctggacaaagggcagaagcggagaagctctgagcctcctgaagaaaagattctcccatagacccgtgcaggagaagttcgtgtgcctgaactgcggcttcgagacacacgcagccgagcaagccgccctgaacatcgccagatcctggctgttcctgcggagccaggagtacaagaaataccagacaaacaagacaaccggcaacaccgataagagagccttcgtcgagacctggcagtccttttaccggaagaagcttaaggaggtgtggaaacctgccgtgcggtctggcggatctggcggaggctcctccccaggagagcgtggccttcgacgacgtggccgtgtacttcaccaagaaggagtgggccatcatggtgcccgaccagagggccctgtacagggacgtgatgctggagaactacgaggccgtggccttcgtggccgtgccccccaccagcaagcccgccctggtgagccacctggagcagggcaaggagccctgcttcacccagccccagggcgtgctgagcaggagggactggagggccggcggatctggctccggcagcggccccaagaaaaagagaaaagtctaagctgccttctgcggggcttgccttctggccatgcccttcttctctcccttgcacctgtacctcttggtctttgaataaagcctgagtaggaaggctagcaaaaaaaaaaaaaaaaaaaaaaaaaaaaaaaaaaaaaaaaaaaaaaaaaaaaaaaaaaaaaaaaaaaaaaaaaaaaaaaa

SEQ ID NO: 16753 - RNA, 9485 nt, synthetic construct
  source 1..9485: mol_type = other RNA
aggaaataagagagaaaagaagagtaagaagaaatataagagccaccatggcccctaagaagaagcgtaaagtgagccggatggaacgcctcgtctacgaggtgcggcagaagtgcagaaacatcgaggacatctgcatctcctgcggatctctgaacgtgaccctggagcacccactgttcatcggcggcatgtgccagaactgtaaaaactgttttctggagtgtgcctatcaatacgacgatgacggctaccagagctactgcaccatctgttgcggcggaagagaggtgctgatgtgtggaaataacaactgctgccggtgcttctgcgtggaatgcgtggacctgctggtgggccccggcgccgcccaggccgctattaaggaagatccttggaactgctacatgtgcggccacaagggcacatacggcctgctgagacggagagaggactggcctagcagactgcagatgttcttcgccaataaccacgaccaggagttcgacccccctaaggtgtaccctcccgtccccgccgagaagagaaagcccatccgggtcctgagcctgttcgatggcatcgccaccggtctgctggtgctgaaggacctgggcatccaggtggataggtacattgcctccgaggtgtgcgaggactccatcaccgtgggaatggtgcgtcatcagggcaagatcatgtacgtgggcgacgtgcggagcgtgacacagaagcatatccaggagtggggccctttcgacctggtgatcggcggcagcccttgcaatgacctgagcatcgtgaacccagcccggaagggcctgtacgagggaaccggcagactgttcttcgagttttacagactgctgcacgacgcccggcctaaggaaggcgacgaccggcccttcttttggctgttcgagaatgtggtggccatgggagtcagcgacaagcgggatattagccggttcctggagagcaaccccgtgatgatcgatgccaaggaagtgagcgccgcccaccgggccagatacttctggggcaatctgcctggcatgaacagacccctggccagcaccgtgaacgacaagctggagctgcaggagtgcctggagcacggccggatcgccaagttcagcaaggtgagaaccatcaccacccgaagcaacagcatcaaacaaggcaaggaccagcactttcctgtgttcatgaacgagaaggaggacatcctgtggtgtaccgagatggagagagtgttcgggttcccagtccactacacagatgtcagcaacatgtctagactggccagacagagactgctgggaagaagctggtccgtccctgtgatcagacacctgttcgcccctctgaaggagtacttcgcctgcgtgagcagcggcaacagcaacgccaacagccggggccccagcttctctagcggcctggtgccactgtccctgagagggagccacatgggccccatggagatctacaaaaccgtgagcgcctggaagcggcagcctgtgcgcgtgctgagcctgtttcggaatatcgataaagtcctgaaaagcctgggattcctggagagcggctctggctccggcggtggcaccctgaagtacgtggaggatgtgacaaacgtggtcagacgggatgtggagaagtggggccccttcgatctggtgtacggcagcacccaacccctgggcagctcttgtgaccggtgccctggctggtacatgtttcagttccaccggatcctgcagtacgccctgccgagacaggagtcccagcggccattcttttggattttcatggacaacttgctgctgaccgaggatgaccaggaaactaccactcggttcctgcagaccgaagccgtgaccctgcaggacgtgagaggccgggactaccagaacgccatgcgggtgtggtccaacatccctggactgaaaagcaagcacgcacctctgacccctaaagaagaggagtacctgcaggcccaggtgcggagcagaagcaagctggacgcccctaaggtggatctgctggtgaagaattgcctcctgcccctgagagagtacttcaagtatttcagccagaatagtctgcccctgggaggcagcggcggcggcgccctggtgacatttgaggacgtcgccgtgcggttcacccaggaggaatgggctctgctggatccttctcagaaaatcctgtaccgggacgtgatgagagagacataccggaatctgacctccgtgggcatcaactgggaatgttgggaccttgaagcctgcttcagaagcctgggaagaaacctgagagtgcaggtggtgaagagaaagtgcgagctgaccaacagcggcccctgcgccgagggcggcccaagcagcggcgcccctcctcccagcggcggcagcccagccggctccccaacctctaccgaggagggcacctctgagtccgccacccccgagagcggccctggcacctccaccgagcccagcgagggcagcgcacccggcagccctgccggcagccccacctccacagaggagggaaccagcaccgagcccagcgaaggcagcgccccaggcaccagcaccgagcctagtgagcaggagattaaacggatcaacaagatcagaagaagacttgtgaaagacagcaacaccaagaaggccggcaagacaggccccatgaaaaccctgctggttagagtgatgacacccgatctgagagagcggctggaaaacctgagaaagaagcctgaaaatatcccccagcccatcagcaatacatctagagccaacctgaataagctgctgaccgattacaccgaaatgaagaaggcgatcctgcatgtgtactgggaagagttccagaaggaccctgtgggcctgatgagccgggtggcccagcctgccagcaagaagatcgatcagaacaagctgaaacctgagatggacgagaagggcaacctgaccaccgccggctttgcctgctctcagtgtggccagcccctgttcgtgtacaagctggagcaggtgtctgagaagggcaaggcttacaccaactacttcggacggtgcaatgtggccgagcacgaaaagctgatcctgctggcccagctgaagcccgagaaggatagcgacgaagccgtgacatatagcctgggaaagtttgggcagagggccctggatttctacagcattcatgtgaccaaggagtccacccaccccgtgaagcccctggcccagatcgccggaaacagatacgcctccggacctgtgggaaaggccctgagcgacgcatgtatgggcacaatcgcctccttcctgtctaagtaccaggacatcatcatcgaacaccagaaggtggtgaagggcaaccagaagagactggagagcctgcgggagctggccggcaaggaaaacctggaataccctagcgtgaccctgccacctcagcctcacaccaaggagggcgttgatgcctacaacgaagtgatcgcccgggtgcgaatgtgggtgaacctgaacctgtggcagaagctgaagctaagcagagatgatgccaagcctctgctgagactgaagggattcccttcctttcctctggtcgagagacaggccaacgaagtggactggtgggacatggtgtgtaacgtgaagaagctgatcaacgagaaaaaggaggatggcaaggtgttttggcagaatctggctggctacaagagacaggaagccctgagaccatacctgagcagcgaggaagatcggaagaagggaaagaaattcgctcggtaccagctgggcgacctgctgctgcacctggaaaagaagcacggcgaggactggggaaaggtgtacgacgaggcctgggagcggattgacaagaaagtggaaggcctgagcaagcacatcaagctggaagaggaacggagaagcgaggacgcccagagcaaggccgccctgaccgactggctgcgggctaaggccagcttcgtgatcgagggcctgaaggaggccgacaaggacgagttctgcagatgcgagctgaagctgcagaagtggtacggggacctgcggggaaagcccttcgccatcgaagccgagaacagcatcctggacatcagcggcttcagcaagcagtacaactgtgccttcatctggcagaaggacggcgtgaagaagctgaacctgtacctgatcatcaactacttcaagggcggcaagctgcggttcaagaagatcaaacctgaagccttcgaagccaacagattctacaccgtgatcaacaaaaagagcggcgagatcgtgcccatggaggtgaacttcaacttcgacgaccccaacctgatcatcctgcctctggcctttggcaagagacagggcagagaattcatctggaacgacctgctgtccctggaaaccggcagcctgaagctggccaacggaagagtgatcgagaagacactgtacaacagaagaacccggcaggatgagcctgccctgttcgtggccctgaccttcgagcggcgggaggtcctggactcctccaatatcaaaccaatgaacctgatcggcgtggcaagaggcgaaaacatccccgccgtgatcgccctgaccgaccccgagggctgcccactgagccggtttaaggatagcctgggaaacccaacccacatcctgagaatcggcgagagctataaggagaagcagcggaccatccaggccaagaaggaggtggagcagcggagagccggcggctacagccggaagtacgccagcaaagccaagaatctggcagacgatatggtgagaaacaccgctagagatctgctgtactacgccgtgacccaggatgccatgctgatcttcgccaacctgagccggggcttcggccggcagggcaagcggaccttcatggccgagagacagtacacacggatggaggactggctgaccgccaagctggcctacgagggcctgagcaagacctacctgtccaagacactggcccagtacacctccaagacatgcagcaactgtgggtttaccatcaccagcgccgactacgacagggtgctggagaagctgaagaagacagcaacaggctggatgaccacaattaacggcaaggagctgaaggtggagggccagattacctactacaacagatacaagagacagaacgtagtcaaggacctgtccgtcgagctggatagactgagcgaagaatctgtgaacaacgacatctcctcctggacaaagggcagaagcggagaagctctgagcctcctgaagaaaagattctcccatagacccgtgcaggagaagttcgtgtgcctgaactgcggcttcgagacacacgcagccgagcaagccgccctgaacatcgccagatcctggctgttcctgcggagccaggagtacaagaaataccagacaaacaagacaaccggcaacaccgataagagagccttcgtcgagacctggcagtccttttaccggaagaagcttaaggaggtgtggaaacctgccgtgcggtctggcggatctggcggaggctccagccaggagctggtggccttcgaggacgtgctggtggacttcacccccgaggagtggcagtacctgaacagcagccagaagaccctgtacagggaggtgatgctggagacctacagcaacctggtgagcgtggccggccagcaggacaccaagcccgacctgatcctgaagctggagctggagggcccctgcctggccgagaggaagatcagcgtgtggagcttccccgaggaggcctgccagggcggcccaagcagcggcgcccctcctcccagcggcggcagcccagccggctccccaacctctaccgaggagggcacctctgagtccgccacccccgagagcggccctggcacctccaccgagcccagcgagggcagcgcacccggcagccctgccggcagccccacctccacagaggagggaaccagcaccgagcccagcgaaggcagcgccccaggcaccagcaccgagcctagtgagcaggagattaaacggatcaacaagatcagaagaagacttgtgaaagacagcaacaccaagaaggccggcaagacaggccccatgaaaaccctgctggttagagtgatgacacccgatctgagagagcggctggaaaacctgagaaagaagcctgaaaatatcccccagcccatcagcaatacatctagagccaacctgaataagctgctgaccgattacaccgaaatgaagaaggcgatcctgcatgtgtactgggaagagttccagaaggaccctgtgggcctgatgagccgggtggcccagcctgccagcaagaagatcgatcagaacaagctgaaacctgagatggacgagaagggcaacctgaccaccgccggctttgcctgctctcagtgtggccagcccctgttcgtgtacaagctggagcaggtgtctgagaagggcaaggcttacaccaactacttcggacggtgcaatgtggccgagcacgaaaagctgatcctgctggcccagctgaagcccgagaaggatagcgacgaagccgtgacatatagcctgggaaagtttgggcagagggccctggatttctacagcattcatgtgaccaaggagtccacccaccccgtgaagcccctggcccagatcgccggaaacagatacgcctccggacctgtgggaaaggccctgagcgacgcatgtatgggcacaatcgcctccttcctgtctaagtaccaggacatcatcatcgaacaccagaaggtggtgaagggcaaccagaagagactggagagcctgcgggagctggccggcaaggaaaacctggaataccctagcgtgaccctgccacctcagcctcacaccaaggagggcgttgatgcctacaacgaagtgatcgcccgggtgcgaatgtgggtgaacctgaacctgtggcagaagctgaagctaagcagagatgatgccaagcctctgctgagactgaagggattcccttcctttcctctggtcgagagacaggccaacgaagtggactggtgggacatggtgtgtaacgtgaagaagctgatcaacgagaaaaaggaggatggcaaggtgttttggcagaatctggctggctacaagagacaggaagccctgagaccatacctgagcagcgaggaagatcggaagaagggaaagaaattcgctcggtaccagctgggcgacctgctgctgcacctggaaaagaagcacggcgaggactggggaaaggtgtacgacgaggcctgggagcggattgacaagaaagtggaaggcctgagcaagcacatcaagctggaagaggaacggagaagcgaggacgcccagagcaaggccgccctgaccgactggctgcgggctaaggccagcttcgtgatcgagggcctgaaggaggccgacaaggacgagttctgcagatgcgagctgaagctgcagaagtggtacggggacctgcggggaaagcccttcgccatcgaagccgagaacagcatcctggacatcagcggcttcagcaagcagtacaactgtgccttcatctggcagaaggacggcgtgaagaagctgaacctgtacctgatcatcaactacttcaagggcggcaagctgcggttcaagaagatcaaacctgaagccttcgaagccaacagattctacaccgtgatcaacaaaaagagcggcgagatcgtgcccatggaggtgaacttcaacttcgacgaccccaacctgatcatcctgcctctggcctttggcaagagacagggcagagaattcatctggaacgacctgctgtccctggaaaccggcagcctgaagctggccaacggaagagtgatcgagaagacactgtacaacagaagaacccggcaggatgagcctgccctgttcgtggccctgaccttcgagcggcgggaggtcctggactcctccaatatcaaaccaatgaacctgatcggcgtggcaagaggcgaaaacatccccgccgtgatcgccctgaccgaccccgagggctgcccactgagccggtttaaggatagcctgggaaacccaacccacatcctgagaatcggcgagagctataaggagaagcagcggaccatccaggccaagaaggaggtggagcagcggagagccggcggctacagccggaagtacgccagcaaagccaagaatctggcagacgatatggtgagaaacaccgctagagatctgctgtactacgccgtgacccaggatgccatgctgatcttcgccaacctgagccggggcttcggccggcagggcaagcggaccttcatggccgagagacagtacacacggatggaggactggctgaccgccaagctggcctacgagggcctgagcaagacctacctgtccaagacactggcccagtacacctccaagacatgcagcaactgtgggtttaccatcaccagcgccgactacgacagggtgctggagaagctgaagaagacagcaacaggctggatgaccacaattaacggcaaggagctgaaggtggagggccagattacctactacaacagatacaagagacagaacgtagtcaaggacctgtccgtcgagctggatagactgagcgaagaatctgtgaacaacgacatctcctcctggacaaagggcagaagcggagaagctctgagcctcctgaagaaaagattctcccatagacccgtgcaggagaagttcgtgtgcctgaactgcggcttcgagacacacgcagccgagcaagccgccctgaacatcgccagatcctggctgttcctgcggagccaggagtacaagaaataccagacaaacaagacaaccggcaacaccgataagagagccttcgtcgagacctggcagtccttttaccggaagaagcttaaggaggtgtggaaacctgccgtgcggtctggcggatctggcggaggctcctagccaggagctggtggccttcgaggacgtgctggtggacttcacccccgaggagtggcagtacctgaacagcagccagaagaccctgtacagggaggtgatgctggagacctacagcaacctggtgagcgtggccggccagcaggacaccaagcccgacctgatcctgaagctggagctggagggcccctgcctggccgagaggaagatcagcgtgtggagcttccccgaggaggcctgccagggatctggctccggcagcggccccaagaaaaagagaaaagtctaagctgccttctgcggggcttgccttctggccatgcccttcttctctcccttgcacctgtacctcttggtctttgaataaagcctgagtaggaaggctagcaaaaaaaaaaaaaaaaaaaaaaaaaaaaaaaaaaaaaaaaaaaaaaaaaaaaaaaaaaaaaaaaaaaaaaaaaaaaaaaa

SEQ ID NO: 16754 - RNA, 9485 nt, synthetic construct
  source 1..9485: mol_type = other RNA
aggaaataagagagaaaagaagagtaagaagaaatataagagccaccatggcccctaagaagaagcgtaaagtgagccggatggaacgcctcgtctacgaggtgcggcagaagtgcagaaacatcgaggacatctgcatctcctgcggatctctgaacgtgaccctggagcacccactgttcatcggcggcatgtgccagaactgtaaaaactgttttctggagtgtgcctatcaatacgacgatgacggctaccagagctactgcaccatctgttgcggcggaagagaggtgctgatgtgtggaaataacaactgctgccggtgcttctgcgtggaatgcgtggacctgctggtgggccccggcgccgcccaggccgctattaaggaagatccttggaactgctacatgtgcggccacaagggcacatacggcctgctgagacggagagaggactggcctagcagactgcagatgttcttcgccaataaccacgaccaggagttcgacccccctaaggtgtaccctcccgtccccgccgagaagagaaagcccatccgggtcctgagcctgttcgatggcatcgccaccggtctgctggtgctgaaggacctgggcatccaggtggataggtacattgcctccgaggtgtgcgaggactccatcaccgtgggaatggtgcgtcatcagggcaagatcatgtacgtgggcgacgtgcggagcgtgacacagaagcatatccaggagtggggccctttcgacctggtgatcggcggcagcccttgcaatgacctgagcatcgtgaacccagcccggaagggcctgtacgagggaaccggcagactgttcttcgagttttacagactgctgcacgacgcccggcctaaggaaggcgacgaccggcccttcttttggctgttcgagaatgtggtggccatgggagtcagcgacaagcgggatattagccggttcctggagagcaaccccgtgatgatcgatgccaaggaagtgagcgccgcccaccgggccagatacttctggggcaatctgcctggcatgaacagacccctggccagcaccgtgaacgacaagctggagctgcaggagtgcctggagcacggccggatcgccaagttcagcaaggtgagaaccatcaccacccgaagcaacagcatcaaacaaggcaaggaccagcactttcctgtgttcatgaacgagaaggaggacatcctgtggtgtaccgagatggagagagtgttcgggttcccagtccactacacagatgtcagcaacatgtctagactggccagacagagactgctgggaagaagctggtccgtccctgtgatcagacacctgttcgcccctctgaaggagtacttcgcctgcgtgagcagcggcaacagcaacgccaacagccggggccccagcttctctagcggcctggtgccactgtccctgagagggagccacatgggccccatggagatctacaaaaccgtgagcgcctggaagcggcagcctgtgcgcgtgctgagcctgtttcggaatatcgataaagtcctgaaaagcctgggattcctggagagcggctctggctccggcggtggcaccctgaagtacgtggaggatgtgacaaacgtggtcagacgggatgtggagaagtggggccccttcgatctggtgtacggcagcacccaacccctgggcagctcttgtgaccggtgccctggctggtacatgtttcagttccaccggatcctgcagtacgccctgccgagacaggagtcccagcggccattcttttggattttcatggacaacttgctgctgaccgaggatgaccaggaaactaccactcggttcctgcagaccgaagccgtgaccctgcaggacgtgagaggccgggactaccagaacgccatgcgggtgtggtccaacatccctggactgaaaagcaagcacgcacctctgacccctaaagaagaggagtacctgcaggcccaggtgcggagcagaagcaagctggacgcccctaaggtggatctgctggtgaagaattgcctcctgcccctgagagagtacttcaagtatttcagccagaatagtctgcccctgggaggcagcggcggcggcgccctggtgacatttgaggacgtcgccgtgcggttcacccaggaggaatgggctctgctggatccttctcagaaaatcctgtaccgggacgtgatgagagagacataccggaatctgacctccgtgggcatcaactgggaatgttgggaccttgaagcctgcttcagaagcctgggaagaaacctgagagtgcaggtggtgaagagaaagtgcgagctgaccaacagcggcccctgcgccgagggcggcccaagcagcggcgcccctcctcccagcggcggcagcccagccggctccccaacctctaccgaggagggcacctctgagtccgccacccccgagagcggccctggcacctccaccgagcccagcgagggcagcgcacccggcagccctgccggcagccccacctccacagaggagggaaccagcaccgagcccagcgaaggcagcgccccaggcaccagcaccgagcctagtgagcaggagattaaacggatcaacaagatcagaagaagacttgtgaaagacagcaacaccaagaaggccggcaagacaggccccatgaaaaccctgctggttagagtgatgacacccgatctgagagagcggctggaaaacctgagaaagaagcctgaaaatatcccccagcccatcagcaatacatctagagccaacctgaataagctgctgaccgattacaccgaaatgaagaaggcgatcctgcatgtgtactgggaagagttccagaaggaccctgtgggcctgatgagccgggtggcccagcctgccagcaagaagatcgatcagaacaagctgaaacctgagatggacgagaagggcaacctgaccaccgccggctttgcctgctctcagtgtggccagcccctgttcgtgtacaagctggagcaggtgtctgagaagggcaaggcttacaccaactacttcggacggtgcaatgtggccgagcacgaaaagctgatcctgctggcccagctgaagcccgagaaggatagcgacgaagccgtgacatatagcctgggaaagtttgggcagagggccctggatttctacagcattcatgtgaccaaggagtccacccaccccgtgaagcccctggcccagatcgccggaaacagatacgcctccggacctgtgggaaaggccctgagcgacgcatgtatgggcacaatcgcctccttcctgtctaagtaccaggacatcatcatcgaacaccagaaggtggtgaagggcaaccagaagagactggagagcctgcgggagctggccggcaaggaaaacctggaataccctagcgtgaccctgccacctcagcctcacaccaaggagggcgttgatgcctacaacgaagtgatcgcccgggtgcgaatgtgggtgaacctgaacctgtggcagaagctgaagctaagcagagatgatgccaagcctctgctgagactgaagggattcccttcctttcctctggtcgagagacaggccaacgaagtggactggtgggacatggtgtgtaacgtgaagaagctgatcaacgagaaaaaggaggatggcaaggtgttttggcagaatctggctggctacaagagacaggaagccctgagaccatacctgagcagcgaggaagatcggaagaagggaaagaaattcgctcggtaccagctgggcgacctgctgctgcacctggaaaagaagcacggcgaggactggggaaaggtgtacgacgaggcctgggagcggattgacaagaaagtggaaggcctgagcaagcacatcaagctggaagaggaacggagaagcgaggacgcccagagcaaggccgccctgaccgactggctgcgggctaaggccagcttcgtgatcgagggcctgaaggaggccgacaaggacgagttctgcagatgcgagctgaagctgcagaagtggtacggggacctgcggggaaagcccttcgccatcgaagccgagaacagcatcctggacatcagcggcttcagcaagcagtacaactgtgccttcatctggcagaaggacggcgtgaagaagctgaacctgtacctgatcatcaactacttcaagggcggcaagctgcggttcaagaagatcaaacctgaagccttcgaagccaacagattctacaccgtgatcaacaaaaagagcggcgagatcgtgcccatggaggtgaacttcaacttcgacgaccccaacctgatcatcctgcctctggcctttggcaagagacagggcagagaattcatctggaacgacctgctgtccctggaaaccggcagcctgaagctggccaacggaagagtgatcgagaagacactgtacaacagaagaacccggcaggatgagcctgccctgttcgtggccctgaccttcgagcggcgggaggtcctggactcctccaatatcaaaccaatgaacctgatcggcgtggcaagaggcgaaaacatccccgccgtgatcgccctgaccgaccccgagggctgcccactgagccggtttaaggatagcctgggaaacccaacccacatcctgagaatcggcgagagctataaggagaagcagcggaccatccaggccaagaaggaggtggagcagcggagagccggcggctacagccggaagtacgccagcaaagccaagaatctggcagacgatatggtgagaaacaccgctagagatctgctgtactacgccgtgacccaggatgccatgctgatcttcgccaacctgagccggggcttcggccggcagggcaagcggaccttcatggccgagagacagtacacacggatggaggactggctgaccgccaagctggcctacgagggcctgagcaagacctacctgtccaagacactggcccagtacacctccaagacatgcagcaactgtgggtttaccatcaccagcgccgactacgacagggtgctggagaagctgaagaagacagcaacaggctggatgaccacaattaacggcaaggagctgaaggtggagggccagattacctactacaacagatacaagagacagaacgtagtcaaggacctgtccgtcgagctggatagactgagcgaagaatctgtgaacaacgacatctcctcctggacaaagggcagaagcggagaagctctgagcctcctgaagaaaagattctcccatagacccgtgcaggagaagttcgtgtgcctgaactgcggcttcgagacacacgcagccgagcaagccgccctgaacatcgccagatcctggctgttcctgcggagccaggagtacaagaaataccagacaaacaagacaaccggcaacaccgataagagagccttcgtcgagacctggcagtccttttaccggaagaagcttaaggaggtgtggaaacctgccgtgcggtctggcggatctggcggaggctccagcagcgtgaccttcgaggacgtggccgtgtacttcagccaggaggagtggaggttcctgaacaaggcccagaagcacctgtaccacgacgtgatgctggaggtgttcgccctgatcgccagcctgggcggcggccagggcgccctggaggccgccgcccccagcgagcagaacgtgagcggcggcggcagccagaaggcctacgcccaggactgcagcctggacaccaaccccggccagaccggcggcccaagcagcggcgcccctcctcccagcggcggcagcccagccggctccccaacctctaccgaggagggcacctctgagtccgccacccccgagagcggccctggcacctccaccgagcccagcgagggcagcgcacccggcagccctgccggcagccccacctccacagaggagggaaccagcaccgagcccagcgaaggcagcgccccaggcaccagcaccgagcctagtgagcaggagattaaacggatcaacaagatcagaagaagacttgtgaaagacagcaacaccaagaaggccggcaagacaggccccatgaaaaccctgctggttagagtgatgacacccgatctgagagagcggctggaaaacctgagaaagaagcctgaaaatatcccccagcccatcagcaatacatctagagccaacctgaataagctgctgaccgattacaccgaaatgaagaaggcgatcctgcatgtgtactgggaagagttccagaaggaccctgtgggcctgatgagccgggtggcccagcctgccagcaagaagatcgatcagaacaagctgaaacctgagatggacgagaagggcaacctgaccaccgccggctttgcctgctctcagtgtggccagcccctgttcgtgtacaagctggagcaggtgtctgagaagggcaaggcttacaccaactacttcggacggtgcaatgtggccgagcacgaaaagctgatcctgctggcccagctgaagcccgagaaggatagcgacgaagccgtgacatatagcctgggaaagtttgggcagagggccctggatttctacagcattcatgtgaccaaggagtccacccaccccgtgaagcccctggcccagatcgccggaaacagatacgcctccggacctgtgggaaaggccctgagcgacgcatgtatgggcacaatcgcctccttcctgtctaagtaccaggacatcatcatcgaacaccagaaggtggtgaagggcaaccagaagagactggagagcctgcgggagctggccggcaaggaaaacctggaataccctagcgtgaccctgccacctcagcctcacaccaaggagggcgttgatgcctacaacgaagtgatcgcccgggtgcgaatgtgggtgaacctgaacctgtggcagaagctgaagctaagcagagatgatgccaagcctctgctgagactgaagggattcccttcctttcctctggtcgagagacaggccaacgaagtggactggtgggacatggtgtgtaacgtgaagaagctgatcaacgagaaaaaggaggatggcaaggtgttttggcagaatctggctggctacaagagacaggaagccctgagaccatacctgagcagcgaggaagatcggaagaagggaaagaaattcgctcggtaccagctgggcgacctgctgctgcacctggaaaagaagcacggcgaggactggggaaaggtgtacgacgaggcctgggagcggattgacaagaaagtggaaggcctgagcaagcacatcaagctggaagaggaacggagaagcgaggacgcccagagcaaggccgccctgaccgactggctgcgggctaaggccagcttcgtgatcgagggcctgaaggaggccgacaaggacgagttctgcagatgcgagctgaagctgcagaagtggtacggggacctgcggggaaagcccttcgccatcgaagccgagaacagcatcctggacatcagcggcttcagcaagcagtacaactgtgccttcatctggcagaaggacggcgtgaagaagctgaacctgtacctgatcatcaactacttcaagggcggcaagctgcggttcaagaagatcaaacctgaagccttcgaagccaacagattctacaccgtgatcaacaaaaagagcggcgagatcgtgcccatggaggtgaacttcaacttcgacgaccccaacctgatcatcctgcctctggcctttggcaagagacagggcagagaattcatctggaacgacctgctgtccctggaaaccggcagcctgaagctggccaacggaagagtgatcgagaagacactgtacaacagaagaacccggcaggatgagcctgccctgttcgtggccctgaccttcgagcggcgggaggtcctggactcctccaatatcaaaccaatgaacctgatcggcgtggcaagaggcgaaaacatccccgccgtgatcgccctgaccgaccccgagggctgcccactgagccggtttaaggatagcctgggaaacccaacccacatcctgagaatcggcgagagctataaggagaagcagcggaccatccaggccaagaaggaggtggagcagcggagagccggcggctacagccggaagtacgccagcaaagccaagaatctggcagacgatatggtgagaaacaccgctagagatctgctgtactacgccgtgacccaggatgccatgctgatcttcgccaacctgagccggggcttcggccggcagggcaagcggaccttcatggccgagagacagtacacacggatggaggactggctgaccgccaagctggcctacgagggcctgagcaagacctacctgtccaagacactggcccagtacacctccaagacatgcagcaactgtgggtttaccatcaccagcgccgactacgacagggtgctggagaagctgaagaagacagcaacaggctggatgaccacaattaacggcaaggagctgaaggtggagggccagattacctactacaacagatacaagagacagaacgtagtcaaggacctgtccgtcgagctggatagactgagcgaagaatctgtgaacaacgacatctcctcctggacaaagggcagaagcggagaagctctgagcctcctgaagaaaagattctcccatagacccgtgcaggagaagttcgtgtgcctgaactgcggcttcgagacacacgcagccgagcaagccgccctgaacatcgccagatcctggctgttcctgcggagccaggagtacaagaaataccagacaaacaagacaaccggcaacaccgataagagagccttcgtcgagacctggcagtccttttaccggaagaagcttaaggaggtgtggaaacctgccgtgcggtctggcggatctggcggaggctcctagcagcgtgaccttcgaggacgtggccgtgtacttcagccaggaggagtggaggttcctgaacaaggcccagaagcacctgtaccacgacgtgatgctggaggtgttcgccctgatcgccagcctgggcggcggccagggcgccctggaggccgccgcccccagcgagcagaacgtgagcggcggcggcagccagaaggcctacgcccaggactgcagcctggacaccaaccccggccagaccggatctggctccggcagcggccccaagaaaaagagaaaagtctaagctgccttctgcggggcttgccttctggccatgcccttcttctctcccttgcacctgtacctcttggtctttgaataaagcctgagtaggaaggctagcaaaaaaaaaaaaaaaaaaaaaaaaaaaaaaaaaaaaaaaaaaaaaaaaaaaaaaaaaaaaaaaaaaaaaaaaaaaaaaaa

SEQ ID NO: 16755 - RNA, 9485 nt, synthetic construct
  source 1..9485: mol_type = other RNA
aggaaataagagagaaaagaagagtaagaagaaatataagagccaccatggcccctaagaagaagcgtaaagtgagccggatggaacgcctcgtctacgaggtgcggcagaagtgcagaaacatcgaggacatctgcatctcctgcggatctctgaacgtgaccctggagcacccactgttcatcggcggcatgtgccagaactgtaaaaactgttttctggagtgtgcctatcaatacgacgatgacggctaccagagctactgcaccatctgttgcggcggaagagaggtgctgatgtgtggaaataacaactgctgccggtgcttctgcgtggaatgcgtggacctgctggtgggccccggcgccgcccaggccgctattaaggaagatccttggaactgctacatgtgcggccacaagggcacatacggcctgctgagacggagagaggactggcctagcagactgcagatgttcttcgccaataaccacgaccaggagttcgacccccctaaggtgtaccctcccgtccccgccgagaagagaaagcccatccgggtcctgagcctgttcgatggcatcgccaccggtctgctggtgctgaaggacctgggcatccaggtggataggtacattgcctccgaggtgtgcgaggactccatcaccgtgggaatggtgcgtcatcagggcaagatcatgtacgtgggcgacgtgcggagcgtgacacagaagcatatccaggagtggggccctttcgacctggtgatcggcggcagcccttgcaatgacctgagcatcgtgaacccagcccggaagggcctgtacgagggaaccggcagactgttcttcgagttttacagactgctgcacgacgcccggcctaaggaaggcgacgaccggcccttcttttggctgttcgagaatgtggtggccatgggagtcagcgacaagcgggatattagccggttcctggagagcaaccccgtgatgatcgatgccaaggaagtgagcgccgcccaccgggccagatacttctggggcaatctgcctggcatgaacagacccctggccagcaccgtgaacgacaagctggagctgcaggagtgcctggagcacggccggatcgccaagttcagcaaggtgagaaccatcaccacccgaagcaacagcatcaaacaaggcaaggaccagcactttcctgtgttcatgaacgagaaggaggacatcctgtggtgtaccgagatggagagagtgttcgggttcccagtccactacacagatgtcagcaacatgtctagactggccagacagagactgctgggaagaagctggtccgtccctgtgatcagacacctgttcgcccctctgaaggagtacttcgcctgcgtgagcagcggcaacagcaacgccaacagccggggccccagcttctctagcggcctggtgccactgtccctgagagggagccacatgggccccatggagatctacaaaaccgtgagcgcctggaagcggcagcctgtgcgcgtgctgagcctgtttcggaatatcgataaagtcctgaaaagcctgggattcctggagagcggctctggctccggcggtggcaccctgaagtacgtggaggatgtgacaaacgtggtcagacgggatgtggagaagtggggccccttcgatctggtgtacggcagcacccaacccctgggcagctcttgtgaccggtgccctggctggtacatgtttcagttccaccggatcctgcagtacgccctgccgagacaggagtcccagcggccattcttttggattttcatggacaacttgctgctgaccgaggatgaccaggaaactaccactcggttcctgcagaccgaagccgtgaccctgcaggacgtgagaggccgggactaccagaacgccatgcgggtgtggtccaacatccctggactgaaaagcaagcacgcacctctgacccctaaagaagaggagtacctgcaggcccaggtgcggagcagaagcaagctggacgcccctaaggtggatctgctggtgaagaattgcctcctgcccctgagagagtacttcaagtatttcagccagaatagtctgcccctgggaggcagcggcggcggcgccctggtgacatttgaggacgtcgccgtgcggttcacccaggaggaatgggctctgctggatccttctcagaaaatcctgtaccgggacgtgatgagagagacataccggaatctgacctccgtgggcatcaactgggaatgttgggaccttgaagcctgcttcagaagcctgggaagaaacctgagagtgcaggtggtgaagagaaagtgcgagctgaccaacagcggcccctgcgccgagggcggcccaagcagcggcgcccctcctcccagcggcggcagcccagccggctccccaacctctaccgaggagggcacctctgagtccgccacccccgagagcggccctggcacctccaccgagcccagcgagggcagcgcacccggcagccctgccggcagccccacctccacagaggagggaaccagcaccgagcccagcgaaggcagcgccccaggcaccagcaccgagcctagtgagcaggagattaaacggatcaacaagatcagaagaagacttgtgaaagacagcaacaccaagaaggccggcaagacaggccccatgaaaaccctgctggttagagtgatgacacccgatctgagagagcggctggaaaacctgagaaagaagcctgaaaatatcccccagcccatcagcaatacatctagagccaacctgaataagctgctgaccgattacaccgaaatgaagaaggcgatcctgcatgtgtactgggaagagttccagaaggaccctgtgggcctgatgagccgggtggcccagcctgccagcaagaagatcgatcagaacaagctgaaacctgagatggacgagaagggcaacctgaccaccgccggctttgcctgctctcagtgtggccagcccctgttcgtgtacaagctggagcaggtgtctgagaagggcaaggcttacaccaactacttcggacggtgcaatgtggccgagcacgaaaagctgatcctgctggcccagctgaagcccgagaaggatagcgacgaagccgtgacatatagcctgggaaagtttgggcagagggccctggatttctacagcattcatgtgaccaaggagtccacccaccccgtgaagcccctggcccagatcgccggaaacagatacgcctccggacctgtgggaaaggccctgagcgacgcatgtatgggcacaatcgcctccttcctgtctaagtaccaggacatcatcatcgaacaccagaaggtggtgaagggcaaccagaagagactggagagcctgcgggagctggccggcaaggaaaacctggaataccctagcgtgaccctgccacctcagcctcacaccaaggagggcgttgatgcctacaacgaagtgatcgcccgggtgcgaatgtgggtgaacctgaacctgtggcagaagctgaagctaagcagagatgatgccaagcctctgctgagactgaagggattcccttcctttcctctggtcgagagacaggccaacgaagtggactggtgggacatggtgtgtaacgtgaagaagctgatcaacgagaaaaaggaggatggcaaggtgttttggcagaatctggctggctacaagagacaggaagccctgagaccatacctgagcagcgaggaagatcggaagaagggaaagaaattcgctcggtaccagctgggcgacctgctgctgcacctggaaaagaagcacggcgaggactggggaaaggtgtacgacgaggcctgggagcggattgacaagaaagtggaaggcctgagcaagcacatcaagctggaagaggaacggagaagcgaggacgcccagagcaaggccgccctgaccgactggctgcgggctaaggccagcttcgtgatcgagggcctgaaggaggccgacaaggacgagttctgcagatgcgagctgaagctgcagaagtggtacggggacctgcggggaaagcccttcgccatcgaagccgagaacagcatcctggacatcagcggcttcagcaagcagtacaactgtgccttcatctggcagaaggacggcgtgaagaagctgaacctgtacctgatcatcaactacttcaagggcggcaagctgcggttcaagaagatcaaacctgaagccttcgaagccaacagattctacaccgtgatcaacaaaaagagcggcgagatcgtgcccatggaggtgaacttcaacttcgacgaccccaacctgatcatcctgcctctggcctttggcaagagacagggcagagaattcatctggaacgacctgctgtccctggaaaccggcagcctgaagctggccaacggaagagtgatcgagaagacactgtacaacagaagaacccggcaggatgagcctgccctgttcgtggccctgaccttcgagcggcgggaggtcctggactcctccaatatcaaaccaatgaacctgatcggcgtggcaagaggcgaaaacatccccgccgtgatcgccctgaccgaccccgagggctgcccactgagccggtttaaggatagcctgggaaacccaacccacatcctgagaatcggcgagagctataaggagaagcagcggaccatccaggccaagaaggaggtggagcagcggagagccggcggctacagccggaagtacgccagcaaagccaagaatctggcagacgatatggtgagaaacaccgctagagatctgctgtactacgccgtgacccaggatgccatgctgatcttcgccaacctgagccggggcttcggccggcagggcaagcggaccttcatggccgagagacagtacacacggatggaggactggctgaccgccaagctggcctacgagggcctgagcaagacctacctgtccaagacactggcccagtacacctccaagacatgcagcaactgtgggtttaccatcaccagcgccgactacgacagggtgctggagaagctgaagaagacagcaacaggctggatgaccacaattaacggcaaggagctgaaggtggagggccagattacctactacaacagatacaagagacagaacgtagtcaaggacctgtccgtcgagctggatagactgagcgaagaatctgtgaacaacgacatctcctcctggacaaagggcagaagcggagaagctctgagcctcctgaagaaaagattctcccatagacccgtgcaggagaagttcgtgtgcctgaactgcggcttcgagacacacgcagccgagcaagccgccctgaacatcgccagatcctggctgttcctgcggagccaggagtacaagaaataccagacaaacaagacaaccggcaacaccgataagagagccttcgtcgagacctggcagtccttttaccggaagaagcttaaggaggtgtggaaacctgccgtgcggtctggcggatctggcggaggctccgtgaaggaggtggtgaccctgcaggacgtggccgtggacttcacctgggaggagtggaggctgctgagccccccccagaaggagctgtacagggaggtgatgctggagaacgcccagaacctgctgagcgtgggcctgcccgcccccctggaggacgtgctgagctacctggagcagaggaagggcccctggatgctggagcagaagaggctgaggagctgctgccccggcgagatcaggctgggcggcccaagcagcggcgcccctcctcccagcggcggcagcccagccggctccccaacctctaccgaggagggcacctctgagtccgccacccccgagagcggccctggcacctccaccgagcccagcgagggcagcgcacccggcagccctgccggcagccccacctccacagaggagggaaccagcaccgagcccagcgaaggcagcgccccaggcaccagcaccgagcctagtgagcaggagattaaacggatcaacaagatcagaagaagacttgtgaaagacagcaacaccaagaaggccggcaagacaggccccatgaaaaccctgctggttagagtgatgacacccgatctgagagagcggctggaaaacctgagaaagaagcctgaaaatatcccccagcccatcagcaatacatctagagccaacctgaataagctgctgaccgattacaccgaaatgaagaaggcgatcctgcatgtgtactgggaagagttccagaaggaccctgtgggcctgatgagccgggtggcccagcctgccagcaagaagatcgatcagaacaagctgaaacctgagatggacgagaagggcaacctgaccaccgccggctttgcctgctctcagtgtggccagcccctgttcgtgtacaagctggagcaggtgtctgagaagggcaaggcttacaccaactacttcggacggtgcaatgtggccgagcacgaaaagctgatcctgctggcccagctgaagcccgagaaggatagcgacgaagccgtgacatatagcctgggaaagtttgggcagagggccctggatttctacagcattcatgtgaccaaggagtccacccaccccgtgaagcccctggcccagatcgccggaaacagatacgcctccggacctgtgggaaaggccctgagcgacgcatgtatgggcacaatcgcctccttcctgtctaagtaccaggacatcatcatcgaacaccagaaggtggtgaagggcaaccagaagagactggagagcctgcgggagctggccggcaaggaaaacctggaataccctagcgtgaccctgccacctcagcctcacaccaaggagggcgttgatgcctacaacgaagtgatcgcccgggtgcgaatgtgggtgaacctgaacctgtggcagaagctgaagctaagcagagatgatgccaagcctctgctgagactgaagggattcccttcctttcctctggtcgagagacaggccaacgaagtggactggtgggacatggtgtgtaacgtgaagaagctgatcaacgagaaaaaggaggatggcaaggtgttttggcagaatctggctggctacaagagacaggaagccctgagaccatacctgagcagcgaggaagatcggaagaagggaaagaaattcgctcggtaccagctgggcgacctgctgctgcacctggaaaagaagcacggcgaggactggggaaaggtgtacgacgaggcctgggagcggattgacaagaaagtggaaggcctgagcaagcacatcaagctggaagaggaacggagaagcgaggacgcccagagcaaggccgccctgaccgactggctgcgggctaaggccagcttcgtgatcgagggcctgaaggaggccgacaaggacgagttctgcagatgcgagctgaagctgcagaagtggtacggggacctgcggggaaagcccttcgccatcgaagccgagaacagcatcctggacatcagcggcttcagcaagcagtacaactgtgccttcatctggcagaaggacggcgtgaagaagctgaacctgtacctgatcatcaactacttcaagggcggcaagctgcggttcaagaagatcaaacctgaagccttcgaagccaacagattctacaccgtgatcaacaaaaagagcggcgagatcgtgcccatggaggtgaacttcaacttcgacgaccccaacctgatcatcctgcctctggcctttggcaagagacagggcagagaattcatctggaacgacctgctgtccctggaaaccggcagcctgaagctggccaacggaagagtgatcgagaagacactgtacaacagaagaacccggcaggatgagcctgccctgttcgtggccctgaccttcgagcggcgggaggtcctggactcctccaatatcaaaccaatgaacctgatcggcgtggcaagaggcgaaaacatccccgccgtgatcgccctgaccgaccccgagggctgcccactgagccggtttaaggatagcctgggaaacccaacccacatcctgagaatcggcgagagctataaggagaagcagcggaccatccaggccaagaaggaggtggagcagcggagagccggcggctacagccggaagtacgccagcaaagccaagaatctggcagacgatatggtgagaaacaccgctagagatctgctgtactacgccgtgacccaggatgccatgctgatcttcgccaacctgagccggggcttcggccggcagggcaagcggaccttcatggccgagagacagtacacacggatggaggactggctgaccgccaagctggcctacgagggcctgagcaagacctacctgtccaagacactggcccagtacacctccaagacatgcagcaactgtgggtttaccatcaccagcgccgactacgacagggtgctggagaagctgaagaagacagcaacaggctggatgaccacaattaacggcaaggagctgaaggtggagggccagattacctactacaacagatacaagagacagaacgtagtcaaggacctgtccgtcgagctggatagactgagcgaagaatctgtgaacaacgacatctcctcctggacaaagggcagaagcggagaagctctgagcctcctgaagaaaagattctcccatagacccgtgcaggagaagttcgtgtgcctgaactgcggcttcgagacacacgcagccgagcaagccgccctgaacatcgccagatcctggctgttcctgcggagccaggagtacaagaaataccagacaaacaagacaaccggcaacaccgataagagagccttcgtcgagacctggcagtccttttaccggaagaagcttaaggaggtgtggaaacctgccgtgcggtctggcggatctggcggaggctcctgtgaaggaggtggtgaccctgcaggacgtggccgtggacttcacctgggaggagtggaggctgctgagccccccccagaaggagctgtacagggaggtgatgctggagaacgcccagaacctgctgagcgtgggcctgcccgcccccctggaggacgtgctgagctacctggagcagaggaagggcccctggatgctggagcagaagaggctgaggagctgctgccccggcgagatcaggctgggatctggctccggcagcggccccaagaaaaagagaaaagtctaagctgccttctgcggggcttgccttctggccatgcccttcttctctcccttgcacctgtacctcttggtctttgaataaagcctgagtaggaaggctagcaaaaaaaaaaaaaaaaaaaaaaaaaaaaaaaaaaaaaaaaaaaaaaaaaaaaaaaaaaaaaaaaaaaaaaaaaaaaaaaa

SEQ ID NO: 16756 - RNA, 9485 nt, synthetic construct
  source 1..9485: mol_type = other RNA
aggaaataagagagaaaagaagagtaagaagaaatataagagccaccatggcccctaagaagaagcgtaaagtgagccggatggaacgcctcgtctacgaggtgcggcagaagtgcagaaacatcgaggacatctgcatctcctgcggatctctgaacgtgaccctggagcacccactgttcatcggcggcatgtgccagaactgtaaaaactgttttctggagtgtgcctatcaatacgacgatgacggctaccagagctactgcaccatctgttgcggcggaagagaggtgctgatgtgtggaaataacaactgctgccggtgcttctgcgtggaatgcgtggacctgctggtgggccccggcgccgcccaggccgctattaaggaagatccttggaactgctacatgtgcggccacaagggcacatacggcctgctgagacggagagaggactggcctagcagactgcagatgttcttcgccaataaccacgaccaggagttcgacccccctaaggtgtaccctcccgtccccgccgagaagagaaagcccatccgggtcctgagcctgttcgatggcatcgccaccggtctgctggtgctgaaggacctgggcatccaggtggataggtacattgcctccgaggtgtgcgaggactccatcaccgtgggaatggtgcgtcatcagggcaagatcatgtacgtgggcgacgtgcggagcgtgacacagaagcatatccaggagtggggccctttcgacctggtgatcggcggcagcccttgcaatgacctgagcatcgtgaacccagcccggaagggcctgtacgagggaaccggcagactgttcttcgagttttacagactgctgcacgacgcccggcctaaggaaggcgacgaccggcccttcttttggctgttcgagaatgtggtggccatgggagtcagcgacaagcgggatattagccggttcctggagagcaaccccgtgatgatcgatgccaaggaagtgagcgccgcccaccgggccagatacttctggggcaatctgcctggcatgaacagacccctggccagcaccgtgaacgacaagctggagctgcaggagtgcctggagcacggccggatcgccaagttcagcaaggtgagaaccatcaccacccgaagcaacagcatcaaacaaggcaaggaccagcactttcctgtgttcatgaacgagaaggaggacatcctgtggtgtaccgagatggagagagtgttcgggttcccagtccactacacagatgtcagcaacatgtctagactggccagacagagactgctgggaagaagctggtccgtccctgtgatcagacacctgttcgcccctctgaaggagtacttcgcctgcgtgagcagcggcaacagcaacgccaacagccggggccccagcttctctagcggcctggtgccactgtccctgagagggagccacatgggccccatggagatctacaaaaccgtgagcgcctggaagcggcagcctgtgcgcgtgctgagcctgtttcggaatatcgataaagtcctgaaaagcctgggattcctggagagcggctctggctccggcggtggcaccctgaagtacgtggaggatgtgacaaacgtggtcagacgggatgtggagaagtggggccccttcgatctggtgtacggcagcacccaacccctgggcagctcttgtgaccggtgccctggctggtacatgtttcagttccaccggatcctgcagtacgccctgccgagacaggagtcccagcggccattcttttggattttcatggacaacttgctgctgaccgaggatgaccaggaaactaccactcggttcctgcagaccgaagccgtgaccctgcaggacgtgagaggccgggactaccagaacgccatgcgggtgtggtccaacatccctggactgaaaagcaagcacgcacctctgacccctaaagaagaggagtacctgcaggcccaggtgcggagcagaagcaagctggacgcccctaaggtggatctgctggtgaagaattgcctcctgcccctgagagagtacttcaagtatttcagccagaatagtctgcccctgggaggcagcggcggcggcgccctggtgacatttgaggacgtcgccgtgcggttcacccaggaggaatgggctctgctggatccttctcagaaaatcctgtaccgggacgtgatgagagagacataccggaatctgacctccgtgggcatcaactgggaatgttgggaccttgaagcctgcttcagaagcctgggaagaaacctgagagtgcaggtggtgaagagaaagtgcgagctgaccaacagcggcccctgcgccgagggcggcccaagcagcggcgcccctcctcccagcggcggcagcccagccggctccccaacctctaccgaggagggcacctctgagtccgccacccccgagagcggccctggcacctccaccgagcccagcgagggcagcgcacccggcagccctgccggcagccccacctccacagaggagggaaccagcaccgagcccagcgaaggcagcgccccaggcaccagcaccgagcctagtgagcaggagattaaacggatcaacaagatcagaagaagacttgtgaaagacagcaacaccaagaaggccggcaagacaggccccatgaaaaccctgctggttagagtgatgacacccgatctgagagagcggctggaaaacctgagaaagaagcctgaaaatatcccccagcccatcagcaatacatctagagccaacctgaataagctgctgaccgattacaccgaaatgaagaaggcgatcctgcatgtgtactgggaagagttccagaaggaccctgtgggcctgatgagccgggtggcccagcctgccagcaagaagatcgatcagaacaagctgaaacctgagatggacgagaagggcaacctgaccaccgccggctttgcctgctctcagtgtggccagcccctgttcgtgtacaagctggagcaggtgtctgagaagggcaaggcttacaccaactacttcggacggtgcaatgtggccgagcacgaaaagctgatcctgctggcccagctgaagcccgagaaggatagcgacgaagccgtgacatatagcctgggaaagtttgggcagagggccctggatttctacagcattcatgtgaccaaggagtccacccaccccgtgaagcccctggcccagatcgccggaaacagatacgcctccggacctgtgggaaaggccctgagcgacgcatgtatgggcacaatcgcctccttcctgtctaagtaccaggacatcatcatcgaacaccagaaggtggtgaagggcaaccagaagagactggagagcctgcgggagctggccggcaaggaaaacctggaataccctagcgtgaccctgccacctcagcctcacaccaaggagggcgttgatgcctacaacgaagtgatcgcccgggtgcgaatgtgggtgaacctgaacctgtggcagaagctgaagctaagcagagatgatgccaagcctctgctgagactgaagggattcccttcctttcctctggtcgagagacaggccaacgaagtggactggtgggacatggtgtgtaacgtgaagaagctgatcaacgagaaaaaggaggatggcaaggtgttttggcagaatctggctggctacaagagacaggaagccctgagaccatacctgagcagcgaggaagatcggaagaagggaaagaaattcgctcggtaccagctgggcgacctgctgctgcacctggaaaagaagcacggcgaggactggggaaaggtgtacgacgaggcctgggagcggattgacaagaaagtggaaggcctgagcaagcacatcaagctggaagaggaacggagaagcgaggacgcccagagcaaggccgccctgaccgactggctgcgggctaaggccagcttcgtgatcgagggcctgaaggaggccgacaaggacgagttctgcagatgcgagctgaagctgcagaagtggtacggggacctgcggggaaagcccttcgccatcgaagccgagaacagcatcctggacatcagcggcttcagcaagcagtacaactgtgccttcatctggcagaaggacggcgtgaagaagctgaacctgtacctgatcatcaactacttcaagggcggcaagctgcggttcaagaagatcaaacctgaagccttcgaagccaacagattctacaccgtgatcaacaaaaagagcggcgagatcgtgcccatggaggtgaacttcaacttcgacgaccccaacctgatcatcctgcctctggcctttggcaagagacagggcagagaattcatctggaacgacctgctgtccctggaaaccggcagcctgaagctggccaacggaagagtgatcgagaagacactgtacaacagaagaacccggcaggatgagcctgccctgttcgtggccctgaccttcgagcggcgggaggtcctggactcctccaatatcaaaccaatgaacctgatcggcgtggcaagaggcgaaaacatccccgccgtgatcgccctgaccgaccccgagggctgcccactgagccggtttaaggatagcctgggaaacccaacccacatcctgagaatcggcgagagctataaggagaagcagcggaccatccaggccaagaaggaggtggagcagcggagagccggcggctacagccggaagtacgccagcaaagccaagaatctggcagacgatatggtgagaaacaccgctagagatctgctgtactacgccgtgacccaggatgccatgctgatcttcgccaacctgagccggggcttcggccggcagggcaagcggaccttcatggccgagagacagtacacacggatggaggactggctgaccgccaagctggcctacgagggcctgagcaagacctacctgtccaagacactggcccagtacacctccaagacatgcagcaactgtgggtttaccatcaccagcgccgactacgacagggtgctggagaagctgaagaagacagcaacaggctggatgaccacaattaacggcaaggagctgaaggtggagggccagattacctactacaacagatacaagagacagaacgtagtcaaggacctgtccgtcgagctggatagactgagcgaagaatctgtgaacaacgacatctcctcctggacaaagggcagaagcggagaagctctgagcctcctgaagaaaagattctcccatagacccgtgcaggagaagttcgtgtgcctgaactgcggcttcgagacacacgcagccgagcaagccgccctgaacatcgccagatcctggctgttcctgcggagccaggagtacaagaaataccagacaaacaagacaaccggcaacaccgataagagagccttcgtcgagacctggcagtccttttaccggaagaagcttaaggaggtgtggaaacctgccgtgcggtctggcggatctggcggaggctccatgctgcagaccgcctggaggcaggagcccgtgaccttcgaggacgtggccgtgtacttcacccagaacgagtggaccagcctggaccccgtgcagagggccctgtacagggaggtgatgctggagaactacgccaacgtggccagcctggccttccccttcaccacccccgtgctggtgagccagctggagcagggcgagaggccctggggcctggacccctgggagcccgtgggcagggagggcggcccaagcagcggcgcccctcctcccagcggcggcagcccagccggctccccaacctctaccgaggagggcacctctgagtccgccacccccgagagcggccctggcacctccaccgagcccagcgagggcagcgcacccggcagccctgccggcagccccacctccacagaggagggaaccagcaccgagcccagcgaaggcagcgccccaggcaccagcaccgagcctagtgagcaggagattaaacggatcaacaagatcagaagaagacttgtgaaagacagcaacaccaagaaggccggcaagacaggccccatgaaaaccctgctggttagagtgatgacacccgatctgagagagcggctggaaaacctgagaaagaagcctgaaaatatcccccagcccatcagcaatacatctagagccaacctgaataagctgctgaccgattacaccgaaatgaagaaggcgatcctgcatgtgtactgggaagagttccagaaggaccctgtgggcctgatgagccgggtggcccagcctgccagcaagaagatcgatcagaacaagctgaaacctgagatggacgagaagggcaacctgaccaccgccggctttgcctgctctcagtgtggccagcccctgttcgtgtacaagctggagcaggtgtctgagaagggcaaggcttacaccaactacttcggacggtgcaatgtggccgagcacgaaaagctgatcctgctggcccagctgaagcccgagaaggatagcgacgaagccgtgacatatagcctgggaaagtttgggcagagggccctggatttctacagcattcatgtgaccaaggagtccacccaccccgtgaagcccctggcccagatcgccggaaacagatacgcctccggacctgtgggaaaggccctgagcgacgcatgtatgggcacaatcgcctccttcctgtctaagtaccaggacatcatcatcgaacaccagaaggtggtgaagggcaaccagaagagactggagagcctgcgggagctggccggcaaggaaaacctggaataccctagcgtgaccctgccacctcagcctcacaccaaggagggcgttgatgcctacaacgaagtgatcgcccgggtgcgaatgtgggtgaacctgaacctgtggcagaagctgaagctaagcagagatgatgccaagcctctgctgagactgaagggattcccttcctttcctctggtcgagagacaggccaacgaagtggactggtgggacatggtgtgtaacgtgaagaagctgatcaacgagaaaaaggaggatggcaaggtgttttggcagaatctggctggctacaagagacaggaagccctgagaccatacctgagcagcgaggaagatcggaagaagggaaagaaattcgctcggtaccagctgggcgacctgctgctgcacctggaaaagaagcacggcgaggactggggaaaggtgtacgacgaggcctgggagcggattgacaagaaagtggaaggcctgagcaagcacatcaagctggaagaggaacggagaagcgaggacgcccagagcaaggccgccctgaccgactggctgcgggctaaggccagcttcgtgatcgagggcctgaaggaggccgacaaggacgagttctgcagatgcgagctgaagctgcagaagtggtacggggacctgcggggaaagcccttcgccatcgaagccgagaacagcatcctggacatcagcggcttcagcaagcagtacaactgtgccttcatctggcagaaggacggcgtgaagaagctgaacctgtacctgatcatcaactacttcaagggcggcaagctgcggttcaagaagatcaaacctgaagccttcgaagccaacagattctacaccgtgatcaacaaaaagagcggcgagatcgtgcccatggaggtgaacttcaacttcgacgaccccaacctgatcatcctgcctctggcctttggcaagagacagggcagagaattcatctggaacgacctgctgtccctggaaaccggcagcctgaagctggccaacggaagagtgatcgagaagacactgtacaacagaagaacccggcaggatgagcctgccctgttcgtggccctgaccttcgagcggcgggaggtcctggactcctccaatatcaaaccaatgaacctgatcggcgtggcaagaggcgaaaacatccccgccgtgatcgccctgaccgaccccgagggctgcccactgagccggtttaaggatagcctgggaaacccaacccacatcctgagaatcggcgagagctataaggagaagcagcggaccatccaggccaagaaggaggtggagcagcggagagccggcggctacagccggaagtacgccagcaaagccaagaatctggcagacgatatggtgagaaacaccgctagagatctgctgtactacgccgtgacccaggatgccatgctgatcttcgccaacctgagccggggcttcggccggcagggcaagcggaccttcatggccgagagacagtacacacggatggaggactggctgaccgccaagctggcctacgagggcctgagcaagacctacctgtccaagacactggcccagtacacctccaagacatgcagcaactgtgggtttaccatcaccagcgccgactacgacagggtgctggagaagctgaagaagacagcaacaggctggatgaccacaattaacggcaaggagctgaaggtggagggccagattacctactacaacagatacaagagacagaacgtagtcaaggacctgtccgtcgagctggatagactgagcgaagaatctgtgaacaacgacatctcctcctggacaaagggcagaagcggagaagctctgagcctcctgaagaaaagattctcccatagacccgtgcaggagaagttcgtgtgcctgaactgcggcttcgagacacacgcagccgagcaagccgccctgaacatcgccagatcctggctgttcctgcggagccaggagtacaagaaataccagacaaacaagacaaccggcaacaccgataagagagccttcgtcgagacctggcagtccttttaccggaagaagcttaaggaggtgtggaaacctgccgtgcggtctggcggatctggcggaggctcctatgctgcagaccgcctggaggcaggagcccgtgaccttcgaggacgtggccgtgtacttcacccagaacgagtggaccagcctggaccccgtgcagagggccctgtacagggaggtgatgctggagaactacgccaacgtggccagcctggccttccccttcaccacccccgtgctggtgagccagctggagcagggcgagaggccctggggcctggacccctgggagcccgtgggcagggagggatctggctccggcagcggccccaagaaaaagagaaaagtctaagctgccttctgcggggcttgccttctggccatgcccttcttctctcccttgcacctgtacctcttggtctttgaataaagcctgagtaggaaggctagcaaaaaaaaaaaaaaaaaaaaaaaaaaaaaaaaaaaaaaaaaaaaaaaaaaaaaaaaaaaaaaaaaaaaaaaaaaaaaaaa

SEQ ID NO: 16757 - RNA, 9485 nt, synthetic construct
  source 1..9485: mol_type = other RNA
aggaaataagagagaaaagaagagtaagaagaaatataagagccaccatggcccctaagaagaagcgtaaagtgagccggatggaacgcctcgtctacgaggtgcggcagaagtgcagaaacatcgaggacatctgcatctcctgcggatctctgaacgtgaccctggagcacccactgttcatcggcggcatgtgccagaactgtaaaaactgttttctggagtgtgcctatcaatacgacgatgacggctaccagagctactgcaccatctgttgcggcggaagagaggtgctgatgtgtggaaataacaactgctgccggtgcttctgcgtggaatgcgtggacctgctggtgggccccggcgccgcccaggccgctattaaggaagatccttggaactgctacatgtgcggccacaagggcacatacggcctgctgagacggagagaggactggcctagcagactgcagatgttcttcgccaataaccacgaccaggagttcgacccccctaaggtgtaccctcccgtccccgccgagaagagaaagcccatccgggtcctgagcctgttcgatggcatcgccaccggtctgctggtgctgaaggacctgggcatccaggtggataggtacattgcctccgaggtgtgcgaggactccatcaccgtgggaatggtgcgtcatcagggcaagatcatgtacgtgggcgacgtgcggagcgtgacacagaagcatatccaggagtggggccctttcgacctggtgatcggcggcagcccttgcaatgacctgagcatcgtgaacccagcccggaagggcctgtacgagggaaccggcagactgttcttcgagttttacagactgctgcacgacgcccggcctaaggaaggcgacgaccggcccttcttttggctgttcgagaatgtggtggccatgggagtcagcgacaagcgggatattagccggttcctggagagcaaccccgtgatgatcgatgccaaggaagtgagcgccgcccaccgggccagatacttctggggcaatctgcctggcatgaacagacccctggccagcaccgtgaacgacaagctggagctgcaggagtgcctggagcacggccggatcgccaagttcagcaaggtgagaaccatcaccacccgaagcaacagcatcaaacaaggcaaggaccagcactttcctgtgttcatgaacgagaaggaggacatcctgtggtgtaccgagatggagagagtgttcgggttcccagtccactacacagatgtcagcaacatgtctagactggccagacagagactgctgggaagaagctggtccgtccctgtgatcagacacctgttcgcccctctgaaggagtacttcgcctgcgtgagcagcggcaacagcaacgccaacagccggggccccagcttctctagcggcctggtgccactgtccctgagagggagccacatgggccccatggagatctacaaaaccgtgagcgcctggaagcggcagcctgtgcgcgtgctgagcctgtttcggaatatcgataaagtcctgaaaagcctgggattcctggagagcggctctggctccggcggtggcaccctgaagtacgtggaggatgtgacaaacgtggtcagacgggatgtggagaagtggggccccttcgatctggtgtacggcagcacccaacccctgggcagctcttgtgaccggtgccctggctggtacatgtttcagttccaccggatcctgcagtacgccctgccgagacaggagtcccagcggccattcttttggattttcatggacaacttgctgctgaccgaggatgaccaggaaactaccactcggttcctgcagaccgaagccgtgaccctgcaggacgtgagaggccgggactaccagaacgccatgcgggtgtggtccaacatccctggactgaaaagcaagcacgcacctctgacccctaaagaagaggagtacctgcaggcccaggtgcggagcagaagcaagctggacgcccctaaggtggatctgctggtgaagaattgcctcctgcccctgagagagtacttcaagtatttcagccagaatagtctgcccctgggaggcagcggcggcggcgccctggtgacatttgaggacgtcgccgtgcggttcacccaggaggaatgggctctgctggatccttctcagaaaatcctgtaccgggacgtgatgagagagacataccggaatctgacctccgtgggcatcaactgggaatgttgggaccttgaagcctgcttcagaagcctgggaagaaacctgagagtgcaggtggtgaagagaaagtgcgagctgaccaacagcggcccctgcgccgagggcggcccaagcagcggcgcccctcctcccagcggcggcagcccagccggctccccaacctctaccgaggagggcacctctgagtccgccacccccgagagcggccctggcacctccaccgagcccagcgagggcagcgcacccggcagccctgccggcagccccacctccacagaggagggaaccagcaccgagcccagcgaaggcagcgccccaggcaccagcaccgagcctagtgagcaggagattaaacggatcaacaagatcagaagaagacttgtgaaagacagcaacaccaagaaggccggcaagacaggccccatgaaaaccctgctggttagagtgatgacacccgatctgagagagcggctggaaaacctgagaaagaagcctgaaaatatcccccagcccatcagcaatacatctagagccaacctgaataagctgctgaccgattacaccgaaatgaagaaggcgatcctgcatgtgtactgggaagagttccagaaggaccctgtgggcctgatgagccgggtggcccagcctgccagcaagaagatcgatcagaacaagctgaaacctgagatggacgagaagggcaacctgaccaccgccggctttgcctgctctcagtgtggccagcccctgttcgtgtacaagctggagcaggtgtctgagaagggcaaggcttacaccaactacttcggacggtgcaatgtggccgagcacgaaaagctgatcctgctggcccagctgaagcccgagaaggatagcgacgaagccgtgacatatagcctgggaaagtttgggcagagggccctggatttctacagcattcatgtgaccaaggagtccacccaccccgtgaagcccctggcccagatcgccggaaacagatacgcctccggacctgtgggaaaggccctgagcgacgcatgtatgggcacaatcgcctccttcctgtctaagtaccaggacatcatcatcgaacaccagaaggtggtgaagggcaaccagaagagactggagagcctgcgggagctggccggcaaggaaaacctggaataccctagcgtgaccctgccacctcagcctcacaccaaggagggcgttgatgcctacaacgaagtgatcgcccgggtgcgaatgtgggtgaacctgaacctgtggcagaagctgaagctaagcagagatgatgccaagcctctgctgagactgaagggattcccttcctttcctctggtcgagagacaggccaacgaagtggactggtgggacatggtgtgtaacgtgaagaagctgatcaacgagaaaaaggaggatggcaaggtgttttggcagaatctggctggctacaagagacaggaagccctgagaccatacctgagcagcgaggaagatcggaagaagggaaagaaattcgctcggtaccagctgggcgacctgctgctgcacctggaaaagaagcacggcgaggactggggaaaggtgtacgacgaggcctgggagcggattgacaagaaagtggaaggcctgagcaagcacatcaagctggaagaggaacggagaagcgaggacgcccagagcaaggccgccctgaccgactggctgcgggctaaggccagcttcgtgatcgagggcctgaaggaggccgacaaggacgagttctgcagatgcgagctgaagctgcagaagtggtacggggacctgcggggaaagcccttcgccatcgaagccgagaacagcatcctggacatcagcggcttcagcaagcagtacaactgtgccttcatctggcagaaggacggcgtgaagaagctgaacctgtacctgatcatcaactacttcaagggcggcaagctgcggttcaagaagatcaaacctgaagccttcgaagccaacagattctacaccgtgatcaacaaaaagagcggcgagatcgtgcccatggaggtgaacttcaacttcgacgaccccaacctgatcatcctgcctctggcctttggcaagagacagggcagagaattcatctggaacgacctgctgtccctggaaaccggcagcctgaagctggccaacggaagagtgatcgagaagacactgtacaacagaagaacccggcaggatgagcctgccctgttcgtggccctgaccttcgagcggcgggaggtcctggactcctccaatatcaaaccaatgaacctgatcggcgtggcaagaggcgaaaacatccccgccgtgatcgccctgaccgaccccgagggctgcccactgagccggtttaaggatagcctgggaaacccaacccacatcctgagaatcggcgagagctataaggagaagcagcggaccatccaggccaagaaggaggtggagcagcggagagccggcggctacagccggaagtacgccagcaaagccaagaatctggcagacgatatggtgagaaacaccgctagagatctgctgtactacgccgtgacccaggatgccatgctgatcttcgccaacctgagccggggcttcggccggcagggcaagcggaccttcatggccgagagacagtacacacggatggaggactggctgaccgccaagctggcctacgagggcctgagcaagacctacctgtccaagacactggcccagtacacctccaagacatgcagcaactgtgggtttaccatcaccagcgccgactacgacagggtgctggagaagctgaagaagacagcaacaggctggatgaccacaattaacggcaaggagctgaaggtggagggccagattacctactacaacagatacaagagacagaacgtagtcaaggacctgtccgtcgagctggatagactgagcgaagaatctgtgaacaacgacatctcctcctggacaaagggcagaagcggagaagctctgagcctcctgaagaaaagattctcccatagacccgtgcaggagaagttcgtgtgcctgaactgcggcttcgagacacacgcagccgagcaagccgccctgaacatcgccagatcctggctgttcctgcggagccaggagtacaagaaataccagacaaacaagacaaccggcaacaccgataagagagccttcgtcgagacctggcagtccttttaccggaagaagcttaaggaggtgtggaaacctgccgtgcggtctggcggatctggcggaggctccagccagggcaccgtgagcttcaaggacgtggccgtgaacttcacccaggaggagtggcagtacctggacctgccccagagggacctgtacaaggacgtgatgctggagaactacaccaacctgatcagcgtgggctaccagaccaccaagcccagcgtgatccacaagctggagcagggcgaggagccctggatggtggagagggagatccccaactggagctacgccgaggagacctggcagggcggcccaagcagcggcgcccctcctcccagcggcggcagcccagccggctccccaacctctaccgaggagggcacctctgagtccgccacccccgagagcggccctggcacctccaccgagcccagcgagggcagcgcacccggcagccctgccggcagccccacctccacagaggagggaaccagcaccgagcccagcgaaggcagcgccccaggcaccagcaccgagcctagtgagcaggagattaaacggatcaacaagatcagaagaagacttgtgaaagacagcaacaccaagaaggccggcaagacaggccccatgaaaaccctgctggttagagtgatgacacccgatctgagagagcggctggaaaacctgagaaagaagcctgaaaatatcccccagcccatcagcaatacatctagagccaacctgaataagctgctgaccgattacaccgaaatgaagaaggcgatcctgcatgtgtactgggaagagttccagaaggaccctgtgggcctgatgagccgggtggcccagcctgccagcaagaagatcgatcagaacaagctgaaacctgagatggacgagaagggcaacctgaccaccgccggctttgcctgctctcagtgtggccagcccctgttcgtgtacaagctggagcaggtgtctgagaagggcaaggcttacaccaactacttcggacggtgcaatgtggccgagcacgaaaagctgatcctgctggcccagctgaagcccgagaaggatagcgacgaagccgtgacatatagcctgggaaagtttgggcagagggccctggatttctacagcattcatgtgaccaaggagtccacccaccccgtgaagcccctggcccagatcgccggaaacagatacgcctccggacctgtgggaaaggccctgagcgacgcatgtatgggcacaatcgcctccttcctgtctaagtaccaggacatcatcatcgaacaccagaaggtggtgaagggcaaccagaagagactggagagcctgcgggagctggccggcaaggaaaacctggaataccctagcgtgaccctgccacctcagcctcacaccaaggagggcgttgatgcctacaacgaagtgatcgcccgggtgcgaatgtgggtgaacctgaacctgtggcagaagctgaagctaagcagagatgatgccaagcctctgctgagactgaagggattcccttcctttcctctggtcgagagacaggccaacgaagtggactggtgggacatggtgtgtaacgtgaagaagctgatcaacgagaaaaaggaggatggcaaggtgttttggcagaatctggctggctacaagagacaggaagccctgagaccatacctgagcagcgaggaagatcggaagaagggaaagaaattcgctcggtaccagctgggcgacctgctgctgcacctggaaaagaagcacggcgaggactggggaaaggtgtacgacgaggcctgggagcggattgacaagaaagtggaaggcctgagcaagcacatcaagctggaagaggaacggagaagcgaggacgcccagagcaaggccgccctgaccgactggctgcgggctaaggccagcttcgtgatcgagggcctgaaggaggccgacaaggacgagttctgcagatgcgagctgaagctgcagaagtggtacggggacctgcggggaaagcccttcgccatcgaagccgagaacagcatcctggacatcagcggcttcagcaagcagtacaactgtgccttcatctggcagaaggacggcgtgaagaagctgaacctgtacctgatcatcaactacttcaagggcggcaagctgcggttcaagaagatcaaacctgaagccttcgaagccaacagattctacaccgtgatcaacaaaaagagcggcgagatcgtgcccatggaggtgaacttcaacttcgacgaccccaacctgatcatcctgcctctggcctttggcaagagacagggcagagaattcatctggaacgacctgctgtccctggaaaccggcagcctgaagctggccaacggaagagtgatcgagaagacactgtacaacagaagaacccggcaggatgagcctgccctgttcgtggccctgaccttcgagcggcgggaggtcctggactcctccaatatcaaaccaatgaacctgatcggcgtggcaagaggcgaaaacatccccgccgtgatcgccctgaccgaccccgagggctgcccactgagccggtttaaggatagcctgggaaacccaacccacatcctgagaatcggcgagagctataaggagaagcagcggaccatccaggccaagaaggaggtggagcagcggagagccggcggctacagccggaagtacgccagcaaagccaagaatctggcagacgatatggtgagaaacaccgctagagatctgctgtactacgccgtgacccaggatgccatgctgatcttcgccaacctgagccggggcttcggccggcagggcaagcggaccttcatggccgagagacagtacacacggatggaggactggctgaccgccaagctggcctacgagggcctgagcaagacctacctgtccaagacactggcccagtacacctccaagacatgcagcaactgtgggtttaccatcaccagcgccgactacgacagggtgctggagaagctgaagaagacagcaacaggctggatgaccacaattaacggcaaggagctgaaggtggagggccagattacctactacaacagatacaagagacagaacgtagtcaaggacctgtccgtcgagctggatagactgagcgaagaatctgtgaacaacgacatctcctcctggacaaagggcagaagcggagaagctctgagcctcctgaagaaaagattctcccatagacccgtgcaggagaagttcgtgtgcctgaactgcggcttcgagacacacgcagccgagcaagccgccctgaacatcgccagatcctggctgttcctgcggagccaggagtacaagaaataccagacaaacaagacaaccggcaacaccgataagagagccttcgtcgagacctggcagtccttttaccggaagaagcttaaggaggtgtggaaacctgccgtgcggtctggcggatctggcggaggctcctagccagggcaccgtgagcttcaaggacgtggccgtgaacttcacccaggaggagtggcagtacctggacctgccccagagggacctgtacaaggacgtgatgctggagaactacaccaacctgatcagcgtgggctaccagaccaccaagcccagcgtgatccacaagctggagcagggcgaggagccctggatggtggagagggagatccccaactggagctacgccgaggagacctggcagggatctggctccggcagcggccccaagaaaaagagaaaagtctaagctgccttctgcggggcttgccttctggccatgcccttcttctctcccttgcacctgtacctcttggtctttgaataaagcctgagtaggaaggctagcaaaaaaaaaaaaaaaaaaaaaaaaaaaaaaaaaaaaaaaaaaaaaaaaaaaaaaaaaaaaaaaaaaaaaaaaaaaaaaaa

SEQ ID NO: 16758 - RNA, 9485 nt, synthetic construct
  source 1..9485: mol_type = other RNA
aggaaataagagagaaaagaagagtaagaagaaatataagagccaccatggcccctaagaagaagcgtaaagtgagccggatggaacgcctcgtctacgaggtgcggcagaagtgcagaaacatcgaggacatctgcatctcctgcggatctctgaacgtgaccctggagcacccactgttcatcggcggcatgtgccagaactgtaaaaactgttttctggagtgtgcctatcaatacgacgatgacggctaccagagctactgcaccatctgttgcggcggaagagaggtgctgatgtgtggaaataacaactgctgccggtgcttctgcgtggaatgcgtggacctgctggtgggccccggcgccgcccaggccgctattaaggaagatccttggaactgctacatgtgcggccacaagggcacatacggcctgctgagacggagagaggactggcctagcagactgcagatgttcttcgccaataaccacgaccaggagttcgacccccctaaggtgtaccctcccgtccccgccgagaagagaaagcccatccgggtcctgagcctgttcgatggcatcgccaccggtctgctggtgctgaaggacctgggcatccaggtggataggtacattgcctccgaggtgtgcgaggactccatcaccgtgggaatggtgcgtcatcagggcaagatcatgtacgtgggcgacgtgcggagcgtgacacagaagcatatccaggagtggggccctttcgacctggtgatcggcggcagcccttgcaatgacctgagcatcgtgaacccagcccggaagggcctgtacgagggaaccggcagactgttcttcgagttttacagactgctgcacgacgcccggcctaaggaaggcgacgaccggcccttcttttggctgttcgagaatgtggtggccatgggagtcagcgacaagcgggatattagccggttcctggagagcaaccccgtgatgatcgatgccaaggaagtgagcgccgcccaccgggccagatacttctggggcaatctgcctggcatgaacagacccctggccagcaccgtgaacgacaagctggagctgcaggagtgcctggagcacggccggatcgccaagttcagcaaggtgagaaccatcaccacccgaagcaacagcatcaaacaaggcaaggaccagcactttcctgtgttcatgaacgagaaggaggacatcctgtggtgtaccgagatggagagagtgttcgggttcccagtccactacacagatgtcagcaacatgtctagactggccagacagagactgctgggaagaagctggtccgtccctgtgatcagacacctgttcgcccctctgaaggagtacttcgcctgcgtgagcagcggcaacagcaacgccaacagccggggccccagcttctctagcggcctggtgccactgtccctgagagggagccacatgggccccatggagatctacaaaaccgtgagcgcctggaagcggcagcctgtgcgcgtgctgagcctgtttcggaatatcgataaagtcctgaaaagcctgggattcctggagagcggctctggctccggcggtggcaccctgaagtacgtggaggatgtgacaaacgtggtcagacgggatgtggagaagtggggccccttcgatctggtgtacggcagcacccaacccctgggcagctcttgtgaccggtgccctggctggtacatgtttcagttccaccggatcctgcagtacgccctgccgagacaggagtcccagcggccattcttttggattttcatggacaacttgctgctgaccgaggatgaccaggaaactaccactcggttcctgcagaccgaagccgtgaccctgcaggacgtgagaggccgggactaccagaacgccatgcgggtgtggtccaacatccctggactgaaaagcaagcacgcacctctgacccctaaagaagaggagtacctgcaggcccaggtgcggagcagaagcaagctggacgcccctaaggtggatctgctggtgaagaattgcctcctgcccctgagagagtacttcaagtatttcagccagaatagtctgcccctgggaggcagcggcggcggcgccctggtgacatttgaggacgtcgccgtgcggttcacccaggaggaatgggctctgctggatccttctcagaaaatcctgtaccgggacgtgatgagagagacataccggaatctgacctccgtgggcatcaactgggaatgttgggaccttgaagcctgcttcagaagcctgggaagaaacctgagagtgcaggtggtgaagagaaagtgcgagctgaccaacagcggcccctgcgccgagggcggcccaagcagcggcgcccctcctcccagcggcggcagcccagccggctccccaacctctaccgaggagggcacctctgagtccgccacccccgagagcggccctggcacctccaccgagcccagcgagggcagcgcacccggcagccctgccggcagccccacctccacagaggagggaaccagcaccgagcccagcgaaggcagcgccccaggcaccagcaccgagcctagtgagcaggagattaaacggatcaacaagatcagaagaagacttgtgaaagacagcaacaccaagaaggccggcaagacaggccccatgaaaaccctgctggttagagtgatgacacccgatctgagagagcggctggaaaacctgagaaagaagcctgaaaatatcccccagcccatcagcaatacatctagagccaacctgaataagctgctgaccgattacaccgaaatgaagaaggcgatcctgcatgtgtactgggaagagttccagaaggaccctgtgggcctgatgagccgggtggcccagcctgccagcaagaagatcgatcagaacaagctgaaacctgagatggacgagaagggcaacctgaccaccgccggctttgcctgctctcagtgtggccagcccctgttcgtgtacaagctggagcaggtgtctgagaagggcaaggcttacaccaactacttcggacggtgcaatgtggccgagcacgaaaagctgatcctgctggcccagctgaagcccgagaaggatagcgacgaagccgtgacatatagcctgggaaagtttgggcagagggccctggatttctacagcattcatgtgaccaaggagtccacccaccccgtgaagcccctggcccagatcgccggaaacagatacgcctccggacctgtgggaaaggccctgagcgacgcatgtatgggcacaatcgcctccttcctgtctaagtaccaggacatcatcatcgaacaccagaaggtggtgaagggcaaccagaagagactggagagcctgcgggagctggccggcaaggaaaacctggaataccctagcgtgaccctgccacctcagcctcacaccaaggagggcgttgatgcctacaacgaagtgatcgcccgggtgcgaatgtgggtgaacctgaacctgtggcagaagctgaagctaagcagagatgatgccaagcctctgctgagactgaagggattcccttcctttcctctggtcgagagacaggccaacgaagtggactggtgggacatggtgtgtaacgtgaagaagctgatcaacgagaaaaaggaggatggcaaggtgttttggcagaatctggctggctacaagagacaggaagccctgagaccatacctgagcagcgaggaagatcggaagaagggaaagaaattcgctcggtaccagctgggcgacctgctgctgcacctggaaaagaagcacggcgaggactggggaaaggtgtacgacgaggcctgggagcggattgacaagaaagtggaaggcctgagcaagcacatcaagctggaagaggaacggagaagcgaggacgcccagagcaaggccgccctgaccgactggctgcgggctaaggccagcttcgtgatcgagggcctgaaggaggccgacaaggacgagttctgcagatgcgagctgaagctgcagaagtggtacggggacctgcggggaaagcccttcgccatcgaagccgagaacagcatcctggacatcagcggcttcagcaagcagtacaactgtgccttcatctggcagaaggacggcgtgaagaagctgaacctgtacctgatcatcaactacttcaagggcggcaagctgcggttcaagaagatcaaacctgaagccttcgaagccaacagattctacaccgtgatcaacaaaaagagcggcgagatcgtgcccatggaggtgaacttcaacttcgacgaccccaacctgatcatcctgcctctggcctttggcaagagacagggcagagaattcatctggaacgacctgctgtccctggaaaccggcagcctgaagctggccaacggaagagtgatcgagaagacactgtacaacagaagaacccggcaggatgagcctgccctgttcgtggccctgaccttcgagcggcgggaggtcctggactcctccaatatcaaaccaatgaacctgatcggcgtggcaagaggcgaaaacatccccgccgtgatcgccctgaccgaccccgagggctgcccactgagccggtttaaggatagcctgggaaacccaacccacatcctgagaatcggcgagagctataaggagaagcagcggaccatccaggccaagaaggaggtggagcagcggagagccggcggctacagccggaagtacgccagcaaagccaagaatctggcagacgatatggtgagaaacaccgctagagatctgctgtactacgccgtgacccaggatgccatgctgatcttcgccaacctgagccggggcttcggccggcagggcaagcggaccttcatggccgagagacagtacacacggatggaggactggctgaccgccaagctggcctacgagggcctgagcaagacctacctgtccaagacactggcccagtacacctccaagacatgcagcaactgtgggtttaccatcaccagcgccgactacgacagggtgctggagaagctgaagaagacagcaacaggctggatgaccacaattaacggcaaggagctgaaggtggagggccagattacctactacaacagatacaagagacagaacgtagtcaaggacctgtccgtcgagctggatagactgagcgaagaatctgtgaacaacgacatctcctcctggacaaagggcagaagcggagaagctctgagcctcctgaagaaaagattctcccatagacccgtgcaggagaagttcgtgtgcctgaactgcggcttcgagacacacgcagccgagcaagccgccctgaacatcgccagatcctggctgttcctgcggagccaggagtacaagaaataccagacaaacaagacaaccggcaacaccgataagagagccttcgtcgagacctggcagtccttttaccggaagaagcttaaggaggtgtggaaacctgccgtgcggtctggcggatctggcggaggctccccccccagcctggtgaccttcggcgacgtggccatcgacttcagccaggaggagtgggagtggctgaacagcgcccagaggaccctgtacaggaacgtgatgctggagaactacaggaacctggccagcctgggcctgtgcggcagcaagcccgacatgatcagcagcctggagcagaggagggagccctggatcaccaagaggaagctgaccaggggcaggtgccccgacctgaaggccgtgggcggcccaagcagcggcgcccctcctcccagcggcggcagcccagccggctccccaacctctaccgaggagggcacctctgagtccgccacccccgagagcggccctggcacctccaccgagcccagcgagggcagcgcacccggcagccctgccggcagccccacctccacagaggagggaaccagcaccgagcccagcgaaggcagcgccccaggcaccagcaccgagcctagtgagcaggagattaaacggatcaacaagatcagaagaagacttgtgaaagacagcaacaccaagaaggccggcaagacaggccccatgaaaaccctgctggttagagtgatgacacccgatctgagagagcggctggaaaacctgagaaagaagcctgaaaatatcccccagcccatcagcaatacatctagagccaacctgaataagctgctgaccgattacaccgaaatgaagaaggcgatcctgcatgtgtactgggaagagttccagaaggaccctgtgggcctgatgagccgggtggcccagcctgccagcaagaagatcgatcagaacaagctgaaacctgagatggacgagaagggcaacctgaccaccgccggctttgcctgctctcagtgtggccagcccctgttcgtgtacaagctggagcaggtgtctgagaagggcaaggcttacaccaactacttcggacggtgcaatgtggccgagcacgaaaagctgatcctgctggcccagctgaagcccgagaaggatagcgacgaagccgtgacatatagcctgggaaagtttgggcagagggccctggatttctacagcattcatgtgaccaaggagtccacccaccccgtgaagcccctggcccagatcgccggaaacagatacgcctccggacctgtgggaaaggccctgagcgacgcatgtatgggcacaatcgcctccttcctgtctaagtaccaggacatcatcatcgaacaccagaaggtggtgaagggcaaccagaagagactggagagcctgcgggagctggccggcaaggaaaacctggaataccctagcgtgaccctgccacctcagcctcacaccaaggagggcgttgatgcctacaacgaagtgatcgcccgggtgcgaatgtgggtgaacctgaacctgtggcagaagctgaagctaagcagagatgatgccaagcctctgctgagactgaagggattcccttcctttcctctggtcgagagacaggccaacgaagtggactggtgggacatggtgtgtaacgtgaagaagctgatcaacgagaaaaaggaggatggcaaggtgttttggcagaatctggctggctacaagagacaggaagccctgagaccatacctgagcagcgaggaagatcggaagaagggaaagaaattcgctcggtaccagctgggcgacctgctgctgcacctggaaaagaagcacggcgaggactggggaaaggtgtacgacgaggcctgggagcggattgacaagaaagtggaaggcctgagcaagcacatcaagctggaagaggaacggagaagcgaggacgcccagagcaaggccgccctgaccgactggctgcgggctaaggccagcttcgtgatcgagggcctgaaggaggccgacaaggacgagttctgcagatgcgagctgaagctgcagaagtggtacggggacctgcggggaaagcccttcgccatcgaagccgagaacagcatcctggacatcagcggcttcagcaagcagtacaactgtgccttcatctggcagaaggacggcgtgaagaagctgaacctgtacctgatcatcaactacttcaagggcggcaagctgcggttcaagaagatcaaacctgaagccttcgaagccaacagattctacaccgtgatcaacaaaaagagcggcgagatcgtgcccatggaggtgaacttcaacttcgacgaccccaacctgatcatcctgcctctggcctttggcaagagacagggcagagaattcatctggaacgacctgctgtccctggaaaccggcagcctgaagctggccaacggaagagtgatcgagaagacactgtacaacagaagaacccggcaggatgagcctgccctgttcgtggccctgaccttcgagcggcgggaggtcctggactcctccaatatcaaaccaatgaacctgatcggcgtggcaagaggcgaaaacatccccgccgtgatcgccctgaccgaccccgagggctgcccactgagccggtttaaggatagcctgggaaacccaacccacatcctgagaatcggcgagagctataaggagaagcagcggaccatccaggccaagaaggaggtggagcagcggagagccggcggctacagccggaagtacgccagcaaagccaagaatctggcagacgatatggtgagaaacaccgctagagatctgctgtactacgccgtgacccaggatgccatgctgatcttcgccaacctgagccggggcttcggccggcagggcaagcggaccttcatggccgagagacagtacacacggatggaggactggctgaccgccaagctggcctacgagggcctgagcaagacctacctgtccaagacactggcccagtacacctccaagacatgcagcaactgtgggtttaccatcaccagcgccgactacgacagggtgctggagaagctgaagaagacagcaacaggctggatgaccacaattaacggcaaggagctgaaggtggagggccagattacctactacaacagatacaagagacagaacgtagtcaaggacctgtccgtcgagctggatagactgagcgaagaatctgtgaacaacgacatctcctcctggacaaagggcagaagcggagaagctctgagcctcctgaagaaaagattctcccatagacccgtgcaggagaagttcgtgtgcctgaactgcggcttcgagacacacgcagccgagcaagccgccctgaacatcgccagatcctggctgttcctgcggagccaggagtacaagaaataccagacaaacaagacaaccggcaacaccgataagagagccttcgtcgagacctggcagtccttttaccggaagaagcttaaggaggtgtggaaacctgccgtgcggtctggcggatctggcggaggctcctccccccagcctggtgaccttcggcgacgtggccatcgacttcagccaggaggagtgggagtggctgaacagcgcccagaggaccctgtacaggaacgtgatgctggagaactacaggaacctggccagcctgggcctgtgcggcagcaagcccgacatgatcagcagcctggagcagaggagggagccctggatcaccaagaggaagctgaccaggggcaggtgccccgacctgaaggccgtgggatctggctccggcagcggccccaagaaaaagagaaaagtctaagctgccttctgcggggcttgccttctggccatgcccttcttctctcccttgcacctgtacctcttggtctttgaataaagcctgagtaggaaggctagcaaaaaaaaaaaaaaaaaaaaaaaaaaaaaaaaaaaaaaaaaaaaaaaaaaaaaaaaaaaaaaaaaaaaaaaaaaaaaaaa

SEQ ID NO: 16759 - RNA, 9485 nt, synthetic construct
  source 1..9485: mol_type = other RNA
aggaaataagagagaaaagaagagtaagaagaaatataagagccaccatggcccctaagaagaagcgtaaagtgagccggatggaacgcctcgtctacgaggtgcggcagaagtgcagaaacatcgaggacatctgcatctcctgcggatctctgaacgtgaccctggagcacccactgttcatcggcggcatgtgccagaactgtaaaaactgttttctggagtgtgcctatcaatacgacgatgacggctaccagagctactgcaccatctgttgcggcggaagagaggtgctgatgtgtggaaataacaactgctgccggtgcttctgcgtggaatgcgtggacctgctggtgggccccggcgccgcccaggccgctattaaggaagatccttggaactgctacatgtgcggccacaagggcacatacggcctgctgagacggagagaggactggcctagcagactgcagatgttcttcgccaataaccacgaccaggagttcgacccccctaaggtgtaccctcccgtccccgccgagaagagaaagcccatccgggtcctgagcctgttcgatggcatcgccaccggtctgctggtgctgaaggacctgggcatccaggtggataggtacattgcctccgaggtgtgcgaggactccatcaccgtgggaatggtgcgtcatcagggcaagatcatgtacgtgggcgacgtgcggagcgtgacacagaagcatatccaggagtggggccctttcgacctggtgatcggcggcagcccttgcaatgacctgagcatcgtgaacccagcccggaagggcctgtacgagggaaccggcagactgttcttcgagttttacagactgctgcacgacgcccggcctaaggaaggcgacgaccggcccttcttttggctgttcgagaatgtggtggccatgggagtcagcgacaagcgggatattagccggttcctggagagcaaccccgtgatgatcgatgccaaggaagtgagcgccgcccaccgggccagatacttctggggcaatctgcctggcatgaacagacccctggccagcaccgtgaacgacaagctggagctgcaggagtgcctggagcacggccggatcgccaagttcagcaaggtgagaaccatcaccacccgaagcaacagcatcaaacaaggcaaggaccagcactttcctgtgttcatgaacgagaaggaggacatcctgtggtgtaccgagatggagagagtgttcgggttcccagtccactacacagatgtcagcaacatgtctagactggccagacagagactgctgggaagaagctggtccgtccctgtgatcagacacctgttcgcccctctgaaggagtacttcgcctgcgtgagcagcggcaacagcaacgccaacagccggggccccagcttctctagcggcctggtgccactgtccctgagagggagccacatgggccccatggagatctacaaaaccgtgagcgcctggaagcggcagcctgtgcgcgtgctgagcctgtttcggaatatcgataaagtcctgaaaagcctgggattcctggagagcggctctggctccggcggtggcaccctgaagtacgtggaggatgtgacaaacgtggtcagacgggatgtggagaagtggggccccttcgatctggtgtacggcagcacccaacccctgggcagctcttgtgaccggtgccctggctggtacatgtttcagttccaccggatcctgcagtacgccctgccgagacaggagtcccagcggccattcttttggattttcatggacaacttgctgctgaccgaggatgaccaggaaactaccactcggttcctgcagaccgaagccgtgaccctgcaggacgtgagaggccgggactaccagaacgccatgcgggtgtggtccaacatccctggactgaaaagcaagcacgcacctctgacccctaaagaagaggagtacctgcaggcccaggtgcggagcagaagcaagctggacgcccctaaggtggatctgctggtgaagaattgcctcctgcccctgagagagtacttcaagtatttcagccagaatagtctgcccctgggaggcagcggcggcggcgccctggtgacatttgaggacgtcgccgtgcggttcacccaggaggaatgggctctgctggatccttctcagaaaatcctgtaccgggacgtgatgagagagacataccggaatctgacctccgtgggcatcaactgggaatgttgggaccttgaagcctgcttcagaagcctgggaagaaacctgagagtgcaggtggtgaagagaaagtgcgagctgaccaacagcggcccctgcgccgagggcggcccaagcagcggcgcccctcctcccagcggcggcagcccagccggctccccaacctctaccgaggagggcacctctgagtccgccacccccgagagcggccctggcacctccaccgagcccagcgagggcagcgcacccggcagccctgccggcagccccacctccacagaggagggaaccagcaccgagcccagcgaaggcagcgccccaggcaccagcaccgagcctagtgagcaggagattaaacggatcaacaagatcagaagaagacttgtgaaagacagcaacaccaagaaggccggcaagacaggccccatgaaaaccctgctggttagagtgatgacacccgatctgagagagcggctggaaaacctgagaaagaagcctgaaaatatcccccagcccatcagcaatacatctagagccaacctgaataagctgctgaccgattacaccgaaatgaagaaggcgatcctgcatgtgtactgggaagagttccagaaggaccctgtgggcctgatgagccgggtggcccagcctgccagcaagaagatcgatcagaacaagctgaaacctgagatggacgagaagggcaacctgaccaccgccggctttgcctgctctcagtgtggccagcccctgttcgtgtacaagctggagcaggtgtctgagaagggcaaggcttacaccaactacttcggacggtgcaatgtggccgagcacgaaaagctgatcctgctggcccagctgaagcccgagaaggatagcgacgaagccgtgacatatagcctgggaaagtttgggcagagggccctggatttctacagcattcatgtgaccaaggagtccacccaccccgtgaagcccctggcccagatcgccggaaacagatacgcctccggacctgtgggaaaggccctgagcgacgcatgtatgggcacaatcgcctccttcctgtctaagtaccaggacatcatcatcgaacaccagaaggtggtgaagggcaaccagaagagactggagagcctgcgggagctggccggcaaggaaaacctggaataccctagcgtgaccctgccacctcagcctcacaccaaggagggcgttgatgcctacaacgaagtgatcgcccgggtgcgaatgtgggtgaacctgaacctgtggcagaagctgaagctaagcagagatgatgccaagcctctgctgagactgaagggattcccttcctttcctctggtcgagagacaggccaacgaagtggactggtgggacatggtgtgtaacgtgaagaagctgatcaacgagaaaaaggaggatggcaaggtgttttggcagaatctggctggctacaagagacaggaagccctgagaccatacctgagcagcgaggaagatcggaagaagggaaagaaattcgctcggtaccagctgggcgacctgctgctgcacctggaaaagaagcacggcgaggactggggaaaggtgtacgacgaggcctgggagcggattgacaagaaagtggaaggcctgagcaagcacatcaagctggaagaggaacggagaagcgaggacgcccagagcaaggccgccctgaccgactggctgcgggctaaggccagcttcgtgatcgagggcctgaaggaggccgacaaggacgagttctgcagatgcgagctgaagctgcagaagtggtacggggacctgcggggaaagcccttcgccatcgaagccgagaacagcatcctggacatcagcggcttcagcaagcagtacaactgtgccttcatctggcagaaggacggcgtgaagaagctgaacctgtacctgatcatcaactacttcaagggcggcaagctgcggttcaagaagatcaaacctgaagccttcgaagccaacagattctacaccgtgatcaacaaaaagagcggcgagatcgtgcccatggaggtgaacttcaacttcgacgaccccaacctgatcatcctgcctctggcctttggcaagagacagggcagagaattcatctggaacgacctgctgtccctggaaaccggcagcctgaagctggccaacggaagagtgatcgagaagacactgtacaacagaagaacccggcaggatgagcctgccctgttcgtggccctgaccttcgagcggcgggaggtcctggactcctccaatatcaaaccaatgaacctgatcggcgtggcaagaggcgaaaacatccccgccgtgatcgccctgaccgaccccgagggctgcccactgagccggtttaaggatagcctgggaaacccaacccacatcctgagaatcggcgagagctataaggagaagcagcggaccatccaggccaagaaggaggtggagcagcggagagccggcggctacagccggaagtacgccagcaaagccaagaatctggcagacgatatggtgagaaacaccgctagagatctgctgtactacgccgtgacccaggatgccatgctgatcttcgccaacctgagccggggcttcggccggcagggcaagcggaccttcatggccgagagacagtacacacggatggaggactggctgaccgccaagctggcctacgagggcctgagcaagacctacctgtccaagacactggcccagtacacctccaagacatgcagcaactgtgggtttaccatcaccagcgccgactacgacagggtgctggagaagctgaagaagacagcaacaggctggatgaccacaattaacggcaaggagctgaaggtggagggccagattacctactacaacagatacaagagacagaacgtagtcaaggacctgtccgtcgagctggatagactgagcgaagaatctgtgaacaacgacatctcctcctggacaaagggcagaagcggagaagctctgagcctcctgaagaaaagattctcccatagacccgtgcaggagaagttcgtgtgcctgaactgcggcttcgagacacacgcagccgagcaagccgccctgaacatcgccagatcctggctgttcctgcggagccaggagtacaagaaataccagacaaacaagacaaccggcaacaccgataagagagccttcgtcgagacctggcagtccttttaccggaagaagcttaaggaggtgtggaaacctgccgtgcggtctggcggatctggcggaggctccatgagggtgaccttcgaggacatcgccgtgagcttcagccaggaggagtgggagtacctggacgaggagcagaaggagctgtacagggaggtgatgaaggagaactaccagaccctgatcagcctgggcgccggcagcctgaccttcacccccgagatcatcagccacatcgagaggggcgaggagccctacagcagggacgagcccggcagcggcgagagggagcccggcaagagcaggtgcggcggcccaagcagcggcgcccctcctcccagcggcggcagcccagccggctccccaacctctaccgaggagggcacctctgagtccgccacccccgagagcggccctggcacctccaccgagcccagcgagggcagcgcacccggcagccctgccggcagccccacctccacagaggagggaaccagcaccgagcccagcgaaggcagcgccccaggcaccagcaccgagcctagtgagcaggagattaaacggatcaacaagatcagaagaagacttgtgaaagacagcaacaccaagaaggccggcaagacaggccccatgaaaaccctgctggttagagtgatgacacccgatctgagagagcggctggaaaacctgagaaagaagcctgaaaatatcccccagcccatcagcaatacatctagagccaacctgaataagctgctgaccgattacaccgaaatgaagaaggcgatcctgcatgtgtactgggaagagttccagaaggaccctgtgggcctgatgagccgggtggcccagcctgccagcaagaagatcgatcagaacaagctgaaacctgagatggacgagaagggcaacctgaccaccgccggctttgcctgctctcagtgtggccagcccctgttcgtgtacaagctggagcaggtgtctgagaagggcaaggcttacaccaactacttcggacggtgcaatgtggccgagcacgaaaagctgatcctgctggcccagctgaagcccgagaaggatagcgacgaagccgtgacatatagcctgggaaagtttgggcagagggccctggatttctacagcattcatgtgaccaaggagtccacccaccccgtgaagcccctggcccagatcgccggaaacagatacgcctccggacctgtgggaaaggccctgagcgacgcatgtatgggcacaatcgcctccttcctgtctaagtaccaggacatcatcatcgaacaccagaaggtggtgaagggcaaccagaagagactggagagcctgcgggagctggccggcaaggaaaacctggaataccctagcgtgaccctgccacctcagcctcacaccaaggagggcgttgatgcctacaacgaagtgatcgcccgggtgcgaatgtgggtgaacctgaacctgtggcagaagctgaagctaagcagagatgatgccaagcctctgctgagactgaagggattcccttcctttcctctggtcgagagacaggccaacgaagtggactggtgggacatggtgtgtaacgtgaagaagctgatcaacgagaaaaaggaggatggcaaggtgttttggcagaatctggctggctacaagagacaggaagccctgagaccatacctgagcagcgaggaagatcggaagaagggaaagaaattcgctcggtaccagctgggcgacctgctgctgcacctggaaaagaagcacggcgaggactggggaaaggtgtacgacgaggcctgggagcggattgacaagaaagtggaaggcctgagcaagcacatcaagctggaagaggaacggagaagcgaggacgcccagagcaaggccgccctgaccgactggctgcgggctaaggccagcttcgtgatcgagggcctgaaggaggccgacaaggacgagttctgcagatgcgagctgaagctgcagaagtggtacggggacctgcggggaaagcccttcgccatcgaagccgagaacagcatcctggacatcagcggcttcagcaagcagtacaactgtgccttcatctggcagaaggacggcgtgaagaagctgaacctgtacctgatcatcaactacttcaagggcggcaagctgcggttcaagaagatcaaacctgaagccttcgaagccaacagattctacaccgtgatcaacaaaaagagcggcgagatcgtgcccatggaggtgaacttcaacttcgacgaccccaacctgatcatcctgcctctggcctttggcaagagacagggcagagaattcatctggaacgacctgctgtccctggaaaccggcagcctgaagctggccaacggaagagtgatcgagaagacactgtacaacagaagaacccggcaggatgagcctgccctgttcgtggccctgaccttcgagcggcgggaggtcctggactcctccaatatcaaaccaatgaacctgatcggcgtggcaagaggcgaaaacatccccgccgtgatcgccctgaccgaccccgagggctgcccactgagccggtttaaggatagcctgggaaacccaacccacatcctgagaatcggcgagagctataaggagaagcagcggaccatccaggccaagaaggaggtggagcagcggagagccggcggctacagccggaagtacgccagcaaagccaagaatctggcagacgatatggtgagaaacaccgctagagatctgctgtactacgccgtgacccaggatgccatgctgatcttcgccaacctgagccggggcttcggccggcagggcaagcggaccttcatggccgagagacagtacacacggatggaggactggctgaccgccaagctggcctacgagggcctgagcaagacctacctgtccaagacactggcccagtacacctccaagacatgcagcaactgtgggtttaccatcaccagcgccgactacgacagggtgctggagaagctgaagaagacagcaacaggctggatgaccacaattaacggcaaggagctgaaggtggagggccagattacctactacaacagatacaagagacagaacgtagtcaaggacctgtccgtcgagctggatagactgagcgaagaatctgtgaacaacgacatctcctcctggacaaagggcagaagcggagaagctctgagcctcctgaagaaaagattctcccatagacccgtgcaggagaagttcgtgtgcctgaactgcggcttcgagacacacgcagccgagcaagccgccctgaacatcgccagatcctggctgttcctgcggagccaggagtacaagaaataccagacaaacaagacaaccggcaacaccgataagagagccttcgtcgagacctggcagtccttttaccggaagaagcttaaggaggtgtggaaacctgccgtgcggtctggcggatctggcggaggctcctatgagggtgaccttcgaggacatcgccgtgagcttcagccaggaggagtgggagtacctggacgaggagcagaaggagctgtacagggaggtgatgaaggagaactaccagaccctgatcagcctgggcgccggcagcctgaccttcacccccgagatcatcagccacatcgagaggggcgaggagccctacagcagggacgagcccggcagcggcgagagggagcccggcaagagcaggtgcggatctggctccggcagcggccccaagaaaaagagaaaagtctaagctgccttctgcggggcttgccttctggccatgcccttcttctctcccttgcacctgtacctcttggtctttgaataaagcctgagtaggaaggctagcaaaaaaaaaaaaaaaaaaaaaaaaaaaaaaaaaaaaaaaaaaaaaaaaaaaaaaaaaaaaaaaaaaaaaaaaaaaaaaaa

SEQ ID NO: 16760 - RNA, 9485 nt, synthetic construct
  source 1..9485: mol_type = other RNA
aggaaataagagagaaaagaagagtaagaagaaatataagagccaccatggcccctaagaagaagcgtaaagtgagccggatggaacgcctcgtctacgaggtgcggcagaagtgcagaaacatcgaggacatctgcatctcctgcggatctctgaacgtgaccctggagcacccactgttcatcggcggcatgtgccagaactgtaaaaactgttttctggagtgtgcctatcaatacgacgatgacggctaccagagctactgcaccatctgttgcggcggaagagaggtgctgatgtgtggaaataacaactgctgccggtgcttctgcgtggaatgcgtggacctgctggtgggccccggcgccgcccaggccgctattaaggaagatccttggaactgctacatgtgcggccacaagggcacatacggcctgctgagacggagagaggactggcctagcagactgcagatgttcttcgccaataaccacgaccaggagttcgacccccctaaggtgtaccctcccgtccccgccgagaagagaaagcccatccgggtcctgagcctgttcgatggcatcgccaccggtctgctggtgctgaaggacctgggcatccaggtggataggtacattgcctccgaggtgtgcgaggactccatcaccgtgggaatggtgcgtcatcagggcaagatcatgtacgtgggcgacgtgcggagcgtgacacagaagcatatccaggagtggggccctttcgacctggtgatcggcggcagcccttgcaatgacctgagcatcgtgaacccagcccggaagggcctgtacgagggaaccggcagactgttcttcgagttttacagactgctgcacgacgcccggcctaaggaaggcgacgaccggcccttcttttggctgttcgagaatgtggtggccatgggagtcagcgacaagcgggatattagccggttcctggagagcaaccccgtgatgatcgatgccaaggaagtgagcgccgcccaccgggccagatacttctggggcaatctgcctggcatgaacagacccctggccagcaccgtgaacgacaagctggagctgcaggagtgcctggagcacggccggatcgccaagttcagcaaggtgagaaccatcaccacccgaagcaacagcatcaaacaaggcaaggaccagcactttcctgtgttcatgaacgagaaggaggacatcctgtggtgtaccgagatggagagagtgttcgggttcccagtccactacacagatgtcagcaacatgtctagactggccagacagagactgctgggaagaagctggtccgtccctgtgatcagacacctgttcgcccctctgaaggagtacttcgcctgcgtgagcagcggcaacagcaacgccaacagccggggccccagcttctctagcggcctggtgccactgtccctgagagggagccacatgggccccatggagatctacaaaaccgtgagcgcctggaagcggcagcctgtgcgcgtgctgagcctgtttcggaatatcgataaagtcctgaaaagcctgggattcctggagagcggctctggctccggcggtggcaccctgaagtacgtggaggatgtgacaaacgtggtcagacgggatgtggagaagtggggccccttcgatctggtgtacggcagcacccaacccctgggcagctcttgtgaccggtgccctggctggtacatgtttcagttccaccggatcctgcagtacgccctgccgagacaggagtcccagcggccattcttttggattttcatggacaacttgctgctgaccgaggatgaccaggaaactaccactcggttcctgcagaccgaagccgtgaccctgcaggacgtgagaggccgggactaccagaacgccatgcgggtgtggtccaacatccctggactgaaaagcaagcacgcacctctgacccctaaagaagaggagtacctgcaggcccaggtgcggagcagaagcaagctggacgcccctaaggtggatctgctggtgaagaattgcctcctgcccctgagagagtacttcaagtatttcagccagaatagtctgcccctgggaggcagcggcggcggcgccctggtgacatttgaggacgtcgccgtgcggttcacccaggaggaatgggctctgctggatccttctcagaaaatcctgtaccgggacgtgatgagagagacataccggaatctgacctccgtgggcatcaactgggaatgttgggaccttgaagcctgcttcagaagcctgggaagaaacctgagagtgcaggtggtgaagagaaagtgcgagctgaccaacagcggcccctgcgccgagggcggcccaagcagcggcgcccctcctcccagcggcggcagcccagccggctccccaacctctaccgaggagggcacctctgagtccgccacccccgagagcggccctggcacctccaccgagcccagcgagggcagcgcacccggcagccctgccggcagccccacctccacagaggagggaaccagcaccgagcccagcgaaggcagcgccccaggcaccagcaccgagcctagtgagcaggagattaaacggatcaacaagatcagaagaagacttgtgaaagacagcaacaccaagaaggccggcaagacaggccccatgaaaaccctgctggttagagtgatgacacccgatctgagagagcggctggaaaacctgagaaagaagcctgaaaatatcccccagcccatcagcaatacatctagagccaacctgaataagctgctgaccgattacaccgaaatgaagaaggcgatcctgcatgtgtactgggaagagttccagaaggaccctgtgggcctgatgagccgggtggcccagcctgccagcaagaagatcgatcagaacaagctgaaacctgagatggacgagaagggcaacctgaccaccgccggctttgcctgctctcagtgtggccagcccctgttcgtgtacaagctggagcaggtgtctgagaagggcaaggcttacaccaactacttcggacggtgcaatgtggccgagcacgaaaagctgatcctgctggcccagctgaagcccgagaaggatagcgacgaagccgtgacatatagcctgggaaagtttgggcagagggccctggatttctacagcattcatgtgaccaaggagtccacccaccccgtgaagcccctggcccagatcgccggaaacagatacgcctccggacctgtgggaaaggccctgagcgacgcatgtatgggcacaatcgcctccttcctgtctaagtaccaggacatcatcatcgaacaccagaaggtggtgaagggcaaccagaagagactggagagcctgcgggagctggccggcaaggaaaacctggaataccctagcgtgaccctgccacctcagcctcacaccaaggagggcgttgatgcctacaacgaagtgatcgcccgggtgcgaatgtgggtgaacctgaacctgtggcagaagctgaagctaagcagagatgatgccaagcctctgctgagactgaagggattcccttcctttcctctggtcgagagacaggccaacgaagtggactggtgggacatggtgtgtaacgtgaagaagctgatcaacgagaaaaaggaggatggcaaggtgttttggcagaatctggctggctacaagagacaggaagccctgagaccatacctgagcagcgaggaagatcggaagaagggaaagaaattcgctcggtaccagctgggcgacctgctgctgcacctggaaaagaagcacggcgaggactggggaaaggtgtacgacgaggcctgggagcggattgacaagaaagtggaaggcctgagcaagcacatcaagctggaagaggaacggagaagcgaggacgcccagagcaaggccgccctgaccgactggctgcgggctaaggccagcttcgtgatcgagggcctgaaggaggccgacaaggacgagttctgcagatgcgagctgaagctgcagaagtggtacggggacctgcggggaaagcccttcgccatcgaagccgagaacagcatcctggacatcagcggcttcagcaagcagtacaactgtgccttcatctggcagaaggacggcgtgaagaagctgaacctgtacctgatcatcaactacttcaagggcggcaagctgcggttcaagaagatcaaacctgaagccttcgaagccaacagattctacaccgtgatcaacaaaaagagcggcgagatcgtgcccatggaggtgaacttcaacttcgacgaccccaacctgatcatcctgcctctggcctttggcaagagacagggcagagaattcatctggaacgacctgctgtccctggaaaccggcagcctgaagctggccaacggaagagtgatcgagaagacactgtacaacagaagaacccggcaggatgagcctgccctgttcgtggccctgaccttcgagcggcgggaggtcctggactcctccaatatcaaaccaatgaacctgatcggcgtggcaagaggcgaaaacatccccgccgtgatcgccctgaccgaccccgagggctgcccactgagccggtttaaggatagcctgggaaacccaacccacatcctgagaatcggcgagagctataaggagaagcagcggaccatccaggccaagaaggaggtggagcagcggagagccggcggctacagccggaagtacgccagcaaagccaagaatctggcagacgatatggtgagaaacaccgctagagatctgctgtactacgccgtgacccaggatgccatgctgatcttcgccaacctgagccggggcttcggccggcagggcaagcggaccttcatggccgagagacagtacacacggatggaggactggctgaccgccaagctggcctacgagggcctgagcaagacctacctgtccaagacactggcccagtacacctccaagacatgcagcaactgtgggtttaccatcaccagcgccgactacgacagggtgctggagaagctgaagaagacagcaacaggctggatgaccacaattaacggcaaggagctgaaggtggagggccagattacctactacaacagatacaagagacagaacgtagtcaaggacctgtccgtcgagctggatagactgagcgaagaatctgtgaacaacgacatctcctcctggacaaagggcagaagcggagaagctctgagcctcctgaagaaaagattctcccatagacccgtgcaggagaagttcgtgtgcctgaactgcggcttcgagacacacgcagccgagcaagccgccctgaacatcgccagatcctggctgttcctgcggagccaggagtacaagaaataccagacaaacaagacaaccggcaacaccgataagagagccttcgtcgagacctggcagtccttttaccggaagaagcttaaggaggtgtggaaacctgccgtgcggtctggcggatctggcggaggctcccaggacctggtgaccttcaaggacgtgagcgtggacttcaccagggaggagtggatgaggctggaccacccccagagggccctgtacagggacgtgatgctggagaactacaggaacctggtgctggtgagcctgggccaccccatcagcaagcccgacgtgatcagcaggctggagcagggcggcgtgccctgggtgctgaagaagggcgccaccggcagggccttcagcgacagggagaccggcggcccaagcagcggcgcccctcctcccagcggcggcagcccagccggctccccaacctctaccgaggagggcacctctgagtccgccacccccgagagcggccctggcacctccaccgagcccagcgagggcagcgcacccggcagccctgccggcagccccacctccacagaggagggaaccagcaccgagcccagcgaaggcagcgccccaggcaccagcaccgagcctagtgagcaggagattaaacggatcaacaagatcagaagaagacttgtgaaagacagcaacaccaagaaggccggcaagacaggccccatgaaaaccctgctggttagagtgatgacacccgatctgagagagcggctggaaaacctgagaaagaagcctgaaaatatcccccagcccatcagcaatacatctagagccaacctgaataagctgctgaccgattacaccgaaatgaagaaggcgatcctgcatgtgtactgggaagagttccagaaggaccctgtgggcctgatgagccgggtggcccagcctgccagcaagaagatcgatcagaacaagctgaaacctgagatggacgagaagggcaacctgaccaccgccggctttgcctgctctcagtgtggccagcccctgttcgtgtacaagctggagcaggtgtctgagaagggcaaggcttacaccaactacttcggacggtgcaatgtggccgagcacgaaaagctgatcctgctggcccagctgaagcccgagaaggatagcgacgaagccgtgacatatagcctgggaaagtttgggcagagggccctggatttctacagcattcatgtgaccaaggagtccacccaccccgtgaagcccctggcccagatcgccggaaacagatacgcctccggacctgtgggaaaggccctgagcgacgcatgtatgggcacaatcgcctccttcctgtctaagtaccaggacatcatcatcgaacaccagaaggtggtgaagggcaaccagaagagactggagagcctgcgggagctggccggcaaggaaaacctggaataccctagcgtgaccctgccacctcagcctcacaccaaggagggcgttgatgcctacaacgaagtgatcgcccgggtgcgaatgtgggtgaacctgaacctgtggcagaagctgaagctaagcagagatgatgccaagcctctgctgagactgaagggattcccttcctttcctctggtcgagagacaggccaacgaagtggactggtgggacatggtgtgtaacgtgaagaagctgatcaacgagaaaaaggaggatggcaaggtgttttggcagaatctggctggctacaagagacaggaagccctgagaccatacctgagcagcgaggaagatcggaagaagggaaagaaattcgctcggtaccagctgggcgacctgctgctgcacctggaaaagaagcacggcgaggactggggaaaggtgtacgacgaggcctgggagcggattgacaagaaagtggaaggcctgagcaagcacatcaagctggaagaggaacggagaagcgaggacgcccagagcaaggccgccctgaccgactggctgcgggctaaggccagcttcgtgatcgagggcctgaaggaggccgacaaggacgagttctgcagatgcgagctgaagctgcagaagtggtacggggacctgcggggaaagcccttcgccatcgaagccgagaacagcatcctggacatcagcggcttcagcaagcagtacaactgtgccttcatctggcagaaggacggcgtgaagaagctgaacctgtacctgatcatcaactacttcaagggcggcaagctgcggttcaagaagatcaaacctgaagccttcgaagccaacagattctacaccgtgatcaacaaaaagagcggcgagatcgtgcccatggaggtgaacttcaacttcgacgaccccaacctgatcatcctgcctctggcctttggcaagagacagggcagagaattcatctggaacgacctgctgtccctggaaaccggcagcctgaagctggccaacggaagagtgatcgagaagacactgtacaacagaagaacccggcaggatgagcctgccctgttcgtggccctgaccttcgagcggcgggaggtcctggactcctccaatatcaaaccaatgaacctgatcggcgtggcaagaggcgaaaacatccccgccgtgatcgccctgaccgaccccgagggctgcccactgagccggtttaaggatagcctgggaaacccaacccacatcctgagaatcggcgagagctataaggagaagcagcggaccatccaggccaagaaggaggtggagcagcggagagccggcggctacagccggaagtacgccagcaaagccaagaatctggcagacgatatggtgagaaacaccgctagagatctgctgtactacgccgtgacccaggatgccatgctgatcttcgccaacctgagccggggcttcggccggcagggcaagcggaccttcatggccgagagacagtacacacggatggaggactggctgaccgccaagctggcctacgagggcctgagcaagacctacctgtccaagacactggcccagtacacctccaagacatgcagcaactgtgggtttaccatcaccagcgccgactacgacagggtgctggagaagctgaagaagacagcaacaggctggatgaccacaattaacggcaaggagctgaaggtggagggccagattacctactacaacagatacaagagacagaacgtagtcaaggacctgtccgtcgagctggatagactgagcgaagaatctgtgaacaacgacatctcctcctggacaaagggcagaagcggagaagctctgagcctcctgaagaaaagattctcccatagacccgtgcaggagaagttcgtgtgcctgaactgcggcttcgagacacacgcagccgagcaagccgccctgaacatcgccagatcctggctgttcctgcggagccaggagtacaagaaataccagacaaacaagacaaccggcaacaccgataagagagccttcgtcgagacctggcagtccttttaccggaagaagcttaaggaggtgtggaaacctgccgtgcggtctggcggatctggcggaggctcctcaggacctggtgaccttcaaggacgtgagcgtggacttcaccagggaggagtggatgaggctggaccacccccagagggccctgtacagggacgtgatgctggagaactacaggaacctggtgctggtgagcctgggccaccccatcagcaagcccgacgtgatcagcaggctggagcagggcggcgtgccctgggtgctgaagaagggcgccaccggcagggccttcagcgacagggagaccggatctggctccggcagcggccccaagaaaaagagaaaagtctaagctgccttctgcggggcttgccttctggccatgcccttcttctctcccttgcacctgtacctcttggtctttgaataaagcctgagtaggaaggctagcaaaaaaaaaaaaaaaaaaaaaaaaaaaaaaaaaaaaaaaaaaaaaaaaaaaaaaaaaaaaaaaaaaaaaaaaaaaaaaaa

SEQ ID NO: 16761 - RNA, 9485 nt, synthetic construct
  source 1..9485: mol_type = other RNA
aggaaataagagagaaaagaagagtaagaagaaatataagagccaccatggcccctaagaagaagcgtaaagtgagccggatggaacgcctcgtctacgaggtgcggcagaagtgcagaaacatcgaggacatctgcatctcctgcggatctctgaacgtgaccctggagcacccactgttcatcggcggcatgtgccagaactgtaaaaactgttttctggagtgtgcctatcaatacgacgatgacggctaccagagctactgcaccatctgttgcggcggaagagaggtgctgatgtgtggaaataacaactgctgccggtgcttctgcgtggaatgcgtggacctgctggtgggccccggcgccgcccaggccgctattaaggaagatccttggaactgctacatgtgcggccacaagggcacatacggcctgctgagacggagagaggactggcctagcagactgcagatgttcttcgccaataaccacgaccaggagttcgacccccctaaggtgtaccctcccgtccccgccgagaagagaaagcccatccgggtcctgagcctgttcgatggcatcgccaccggtctgctggtgctgaaggacctgggcatccaggtggataggtacattgcctccgaggtgtgcgaggactccatcaccgtgggaatggtgcgtcatcagggcaagatcatgtacgtgggcgacgtgcggagcgtgacacagaagcatatccaggagtggggccctttcgacctggtgatcggcggcagcccttgcaatgacctgagcatcgtgaacccagcccggaagggcctgtacgagggaaccggcagactgttcttcgagttttacagactgctgcacgacgcccggcctaaggaaggcgacgaccggcccttcttttggctgttcgagaatgtggtggccatgggagtcagcgacaagcgggatattagccggttcctggagagcaaccccgtgatgatcgatgccaaggaagtgagcgccgcccaccgggccagatacttctggggcaatctgcctggcatgaacagacccctggccagcaccgtgaacgacaagctggagctgcaggagtgcctggagcacggccggatcgccaagttcagcaaggtgagaaccatcaccacccgaagcaacagcatcaaacaaggcaaggaccagcactttcctgtgttcatgaacgagaaggaggacatcctgtggtgtaccgagatggagagagtgttcgggttcccagtccactacacagatgtcagcaacatgtctagactggccagacagagactgctgggaagaagctggtccgtccctgtgatcagacacctgttcgcccctctgaaggagtacttcgcctgcgtgagcagcggcaacagcaacgccaacagccggggccccagcttctctagcggcctggtgccactgtccctgagagggagccacatgggccccatggagatctacaaaaccgtgagcgcctggaagcggcagcctgtgcgcgtgctgagcctgtttcggaatatcgataaagtcctgaaaagcctgggattcctggagagcggctctggctccggcggtggcaccctgaagtacgtggaggatgtgacaaacgtggtcagacgggatgtggagaagtggggccccttcgatctggtgtacggcagcacccaacccctgggcagctcttgtgaccggtgccctggctggtacatgtttcagttccaccggatcctgcagtacgccctgccgagacaggagtcccagcggccattcttttggattttcatggacaacttgctgctgaccgaggatgaccaggaaactaccactcggttcctgcagaccgaagccgtgaccctgcaggacgtgagaggccgggactaccagaacgccatgcgggtgtggtccaacatccctggactgaaaagcaagcacgcacctctgacccctaaagaagaggagtacctgcaggcccaggtgcggagcagaagcaagctggacgcccctaaggtggatctgctggtgaagaattgcctcctgcccctgagagagtacttcaagtatttcagccagaatagtctgcccctgggaggcagcggcggcggcgccctggtgacatttgaggacgtcgccgtgcggttcacccaggaggaatgggctctgctggatccttctcagaaaatcctgtaccgggacgtgatgagagagacataccggaatctgacctccgtgggcatcaactgggaatgttgggaccttgaagcctgcttcagaagcctgggaagaaacctgagagtgcaggtggtgaagagaaagtgcgagctgaccaacagcggcccctgcgccgagggcggcccaagcagcggcgcccctcctcccagcggcggcagcccagccggctccccaacctctaccgaggagggcacctctgagtccgccacccccgagagcggccctggcacctccaccgagcccagcgagggcagcgcacccggcagccctgccggcagccccacctccacagaggagggaaccagcaccgagcccagcgaaggcagcgccccaggcaccagcaccgagcctagtgagcaggagattaaacggatcaacaagatcagaagaagacttgtgaaagacagcaacaccaagaaggccggcaagacaggccccatgaaaaccctgctggttagagtgatgacacccgatctgagagagcggctggaaaacctgagaaagaagcctgaaaatatcccccagcccatcagcaatacatctagagccaacctgaataagctgctgaccgattacaccgaaatgaagaaggcgatcctgcatgtgtactgggaagagttccagaaggaccctgtgggcctgatgagccgggtggcccagcctgccagcaagaagatcgatcagaacaagctgaaacctgagatggacgagaagggcaacctgaccaccgccggctttgcctgctctcagtgtggccagcccctgttcgtgtacaagctggagcaggtgtctgagaagggcaaggcttacaccaactacttcggacggtgcaatgtggccgagcacgaaaagctgatcctgctggcccagctgaagcccgagaaggatagcgacgaagccgtgacatatagcctgggaaagtttgggcagagggccctggatttctacagcattcatgtgaccaaggagtccacccaccccgtgaagcccctggcccagatcgccggaaacagatacgcctccggacctgtgggaaaggccctgagcgacgcatgtatgggcacaatcgcctccttcctgtctaagtaccaggacatcatcatcgaacaccagaaggtggtgaagggcaaccagaagagactggagagcctgcgggagctggccggcaaggaaaacctggaataccctagcgtgaccctgccacctcagcctcacaccaaggagggcgttgatgcctacaacgaagtgatcgcccgggtgcgaatgtgggtgaacctgaacctgtggcagaagctgaagctaagcagagatgatgccaagcctctgctgagactgaagggattcccttcctttcctctggtcgagagacaggccaacgaagtggactggtgggacatggtgtgtaacgtgaagaagctgatcaacgagaaaaaggaggatggcaaggtgttttggcagaatctggctggctacaagagacaggaagccctgagaccatacctgagcagcgaggaagatcggaagaagggaaagaaattcgctcggtaccagctgggcgacctgctgctgcacctggaaaagaagcacggcgaggactggggaaaggtgtacgacgaggcctgggagcggattgacaagaaagtggaaggcctgagcaagcacatcaagctggaagaggaacggagaagcgaggacgcccagagcaaggccgccctgaccgactggctgcgggctaaggccagcttcgtgatcgagggcctgaaggaggccgacaaggacgagttctgcagatgcgagctgaagctgcagaagtggtacggggacctgcggggaaagcccttcgccatcgaagccgagaacagcatcctggacatcagcggcttcagcaagcagtacaactgtgccttcatctggcagaaggacggcgtgaagaagctgaacctgtacctgatcatcaactacttcaagggcggcaagctgcggttcaagaagatcaaacctgaagccttcgaagccaacagattctacaccgtgatcaacaaaaagagcggcgagatcgtgcccatggaggtgaacttcaacttcgacgaccccaacctgatcatcctgcctctggcctttggcaagagacagggcagagaattcatctggaacgacctgctgtccctggaaaccggcagcctgaagctggccaacggaagagtgatcgagaagacactgtacaacagaagaacccggcaggatgagcctgccctgttcgtggccctgaccttcgagcggcgggaggtcctggactcctccaatatcaaaccaatgaacctgatcggcgtggcaagaggcgaaaacatccccgccgtgatcgccctgaccgaccccgagggctgcccactgagccggtttaaggatagcctgggaaacccaacccacatcctgagaatcggcgagagctataaggagaagcagcggaccatccaggccaagaaggaggtggagcagcggagagccggcggctacagccggaagtacgccagcaaagccaagaatctggcagacgatatggtgagaaacaccgctagagatctgctgtactacgccgtgacccaggatgccatgctgatcttcgccaacctgagccggggcttcggccggcagggcaagcggaccttcatggccgagagacagtacacacggatggaggactggctgaccgccaagctggcctacgagggcctgagcaagacctacctgtccaagacactggcccagtacacctccaagacatgcagcaactgtgggtttaccatcaccagcgccgactacgacagggtgctggagaagctgaagaagacagcaacaggctggatgaccacaattaacggcaaggagctgaaggtggagggccagattacctactacaacagatacaagagacagaacgtagtcaaggacctgtccgtcgagctggatagactgagcgaagaatctgtgaacaacgacatctcctcctggacaaagggcagaagcggagaagctctgagcctcctgaagaaaagattctcccatagacccgtgcaggagaagttcgtgtgcctgaactgcggcttcgagacacacgcagccgagcaagccgccctgaacatcgccagatcctggctgttcctgcggagccaggagtacaagaaataccagacaaacaagacaaccggcaacaccgataagagagccttcgtcgagacctggcagtccttttaccggaagaagcttaaggaggtgtggaaacctgccgtgcggtctggcggatctggcggaggctccgaccaggagagcctgaccctggaggacgtggccgtggacttcagcagggaggagtggcagctgctggcccccgcccagaaggacctgtacagggacgtgatgctggagaactacaggaacctggtgagcctgggctaccaggccagcacccccgacgccctgtgcatgctggagaggggcgagggcccctgggccaccggcgaggccgtgaggggcggcgccaggcccgagaccaggaaggtgggcggcccaagcagcggcgcccctcctcccagcggcggcagcccagccggctccccaacctctaccgaggagggcacctctgagtccgccacccccgagagcggccctggcacctccaccgagcccagcgagggcagcgcacccggcagccctgccggcagccccacctccacagaggagggaaccagcaccgagcccagcgaaggcagcgccccaggcaccagcaccgagcctagtgagcaggagattaaacggatcaacaagatcagaagaagacttgtgaaagacagcaacaccaagaaggccggcaagacaggccccatgaaaaccctgctggttagagtgatgacacccgatctgagagagcggctggaaaacctgagaaagaagcctgaaaatatcccccagcccatcagcaatacatctagagccaacctgaataagctgctgaccgattacaccgaaatgaagaaggcgatcctgcatgtgtactgggaagagttccagaaggaccctgtgggcctgatgagccgggtggcccagcctgccagcaagaagatcgatcagaacaagctgaaacctgagatggacgagaagggcaacctgaccaccgccggctttgcctgctctcagtgtggccagcccctgttcgtgtacaagctggagcaggtgtctgagaagggcaaggcttacaccaactacttcggacggtgcaatgtggccgagcacgaaaagctgatcctgctggcccagctgaagcccgagaaggatagcgacgaagccgtgacatatagcctgggaaagtttgggcagagggccctggatttctacagcattcatgtgaccaaggagtccacccaccccgtgaagcccctggcccagatcgccggaaacagatacgcctccggacctgtgggaaaggccctgagcgacgcatgtatgggcacaatcgcctccttcctgtctaagtaccaggacatcatcatcgaacaccagaaggtggtgaagggcaaccagaagagactggagagcctgcgggagctggccggcaaggaaaacctggaataccctagcgtgaccctgccacctcagcctcacaccaaggagggcgttgatgcctacaacgaagtgatcgcccgggtgcgaatgtgggtgaacctgaacctgtggcagaagctgaagctaagcagagatgatgccaagcctctgctgagactgaagggattcccttcctttcctctggtcgagagacaggccaacgaagtggactggtgggacatggtgtgtaacgtgaagaagctgatcaacgagaaaaaggaggatggcaaggtgttttggcagaatctggctggctacaagagacaggaagccctgagaccatacctgagcagcgaggaagatcggaagaagggaaagaaattcgctcggtaccagctgggcgacctgctgctgcacctggaaaagaagcacggcgaggactggggaaaggtgtacgacgaggcctgggagcggattgacaagaaagtggaaggcctgagcaagcacatcaagctggaagaggaacggagaagcgaggacgcccagagcaaggccgccctgaccgactggctgcgggctaaggccagcttcgtgatcgagggcctgaaggaggccgacaaggacgagttctgcagatgcgagctgaagctgcagaagtggtacggggacctgcggggaaagcccttcgccatcgaagccgagaacagcatcctggacatcagcggcttcagcaagcagtacaactgtgccttcatctggcagaaggacggcgtgaagaagctgaacctgtacctgatcatcaactacttcaagggcggcaagctgcggttcaagaagatcaaacctgaagccttcgaagccaacagattctacaccgtgatcaacaaaaagagcggcgagatcgtgcccatggaggtgaacttcaacttcgacgaccccaacctgatcatcctgcctctggcctttggcaagagacagggcagagaattcatctggaacgacctgctgtccctggaaaccggcagcctgaagctggccaacggaagagtgatcgagaagacactgtacaacagaagaacccggcaggatgagcctgccctgttcgtggccctgaccttcgagcggcgggaggtcctggactcctccaatatcaaaccaatgaacctgatcggcgtggcaagaggcgaaaacatccccgccgtgatcgccctgaccgaccccgagggctgcccactgagccggtttaaggatagcctgggaaacccaacccacatcctgagaatcggcgagagctataaggagaagcagcggaccatccaggccaagaaggaggtggagcagcggagagccggcggctacagccggaagtacgccagcaaagccaagaatctggcagacgatatggtgagaaacaccgctagagatctgctgtactacgccgtgacccaggatgccatgctgatcttcgccaacctgagccggggcttcggccggcagggcaagcggaccttcatggccgagagacagtacacacggatggaggactggctgaccgccaagctggcctacgagggcctgagcaagacctacctgtccaagacactggcccagtacacctccaagacatgcagcaactgtgggtttaccatcaccagcgccgactacgacagggtgctggagaagctgaagaagacagcaacaggctggatgaccacaattaacggcaaggagctgaaggtggagggccagattacctactacaacagatacaagagacagaacgtagtcaaggacctgtccgtcgagctggatagactgagcgaagaatctgtgaacaacgacatctcctcctggacaaagggcagaagcggagaagctctgagcctcctgaagaaaagattctcccatagacccgtgcaggagaagttcgtgtgcctgaactgcggcttcgagacacacgcagccgagcaagccgccctgaacatcgccagatcctggctgttcctgcggagccaggagtacaagaaataccagacaaacaagacaaccggcaacaccgataagagagccttcgtcgagacctggcagtccttttaccggaagaagcttaaggaggtgtggaaacctgccgtgcggtctggcggatctggcggaggctcctgaccaggagagcctgaccctggaggacgtggccgtggacttcagcagggaggagtggcagctgctggcccccgcccagaaggacctgtacagggacgtgatgctggagaactacaggaacctggtgagcctgggctaccaggccagcacccccgacgccctgtgcatgctggagaggggcgagggcccctgggccaccggcgaggccgtgaggggcggcgccaggcccgagaccaggaaggtgggatctggctccggcagcggccccaagaaaaagagaaaagtctaagctgccttctgcggggcttgccttctggccatgcccttcttctctcccttgcacctgtacctcttggtctttgaataaagcctgagtaggaaggctagcaaaaaaaaaaaaaaaaaaaaaaaaaaaaaaaaaaaaaaaaaaaaaaaaaaaaaaaaaaaaaaaaaaaaaaaaaaaaaaaa

SEQ ID NO: 16762 - RNA, 9485 nt, synthetic construct
  source 1..9485: mol_type = other RNA
aggaaataagagagaaaagaagagtaagaagaaatataagagccaccatggcccctaagaagaagcgtaaagtgagccggatggaacgcctcgtctacgaggtgcggcagaagtgcagaaacatcgaggacatctgcatctcctgcggatctctgaacgtgaccctggagcacccactgttcatcggcggcatgtgccagaactgtaaaaactgttttctggagtgtgcctatcaatacgacgatgacggctaccagagctactgcaccatctgttgcggcggaagagaggtgctgatgtgtggaaataacaactgctgccggtgcttctgcgtggaatgcgtggacctgctggtgggccccggcgccgcccaggccgctattaaggaagatccttggaactgctacatgtgcggccacaagggcacatacggcctgctgagacggagagaggactggcctagcagactgcagatgttcttcgccaataaccacgaccaggagttcgacccccctaaggtgtaccctcccgtccccgccgagaagagaaagcccatccgggtcctgagcctgttcgatggcatcgccaccggtctgctggtgctgaaggacctgggcatccaggtggataggtacattgcctccgaggtgtgcgaggactccatcaccgtgggaatggtgcgtcatcagggcaagatcatgtacgtgggcgacgtgcggagcgtgacacagaagcatatccaggagtggggccctttcgacctggtgatcggcggcagcccttgcaatgacctgagcatcgtgaacccagcccggaagggcctgtacgagggaaccggcagactgttcttcgagttttacagactgctgcacgacgcccggcctaaggaaggcgacgaccggcccttcttttggctgttcgagaatgtggtggccatgggagtcagcgacaagcgggatattagccggttcctggagagcaaccccgtgatgatcgatgccaaggaagtgagcgccgcccaccgggccagatacttctggggcaatctgcctggcatgaacagacccctggccagcaccgtgaacgacaagctggagctgcaggagtgcctggagcacggccggatcgccaagttcagcaaggtgagaaccatcaccacccgaagcaacagcatcaaacaaggcaaggaccagcactttcctgtgttcatgaacgagaaggaggacatcctgtggtgtaccgagatggagagagtgttcgggttcccagtccactacacagatgtcagcaacatgtctagactggccagacagagactgctgggaagaagctggtccgtccctgtgatcagacacctgttcgcccctctgaaggagtacttcgcctgcgtgagcagcggcaacagcaacgccaacagccggggccccagcttctctagcggcctggtgccactgtccctgagagggagccacatgggccccatggagatctacaaaaccgtgagcgcctggaagcggcagcctgtgcgcgtgctgagcctgtttcggaatatcgataaagtcctgaaaagcctgggattcctggagagcggctctggctccggcggtggcaccctgaagtacgtggaggatgtgacaaacgtggtcagacgggatgtggagaagtggggccccttcgatctggtgtacggcagcacccaacccctgggcagctcttgtgaccggtgccctggctggtacatgtttcagttccaccggatcctgcagtacgccctgccgagacaggagtcccagcggccattcttttggattttcatggacaacttgctgctgaccgaggatgaccaggaaactaccactcggttcctgcagaccgaagccgtgaccctgcaggacgtgagaggccgggactaccagaacgccatgcgggtgtggtccaacatccctggactgaaaagcaagcacgcacctctgacccctaaagaagaggagtacctgcaggcccaggtgcggagcagaagcaagctggacgcccctaaggtggatctgctggtgaagaattgcctcctgcccctgagagagtacttcaagtatttcagccagaatagtctgcccctgggaggcagcggcggcggcgccctggtgacatttgaggacgtcgccgtgcggttcacccaggaggaatgggctctgctggatccttctcagaaaatcctgtaccgggacgtgatgagagagacataccggaatctgacctccgtgggcatcaactgggaatgttgggaccttgaagcctgcttcagaagcctgggaagaaacctgagagtgcaggtggtgaagagaaagtgcgagctgaccaacagcggcccctgcgccgagggcggcccaagcagcggcgcccctcctcccagcggcggcagcccagccggctccccaacctctaccgaggagggcacctctgagtccgccacccccgagagcggccctggcacctccaccgagcccagcgagggcagcgcacccggcagccctgccggcagccccacctccacagaggagggaaccagcaccgagcccagcgaaggcagcgccccaggcaccagcaccgagcctagtgagcaggagattaaacggatcaacaagatcagaagaagacttgtgaaagacagcaacaccaagaaggccggcaagacaggccccatgaaaaccctgctggttagagtgatgacacccgatctgagagagcggctggaaaacctgagaaagaagcctgaaaatatcccccagcccatcagcaatacatctagagccaacctgaataagctgctgaccgattacaccgaaatgaagaaggcgatcctgcatgtgtactgggaagagttccagaaggaccctgtgggcctgatgagccgggtggcccagcctgccagcaagaagatcgatcagaacaagctgaaacctgagatggacgagaagggcaacctgaccaccgccggctttgcctgctctcagtgtggccagcccctgttcgtgtacaagctggagcaggtgtctgagaagggcaaggcttacaccaactacttcggacggtgcaatgtggccgagcacgaaaagctgatcctgctggcccagctgaagcccgagaaggatagcgacgaagccgtgacatatagcctgggaaagtttgggcagagggccctggatttctacagcattcatgtgaccaaggagtccacccaccccgtgaagcccctggcccagatcgccggaaacagatacgcctccggacctgtgggaaaggccctgagcgacgcatgtatgggcacaatcgcctccttcctgtctaagtaccaggacatcatcatcgaacaccagaaggtggtgaagggcaaccagaagagactggagagcctgcgggagctggccggcaaggaaaacctggaataccctagcgtgaccctgccacctcagcctcacaccaaggagggcgttgatgcctacaacgaagtgatcgcccgggtgcgaatgtgggtgaacctgaacctgtggcagaagctgaagctaagcagagatgatgccaagcctctgctgagactgaagggattcccttcctttcctctggtcgagagacaggccaacgaagtggactggtgggacatggtgtgtaacgtgaagaagctgatcaacgagaaaaaggaggatggcaaggtgttttggcagaatctggctggctacaagagacaggaagccctgagaccatacctgagcagcgaggaagatcggaagaagggaaagaaattcgctcggtaccagctgggcgacctgctgctgcacctggaaaagaagcacggcgaggactggggaaaggtgtacgacgaggcctgggagcggattgacaagaaagtggaaggcctgagcaagcacatcaagctggaagaggaacggagaagcgaggacgcccagagcaaggccgccctgaccgactggctgcgggctaaggccagcttcgtgatcgagggcctgaaggaggccgacaaggacgagttctgcagatgcgagctgaagctgcagaagtggtacggggacctgcggggaaagcccttcgccatcgaagccgagaacagcatcctggacatcagcggcttcagcaagcagtacaactgtgccttcatctggcagaaggacggcgtgaagaagctgaacctgtacctgatcatcaactacttcaagggcggcaagctgcggttcaagaagatcaaacctgaagccttcgaagccaacagattctacaccgtgatcaacaaaaagagcggcgagatcgtgcccatggaggtgaacttcaacttcgacgaccccaacctgatcatcctgcctctggcctttggcaagagacagggcagagaattcatctggaacgacctgctgtccctggaaaccggcagcctgaagctggccaacggaagagtgatcgagaagacactgtacaacagaagaacccggcaggatgagcctgccctgttcgtggccctgaccttcgagcggcgggaggtcctggactcctccaatatcaaaccaatgaacctgatcggcgtggcaagaggcgaaaacatccccgccgtgatcgccctgaccgaccccgagggctgcccactgagccggtttaaggatagcctgggaaacccaacccacatcctgagaatcggcgagagctataaggagaagcagcggaccatccaggccaagaaggaggtggagcagcggagagccggcggctacagccggaagtacgccagcaaagccaagaatctggcagacgatatggtgagaaacaccgctagagatctgctgtactacgccgtgacccaggatgccatgctgatcttcgccaacctgagccggggcttcggccggcagggcaagcggaccttcatggccgagagacagtacacacggatggaggactggctgaccgccaagctggcctacgagggcctgagcaagacctacctgtccaagacactggcccagtacacctccaagacatgcagcaactgtgggtttaccatcaccagcgccgactacgacagggtgctggagaagctgaagaagacagcaacaggctggatgaccacaattaacggcaaggagctgaaggtggagggccagattacctactacaacagatacaagagacagaacgtagtcaaggacctgtccgtcgagctggatagactgagcgaagaatctgtgaacaacgacatctcctcctggacaaagggcagaagcggagaagctctgagcctcctgaagaaaagattctcccatagacccgtgcaggagaagttcgtgtgcctgaactgcggcttcgagacacacgcagccgagcaagccgccctgaacatcgccagatcctggctgttcctgcggagccaggagtacaagaaataccagacaaacaagacaaccggcaacaccgataagagagccttcgtcgagacctggcagtccttttaccggaagaagcttaaggaggtgtggaaacctgccgtgcggtctggcggatctggcggaggctcccccaggggcctggtgaccttcaaggacgtggccgtggacttcacccaggaggagtggggcctgctggaccacaaccagaaggagctgtacaaggaggtgatgctggagaacgccaggaacctgctgagcctgggcctgcccgtgcccagggaggacgtgatcagctacttcgagcagagggaggccccctggatgctggagcaggagggcctgaggagcaggtgcctggagggcgagatcaggggcggcccaagcagcggcgcccctcctcccagcggcggcagcccagccggctccccaacctctaccgaggagggcacctctgagtccgccacccccgagagcggccctggcacctccaccgagcccagcgagggcagcgcacccggcagccctgccggcagccccacctccacagaggagggaaccagcaccgagcccagcgaaggcagcgccccaggcaccagcaccgagcctagtgagcaggagattaaacggatcaacaagatcagaagaagacttgtgaaagacagcaacaccaagaaggccggcaagacaggccccatgaaaaccctgctggttagagtgatgacacccgatctgagagagcggctggaaaacctgagaaagaagcctgaaaatatcccccagcccatcagcaatacatctagagccaacctgaataagctgctgaccgattacaccgaaatgaagaaggcgatcctgcatgtgtactgggaagagttccagaaggaccctgtgggcctgatgagccgggtggcccagcctgccagcaagaagatcgatcagaacaagctgaaacctgagatggacgagaagggcaacctgaccaccgccggctttgcctgctctcagtgtggccagcccctgttcgtgtacaagctggagcaggtgtctgagaagggcaaggcttacaccaactacttcggacggtgcaatgtggccgagcacgaaaagctgatcctgctggcccagctgaagcccgagaaggatagcgacgaagccgtgacatatagcctgggaaagtttgggcagagggccctggatttctacagcattcatgtgaccaaggagtccacccaccccgtgaagcccctggcccagatcgccggaaacagatacgcctccggacctgtgggaaaggccctgagcgacgcatgtatgggcacaatcgcctccttcctgtctaagtaccaggacatcatcatcgaacaccagaaggtggtgaagggcaaccagaagagactggagagcctgcgggagctggccggcaaggaaaacctggaataccctagcgtgaccctgccacctcagcctcacaccaaggagggcgttgatgcctacaacgaagtgatcgcccgggtgcgaatgtgggtgaacctgaacctgtggcagaagctgaagctaagcagagatgatgccaagcctctgctgagactgaagggattcccttcctttcctctggtcgagagacaggccaacgaagtggactggtgggacatggtgtgtaacgtgaagaagctgatcaacgagaaaaaggaggatggcaaggtgttttggcagaatctggctggctacaagagacaggaagccctgagaccatacctgagcagcgaggaagatcggaagaagggaaagaaattcgctcggtaccagctgggcgacctgctgctgcacctggaaaagaagcacggcgaggactggggaaaggtgtacgacgaggcctgggagcggattgacaagaaagtggaaggcctgagcaagcacatcaagctggaagaggaacggagaagcgaggacgcccagagcaaggccgccctgaccgactggctgcgggctaaggccagcttcgtgatcgagggcctgaaggaggccgacaaggacgagttctgcagatgcgagctgaagctgcagaagtggtacggggacctgcggggaaagcccttcgccatcgaagccgagaacagcatcctggacatcagcggcttcagcaagcagtacaactgtgccttcatctggcagaaggacggcgtgaagaagctgaacctgtacctgatcatcaactacttcaagggcggcaagctgcggttcaagaagatcaaacctgaagccttcgaagccaacagattctacaccgtgatcaacaaaaagagcggcgagatcgtgcccatggaggtgaacttcaacttcgacgaccccaacctgatcatcctgcctctggcctttggcaagagacagggcagagaattcatctggaacgacctgctgtccctggaaaccggcagcctgaagctggccaacggaagagtgatcgagaagacactgtacaacagaagaacccggcaggatgagcctgccctgttcgtggccctgaccttcgagcggcgggaggtcctggactcctccaatatcaaaccaatgaacctgatcggcgtggcaagaggcgaaaacatccccgccgtgatcgccctgaccgaccccgagggctgcccactgagccggtttaaggatagcctgggaaacccaacccacatcctgagaatcggcgagagctataaggagaagcagcggaccatccaggccaagaaggaggtggagcagcggagagccggcggctacagccggaagtacgccagcaaagccaagaatctggcagacgatatggtgagaaacaccgctagagatctgctgtactacgccgtgacccaggatgccatgctgatcttcgccaacctgagccggggcttcggccggcagggcaagcggaccttcatggccgagagacagtacacacggatggaggactggctgaccgccaagctggcctacgagggcctgagcaagacctacctgtccaagacactggcccagtacacctccaagacatgcagcaactgtgggtttaccatcaccagcgccgactacgacagggtgctggagaagctgaagaagacagcaacaggctggatgaccacaattaacggcaaggagctgaaggtggagggccagattacctactacaacagatacaagagacagaacgtagtcaaggacctgtccgtcgagctggatagactgagcgaagaatctgtgaacaacgacatctcctcctggacaaagggcagaagcggagaagctctgagcctcctgaagaaaagattctcccatagacccgtgcaggagaagttcgtgtgcctgaactgcggcttcgagacacacgcagccgagcaagccgccctgaacatcgccagatcctggctgttcctgcggagccaggagtacaagaaataccagacaaacaagacaaccggcaacaccgataagagagccttcgtcgagacctggcagtccttttaccggaagaagcttaaggaggtgtggaaacctgccgtgcggtctggcggatctggcggaggctcctcccaggggcctggtgaccttcaaggacgtggccgtggacttcacccaggaggagtggggcctgctggaccacaaccagaaggagctgtacaaggaggtgatgctggagaacgccaggaacctgctgagcctgggcctgcccgtgcccagggaggacgtgatcagctacttcgagcagagggaggccccctggatgctggagcaggagggcctgaggagcaggtgcctggagggcgagatcaggggatctggctccggcagcggccccaagaaaaagagaaaagtctaagctgccttctgcggggcttgccttctggccatgcccttcttctctcccttgcacctgtacctcttggtctttgaataaagcctgagtaggaaggctagcaaaaaaaaaaaaaaaaaaaaaaaaaaaaaaaaaaaaaaaaaaaaaaaaaaaaaaaaaaaaaaaaaaaaaaaaaaaaaaaa

SEQ ID NO: 16763 - RNA, 9485 nt, synthetic construct
  source 1..9485: mol_type = other RNA
aggaaataagagagaaaagaagagtaagaagaaatataagagccaccatggcccctaagaagaagcgtaaagtgagccggatggaacgcctcgtctacgaggtgcggcagaagtgcagaaacatcgaggacatctgcatctcctgcggatctctgaacgtgaccctggagcacccactgttcatcggcggcatgtgccagaactgtaaaaactgttttctggagtgtgcctatcaatacgacgatgacggctaccagagctactgcaccatctgttgcggcggaagagaggtgctgatgtgtggaaataacaactgctgccggtgcttctgcgtggaatgcgtggacctgctggtgggccccggcgccgcccaggccgctattaaggaagatccttggaactgctacatgtgcggccacaagggcacatacggcctgctgagacggagagaggactggcctagcagactgcagatgttcttcgccaataaccacgaccaggagttcgacccccctaaggtgtaccctcccgtccccgccgagaagagaaagcccatccgggtcctgagcctgttcgatggcatcgccaccggtctgctggtgctgaaggacctgggcatccaggtggataggtacattgcctccgaggtgtgcgaggactccatcaccgtgggaatggtgcgtcatcagggcaagatcatgtacgtgggcgacgtgcggagcgtgacacagaagcatatccaggagtggggccctttcgacctggtgatcggcggcagcccttgcaatgacctgagcatcgtgaacccagcccggaagggcctgtacgagggaaccggcagactgttcttcgagttttacagactgctgcacgacgcccggcctaaggaaggcgacgaccggcccttcttttggctgttcgagaatgtggtggccatgggagtcagcgacaagcgggatattagccggttcctggagagcaaccccgtgatgatcgatgccaaggaagtgagcgccgcccaccgggccagatacttctggggcaatctgcctggcatgaacagacccctggccagcaccgtgaacgacaagctggagctgcaggagtgcctggagcacggccggatcgccaagttcagcaaggtgagaaccatcaccacccgaagcaacagcatcaaacaaggcaaggaccagcactttcctgtgttcatgaacgagaaggaggacatcctgtggtgtaccgagatggagagagtgttcgggttcccagtccactacacagatgtcagcaacatgtctagactggccagacagagactgctgggaagaagctggtccgtccctgtgatcagacacctgttcgcccctctgaaggagtacttcgcctgcgtgagcagcggcaacagcaacgccaacagccggggccccagcttctctagcggcctggtgccactgtccctgagagggagccacatgggccccatggagatctacaaaaccgtgagcgcctggaagcggcagcctgtgcgcgtgctgagcctgtttcggaatatcgataaagtcctgaaaagcctgggattcctggagagcggctctggctccggcggtggcaccctgaagtacgtggaggatgtgacaaacgtggtcagacgggatgtggagaagtggggccccttcgatctggtgtacggcagcacccaacccctgggcagctcttgtgaccggtgccctggctggtacatgtttcagttccaccggatcctgcagtacgccctgccgagacaggagtcccagcggccattcttttggattttcatggacaacttgctgctgaccgaggatgaccaggaaactaccactcggttcctgcagaccgaagccgtgaccctgcaggacgtgagaggccgggactaccagaacgccatgcgggtgtggtccaacatccctggactgaaaagcaagcacgcacctctgacccctaaagaagaggagtacctgcaggcccaggtgcggagcagaagcaagctggacgcccctaaggtggatctgctggtgaagaattgcctcctgcccctgagagagtacttcaagtatttcagccagaatagtctgcccctgggaggcagcggcggcggcgccctggtgacatttgaggacgtcgccgtgcggttcacccaggaggaatgggctctgctggatccttctcagaaaatcctgtaccgggacgtgatgagagagacataccggaatctgacctccgtgggcatcaactgggaatgttgggaccttgaagcctgcttcagaagcctgggaagaaacctgagagtgcaggtggtgaagagaaagtgcgagctgaccaacagcggcccctgcgccgagggcggcccaagcagcggcgcccctcctcccagcggcggcagcccagccggctccccaacctctaccgaggagggcacctctgagtccgccacccccgagagcggccctggcacctccaccgagcccagcgagggcagcgcacccggcagccctgccggcagccccacctccacagaggagggaaccagcaccgagcccagcgaaggcagcgccccaggcaccagcaccgagcctagtgagcaggagattaaacggatcaacaagatcagaagaagacttgtgaaagacagcaacaccaagaaggccggcaagacaggccccatgaaaaccctgctggttagagtgatgacacccgatctgagagagcggctggaaaacctgagaaagaagcctgaaaatatcccccagcccatcagcaatacatctagagccaacctgaataagctgctgaccgattacaccgaaatgaagaaggcgatcctgcatgtgtactgggaagagttccagaaggaccctgtgggcctgatgagccgggtggcccagcctgccagcaagaagatcgatcagaacaagctgaaacctgagatggacgagaagggcaacctgaccaccgccggctttgcctgctctcagtgtggccagcccctgttcgtgtacaagctggagcaggtgtctgagaagggcaaggcttacaccaactacttcggacggtgcaatgtggccgagcacgaaaagctgatcctgctggcccagctgaagcccgagaaggatagcgacgaagccgtgacatatagcctgggaaagtttgggcagagggccctggatttctacagcattcatgtgaccaaggagtccacccaccccgtgaagcccctggcccagatcgccggaaacagatacgcctccggacctgtgggaaaggccctgagcgacgcatgtatgggcacaatcgcctccttcctgtctaagtaccaggacatcatcatcgaacaccagaaggtggtgaagggcaaccagaagagactggagagcctgcgggagctggccggcaaggaaaacctggaataccctagcgtgaccctgccacctcagcctcacaccaaggagggcgttgatgcctacaacgaagtgatcgcccgggtgcgaatgtgggtgaacctgaacctgtggcagaagctgaagctaagcagagatgatgccaagcctctgctgagactgaagggattcccttcctttcctctggtcgagagacaggccaacgaagtggactggtgggacatggtgtgtaacgtgaagaagctgatcaacgagaaaaaggaggatggcaaggtgttttggcagaatctggctggctacaagagacaggaagccctgagaccatacctgagcagcgaggaagatcggaagaagggaaagaaattcgctcggtaccagctgggcgacctgctgctgcacctggaaaagaagcacggcgaggactggggaaaggtgtacgacgaggcctgggagcggattgacaagaaagtggaaggcctgagcaagcacatcaagctggaagaggaacggagaagcgaggacgcccagagcaaggccgccctgaccgactggctgcgggctaaggccagcttcgtgatcgagggcctgaaggaggccgacaaggacgagttctgcagatgcgagctgaagctgcagaagtggtacggggacctgcggggaaagcccttcgccatcgaagccgagaacagcatcctggacatcagcggcttcagcaagcagtacaactgtgccttcatctggcagaaggacggcgtgaagaagctgaacctgtacctgatcatcaactacttcaagggcggcaagctgcggttcaagaagatcaaacctgaagccttcgaagccaacagattctacaccgtgatcaacaaaaagagcggcgagatcgtgcccatggaggtgaacttcaacttcgacgaccccaacctgatcatcctgcctctggcctttggcaagagacagggcagagaattcatctggaacgacctgctgtccctggaaaccggcagcctgaagctggccaacggaagagtgatcgagaagacactgtacaacagaagaacccggcaggatgagcctgccctgttcgtggccctgaccttcgagcggcgggaggtcctggactcctccaatatcaaaccaatgaacctgatcggcgtggcaagaggcgaaaacatccccgccgtgatcgccctgaccgaccccgagggctgcccactgagccggtttaaggatagcctgggaaacccaacccacatcctgagaatcggcgagagctataaggagaagcagcggaccatccaggccaagaaggaggtggagcagcggagagccggcggctacagccggaagtacgccagcaaagccaagaatctggcagacgatatggtgagaaacaccgctagagatctgctgtactacgccgtgacccaggatgccatgctgatcttcgccaacctgagccggggcttcggccggcagggcaagcggaccttcatggccgagagacagtacacacggatggaggactggctgaccgccaagctggcctacgagggcctgagcaagacctacctgtccaagacactggcccagtacacctccaagacatgcagcaactgtgggtttaccatcaccagcgccgactacgacagggtgctggagaagctgaagaagacagcaacaggctggatgaccacaattaacggcaaggagctgaaggtggagggccagattacctactacaacagatacaagagacagaacgtagtcaaggacctgtccgtcgagctggatagactgagcgaagaatctgtgaacaacgacatctcctcctggacaaagggcagaagcggagaagctctgagcctcctgaagaaaagattctcccatagacccgtgcaggagaagttcgtgtgcctgaactgcggcttcgagacacacgcagccgagcaagccgccctgaacatcgccagatcctggctgttcctgcggagccaggagtacaagaaataccagacaaacaagacaaccggcaacaccgataagagagccttcgtcgagacctggcagtccttttaccggaagaagcttaaggaggtgtggaaacctgccgtgcggtctggcggatctggcggaggctccatggacgccgtgaccttcatggacgtgcacgtgaacttcagccaggaggagtgggccctgctgaaccccagccagaagagcctgtacaaggacgtgatgctggagacctactggaacctgacctgcatcggctacgagtgggaggaccacaacagcgaggagtgctgccagagcagcaggaggcacggcaggtacttcaacagcagccagtacagcacctgcaaggccaagggctacggcaagggcggcccaagcagcggcgcccctcctcccagcggcggcagcccagccggctccccaacctctaccgaggagggcacctctgagtccgccacccccgagagcggccctggcacctccaccgagcccagcgagggcagcgcacccggcagccctgccggcagccccacctccacagaggagggaaccagcaccgagcccagcgaaggcagcgccccaggcaccagcaccgagcctagtgagcaggagattaaacggatcaacaagatcagaagaagacttgtgaaagacagcaacaccaagaaggccggcaagacaggccccatgaaaaccctgctggttagagtgatgacacccgatctgagagagcggctggaaaacctgagaaagaagcctgaaaatatcccccagcccatcagcaatacatctagagccaacctgaataagctgctgaccgattacaccgaaatgaagaaggcgatcctgcatgtgtactgggaagagttccagaaggaccctgtgggcctgatgagccgggtggcccagcctgccagcaagaagatcgatcagaacaagctgaaacctgagatggacgagaagggcaacctgaccaccgccggctttgcctgctctcagtgtggccagcccctgttcgtgtacaagctggagcaggtgtctgagaagggcaaggcttacaccaactacttcggacggtgcaatgtggccgagcacgaaaagctgatcctgctggcccagctgaagcccgagaaggatagcgacgaagccgtgacatatagcctgggaaagtttgggcagagggccctggatttctacagcattcatgtgaccaaggagtccacccaccccgtgaagcccctggcccagatcgccggaaacagatacgcctccggacctgtgggaaaggccctgagcgacgcatgtatgggcacaatcgcctccttcctgtctaagtaccaggacatcatcatcgaacaccagaaggtggtgaagggcaaccagaagagactggagagcctgcgggagctggccggcaaggaaaacctggaataccctagcgtgaccctgccacctcagcctcacaccaaggagggcgttgatgcctacaacgaagtgatcgcccgggtgcgaatgtgggtgaacctgaacctgtggcagaagctgaagctaagcagagatgatgccaagcctctgctgagactgaagggattcccttcctttcctctggtcgagagacaggccaacgaagtggactggtgggacatggtgtgtaacgtgaagaagctgatcaacgagaaaaaggaggatggcaaggtgttttggcagaatctggctggctacaagagacaggaagccctgagaccatacctgagcagcgaggaagatcggaagaagggaaagaaattcgctcggtaccagctgggcgacctgctgctgcacctggaaaagaagcacggcgaggactggggaaaggtgtacgacgaggcctgggagcggattgacaagaaagtggaaggcctgagcaagcacatcaagctggaagaggaacggagaagcgaggacgcccagagcaaggccgccctgaccgactggctgcgggctaaggccagcttcgtgatcgagggcctgaaggaggccgacaaggacgagttctgcagatgcgagctgaagctgcagaagtggtacggggacctgcggggaaagcccttcgccatcgaagccgagaacagcatcctggacatcagcggcttcagcaagcagtacaactgtgccttcatctggcagaaggacggcgtgaagaagctgaacctgtacctgatcatcaactacttcaagggcggcaagctgcggttcaagaagatcaaacctgaagccttcgaagccaacagattctacaccgtgatcaacaaaaagagcggcgagatcgtgcccatggaggtgaacttcaacttcgacgaccccaacctgatcatcctgcctctggcctttggcaagagacagggcagagaattcatctggaacgacctgctgtccctggaaaccggcagcctgaagctggccaacggaagagtgatcgagaagacactgtacaacagaagaacccggcaggatgagcctgccctgttcgtggccctgaccttcgagcggcgggaggtcctggactcctccaatatcaaaccaatgaacctgatcggcgtggcaagaggcgaaaacatccccgccgtgatcgccctgaccgaccccgagggctgcccactgagccggtttaaggatagcctgggaaacccaacccacatcctgagaatcggcgagagctataaggagaagcagcggaccatccaggccaagaaggaggtggagcagcggagagccggcggctacagccggaagtacgccagcaaagccaagaatctggcagacgatatggtgagaaacaccgctagagatctgctgtactacgccgtgacccaggatgccatgctgatcttcgccaacctgagccggggcttcggccggcagggcaagcggaccttcatggccgagagacagtacacacggatggaggactggctgaccgccaagctggcctacgagggcctgagcaagacctacctgtccaagacactggcccagtacacctccaagacatgcagcaactgtgggtttaccatcaccagcgccgactacgacagggtgctggagaagctgaagaagacagcaacaggctggatgaccacaattaacggcaaggagctgaaggtggagggccagattacctactacaacagatacaagagacagaacgtagtcaaggacctgtccgtcgagctggatagactgagcgaagaatctgtgaacaacgacatctcctcctggacaaagggcagaagcggagaagctctgagcctcctgaagaaaagattctcccatagacccgtgcaggagaagttcgtgtgcctgaactgcggcttcgagacacacgcagccgagcaagccgccctgaacatcgccagatcctggctgttcctgcggagccaggagtacaagaaataccagacaaacaagacaaccggcaacaccgataagagagccttcgtcgagacctggcagtccttttaccggaagaagcttaaggaggtgtggaaacctgccgtgcggtctggcggatctggcggaggctcctatggacgccgtgaccttcatggacgtgcacgtgaacttcagccaggaggagtgggccctgctgaaccccagccagaagagcctgtacaaggacgtgatgctggagacctactggaacctgacctgcatcggctacgagtgggaggaccacaacagcgaggagtgctgccagagcagcaggaggcacggcaggtacttcaacagcagccagtacagcacctgcaaggccaagggctacggcaagggatctggctccggcagcggccccaagaaaaagagaaaagtctaagctgccttctgcggggcttgccttctggccatgcccttcttctctcccttgcacctgtacctcttggtctttgaataaagcctgagtaggaaggctagcaaaaaaaaaaaaaaaaaaaaaaaaaaaaaaaaaaaaaaaaaaaaaaaaaaaaaaaaaaaaaaaaaaaaaaaaaaaaaaaa

SEQ ID NO: 16764 - RNA, 9485 nt, synthetic construct
  source 1..9485: mol_type = other RNA
aggaaataagagagaaaagaagagtaagaagaaatataagagccaccatggcccctaagaagaagcgtaaagtgagccggatggaacgcctcgtctacgaggtgcggcagaagtgcagaaacatcgaggacatctgcatctcctgcggatctctgaacgtgaccctggagcacccactgttcatcggcggcatgtgccagaactgtaaaaactgttttctggagtgtgcctatcaatacgacgatgacggctaccagagctactgcaccatctgttgcggcggaagagaggtgctgatgtgtggaaataacaactgctgccggtgcttctgcgtggaatgcgtggacctgctggtgggccccggcgccgcccaggccgctattaaggaagatccttggaactgctacatgtgcggccacaagggcacatacggcctgctgagacggagagaggactggcctagcagactgcagatgttcttcgccaataaccacgaccaggagttcgacccccctaaggtgtaccctcccgtccccgccgagaagagaaagcccatccgggtcctgagcctgttcgatggcatcgccaccggtctgctggtgctgaaggacctgggcatccaggtggataggtacattgcctccgaggtgtgcgaggactccatcaccgtgggaatggtgcgtcatcagggcaagatcatgtacgtgggcgacgtgcggagcgtgacacagaagcatatccaggagtggggccctttcgacctggtgatcggcggcagcccttgcaatgacctgagcatcgtgaacccagcccggaagggcctgtacgagggaaccggcagactgttcttcgagttttacagactgctgcacgacgcccggcctaaggaaggcgacgaccggcccttcttttggctgttcgagaatgtggtggccatgggagtcagcgacaagcgggatattagccggttcctggagagcaaccccgtgatgatcgatgccaaggaagtgagcgccgcccaccgggccagatacttctggggcaatctgcctggcatgaacagacccctggccagcaccgtgaacgacaagctggagctgcaggagtgcctggagcacggccggatcgccaagttcagcaaggtgagaaccatcaccacccgaagcaacagcatcaaacaaggcaaggaccagcactttcctgtgttcatgaacgagaaggaggacatcctgtggtgtaccgagatggagagagtgttcgggttcccagtccactacacagatgtcagcaacatgtctagactggccagacagagactgctgggaagaagctggtccgtccctgtgatcagacacctgttcgcccctctgaaggagtacttcgcctgcgtgagcagcggcaacagcaacgccaacagccggggccccagcttctctagcggcctggtgccactgtccctgagagggagccacatgggccccatggagatctacaaaaccgtgagcgcctggaagcggcagcctgtgcgcgtgctgagcctgtttcggaatatcgataaagtcctgaaaagcctgggattcctggagagcggctctggctccggcggtggcaccctgaagtacgtggaggatgtgacaaacgtggtcagacgggatgtggagaagtggggccccttcgatctggtgtacggcagcacccaacccctgggcagctcttgtgaccggtgccctggctggtacatgtttcagttccaccggatcctgcagtacgccctgccgagacaggagtcccagcggccattcttttggattttcatggacaacttgctgctgaccgaggatgaccaggaaactaccactcggttcctgcagaccgaagccgtgaccctgcaggacgtgagaggccgggactaccagaacgccatgcgggtgtggtccaacatccctggactgaaaagcaagcacgcacctctgacccctaaagaagaggagtacctgcaggcccaggtgcggagcagaagcaagctggacgcccctaaggtggatctgctggtgaagaattgcctcctgcccctgagagagtacttcaagtatttcagccagaatagtctgcccctgggaggcagcggcggcggcgccctggtgacatttgaggacgtcgccgtgcggttcacccaggaggaatgggctctgctggatccttctcagaaaatcctgtaccgggacgtgatgagagagacataccggaatctgacctccgtgggcatcaactgggaatgttgggaccttgaagcctgcttcagaagcctgggaagaaacctgagagtgcaggtggtgaagagaaagtgcgagctgaccaacagcggcccctgcgccgagggcggcccaagcagcggcgcccctcctcccagcggcggcagcccagccggctccccaacctctaccgaggagggcacctctgagtccgccacccccgagagcggccctggcacctccaccgagcccagcgagggcagcgcacccggcagccctgccggcagccccacctccacagaggagggaaccagcaccgagcccagcgaaggcagcgccccaggcaccagcaccgagcctagtgagcaggagattaaacggatcaacaagatcagaagaagacttgtgaaagacagcaacaccaagaaggccggcaagacaggccccatgaaaaccctgctggttagagtgatgacacccgatctgagagagcggctggaaaacctgagaaagaagcctgaaaatatcccccagcccatcagcaatacatctagagccaacctgaataagctgctgaccgattacaccgaaatgaagaaggcgatcctgcatgtgtactgggaagagttccagaaggaccctgtgggcctgatgagccgggtggcccagcctgccagcaagaagatcgatcagaacaagctgaaacctgagatggacgagaagggcaacctgaccaccgccggctttgcctgctctcagtgtggccagcccctgttcgtgtacaagctggagcaggtgtctgagaagggcaaggcttacaccaactacttcggacggtgcaatgtggccgagcacgaaaagctgatcctgctggcccagctgaagcccgagaaggatagcgacgaagccgtgacatatagcctgggaaagtttgggcagagggccctggatttctacagcattcatgtgaccaaggagtccacccaccccgtgaagcccctggcccagatcgccggaaacagatacgcctccggacctgtgggaaaggccctgagcgacgcatgtatgggcacaatcgcctccttcctgtctaagtaccaggacatcatcatcgaacaccagaaggtggtgaagggcaaccagaagagactggagagcctgcgggagctggccggcaaggaaaacctggaataccctagcgtgaccctgccacctcagcctcacaccaaggagggcgttgatgcctacaacgaagtgatcgcccgggtgcgaatgtgggtgaacctgaacctgtggcagaagctgaagctaagcagagatgatgccaagcctctgctgagactgaagggattcccttcctttcctctggtcgagagacaggccaacgaagtggactggtgggacatggtgtgtaacgtgaagaagctgatcaacgagaaaaaggaggatggcaaggtgttttggcagaatctggctggctacaagagacaggaagccctgagaccatacctgagcagcgaggaagatcggaagaagggaaagaaattcgctcggtaccagctgggcgacctgctgctgcacctggaaaagaagcacggcgaggactggggaaaggtgtacgacgaggcctgggagcggattgacaagaaagtggaaggcctgagcaagcacatcaagctggaagaggaacggagaagcgaggacgcccagagcaaggccgccctgaccgactggctgcgggctaaggccagcttcgtgatcgagggcctgaaggaggccgacaaggacgagttctgcagatgcgagctgaagctgcagaagtggtacggggacctgcggggaaagcccttcgccatcgaagccgagaacagcatcctggacatcagcggcttcagcaagcagtacaactgtgccttcatctggcagaaggacggcgtgaagaagctgaacctgtacctgatcatcaactacttcaagggcggcaagctgcggttcaagaagatcaaacctgaagccttcgaagccaacagattctacaccgtgatcaacaaaaagagcggcgagatcgtgcccatggaggtgaacttcaacttcgacgaccccaacctgatcatcctgcctctggcctttggcaagagacagggcagagaattcatctggaacgacctgctgtccctggaaaccggcagcctgaagctggccaacggaagagtgatcgagaagacactgtacaacagaagaacccggcaggatgagcctgccctgttcgtggccctgaccttcgagcggcgggaggtcctggactcctccaatatcaaaccaatgaacctgatcggcgtggcaagaggcgaaaacatccccgccgtgatcgccctgaccgaccccgagggctgcccactgagccggtttaaggatagcctgggaaacccaacccacatcctgagaatcggcgagagctataaggagaagcagcggaccatccaggccaagaaggaggtggagcagcggagagccggcggctacagccggaagtacgccagcaaagccaagaatctggcagacgatatggtgagaaacaccgctagagatctgctgtactacgccgtgacccaggatgccatgctgatcttcgccaacctgagccggggcttcggccggcagggcaagcggaccttcatggccgagagacagtacacacggatggaggactggctgaccgccaagctggcctacgagggcctgagcaagacctacctgtccaagacactggcccagtacacctccaagacatgcagcaactgtgggtttaccatcaccagcgccgactacgacagggtgctggagaagctgaagaagacagcaacaggctggatgaccacaattaacggcaaggagctgaaggtggagggccagattacctactacaacagatacaagagacagaacgtagtcaaggacctgtccgtcgagctggatagactgagcgaagaatctgtgaacaacgacatctcctcctggacaaagggcagaagcggagaagctctgagcctcctgaagaaaagattctcccatagacccgtgcaggagaagttcgtgtgcctgaactgcggcttcgagacacacgcagccgagcaagccgccctgaacatcgccagatcctggctgttcctgcggagccaggagtacaagaaataccagacaaacaagacaaccggcaacaccgataagagagccttcgtcgagacctggcagtccttttaccggaagaagcttaaggaggtgtggaaacctgccgtgcggtctggcggatctggcggaggctccttccaggagagcgtgaccttcaaggacgtggccgtggacttcacccaggaggagtgggcccagctggaccccccccagaggaacctgtacagggacgtgatgctggagaactacgagcacttcgtgttcctgggcctgcccgtggccaagcccgaggtgatcagccagctggagaggggcgaggtgcccctgttccccgagcagcccgagttcagcaccagcatctgccccgacagcctgaacggcggcccaagcagcggcgcccctcctcccagcggcggcagcccagccggctccccaacctctaccgaggagggcacctctgagtccgccacccccgagagcggccctggcacctccaccgagcccagcgagggcagcgcacccggcagccctgccggcagccccacctccacagaggagggaaccagcaccgagcccagcgaaggcagcgccccaggcaccagcaccgagcctagtgagcaggagattaaacggatcaacaagatcagaagaagacttgtgaaagacagcaacaccaagaaggccggcaagacaggccccatgaaaaccctgctggttagagtgatgacacccgatctgagagagcggctggaaaacctgagaaagaagcctgaaaatatcccccagcccatcagcaatacatctagagccaacctgaataagctgctgaccgattacaccgaaatgaagaaggcgatcctgcatgtgtactgggaagagttccagaaggaccctgtgggcctgatgagccgggtggcccagcctgccagcaagaagatcgatcagaacaagctgaaacctgagatggacgagaagggcaacctgaccaccgccggctttgcctgctctcagtgtggccagcccctgttcgtgtacaagctggagcaggtgtctgagaagggcaaggcttacaccaactacttcggacggtgcaatgtggccgagcacgaaaagctgatcctgctggcccagctgaagcccgagaaggatagcgacgaagccgtgacatatagcctgggaaagtttgggcagagggccctggatttctacagcattcatgtgaccaaggagtccacccaccccgtgaagcccctggcccagatcgccggaaacagatacgcctccggacctgtgggaaaggccctgagcgacgcatgtatgggcacaatcgcctccttcctgtctaagtaccaggacatcatcatcgaacaccagaaggtggtgaagggcaaccagaagagactggagagcctgcgggagctggccggcaaggaaaacctggaataccctagcgtgaccctgccacctcagcctcacaccaaggagggcgttgatgcctacaacgaagtgatcgcccgggtgcgaatgtgggtgaacctgaacctgtggcagaagctgaagctaagcagagatgatgccaagcctctgctgagactgaagggattcccttcctttcctctggtcgagagacaggccaacgaagtggactggtgggacatggtgtgtaacgtgaagaagctgatcaacgagaaaaaggaggatggcaaggtgttttggcagaatctggctggctacaagagacaggaagccctgagaccatacctgagcagcgaggaagatcggaagaagggaaagaaattcgctcggtaccagctgggcgacctgctgctgcacctggaaaagaagcacggcgaggactggggaaaggtgtacgacgaggcctgggagcggattgacaagaaagtggaaggcctgagcaagcacatcaagctggaagaggaacggagaagcgaggacgcccagagcaaggccgccctgaccgactggctgcgggctaaggccagcttcgtgatcgagggcctgaaggaggccgacaaggacgagttctgcagatgcgagctgaagctgcagaagtggtacggggacctgcggggaaagcccttcgccatcgaagccgagaacagcatcctggacatcagcggcttcagcaagcagtacaactgtgccttcatctggcagaaggacggcgtgaagaagctgaacctgtacctgatcatcaactacttcaagggcggcaagctgcggttcaagaagatcaaacctgaagccttcgaagccaacagattctacaccgtgatcaacaaaaagagcggcgagatcgtgcccatggaggtgaacttcaacttcgacgaccccaacctgatcatcctgcctctggcctttggcaagagacagggcagagaattcatctggaacgacctgctgtccctggaaaccggcagcctgaagctggccaacggaagagtgatcgagaagacactgtacaacagaagaacccggcaggatgagcctgccctgttcgtggccctgaccttcgagcggcgggaggtcctggactcctccaatatcaaaccaatgaacctgatcggcgtggcaagaggcgaaaacatccccgccgtgatcgccctgaccgaccccgagggctgcccactgagccggtttaaggatagcctgggaaacccaacccacatcctgagaatcggcgagagctataaggagaagcagcggaccatccaggccaagaaggaggtggagcagcggagagccggcggctacagccggaagtacgccagcaaagccaagaatctggcagacgatatggtgagaaacaccgctagagatctgctgtactacgccgtgacccaggatgccatgctgatcttcgccaacctgagccggggcttcggccggcagggcaagcggaccttcatggccgagagacagtacacacggatggaggactggctgaccgccaagctggcctacgagggcctgagcaagacctacctgtccaagacactggcccagtacacctccaagacatgcagcaactgtgggtttaccatcaccagcgccgactacgacagggtgctggagaagctgaagaagacagcaacaggctggatgaccacaattaacggcaaggagctgaaggtggagggccagattacctactacaacagatacaagagacagaacgtagtcaaggacctgtccgtcgagctggatagactgagcgaagaatctgtgaacaacgacatctcctcctggacaaagggcagaagcggagaagctctgagcctcctgaagaaaagattctcccatagacccgtgcaggagaagttcgtgtgcctgaactgcggcttcgagacacacgcagccgagcaagccgccctgaacatcgccagatcctggctgttcctgcggagccaggagtacaagaaataccagacaaacaagacaaccggcaacaccgataagagagccttcgtcgagacctggcagtccttttaccggaagaagcttaaggaggtgtggaaacctgccgtgcggtctggcggatctggcggaggctcctttccaggagagcgtgaccttcaaggacgtggccgtggacttcacccaggaggagtgggcccagctggaccccccccagaggaacctgtacagggacgtgatgctggagaactacgagcacttcgtgttcctgggcctgcccgtggccaagcccgaggtgatcagccagctggagaggggcgaggtgcccctgttccccgagcagcccgagttcagcaccagcatctgccccgacagcctgaacggatctggctccggcagcggccccaagaaaaagagaaaagtctaagctgccttctgcggggcttgccttctggccatgcccttcttctctcccttgcacctgtacctcttggtctttgaataaagcctgagtaggaaggctagcaaaaaaaaaaaaaaaaaaaaaaaaaaaaaaaaaaaaaaaaaaaaaaaaaaaaaaaaaaaaaaaaaaaaaaaaaaaaaaaa

SEQ ID NO: 16765 - RNA, 9485 nt, synthetic construct
  source 1..9485: mol_type = other RNA
aggaaataagagagaaaagaagagtaagaagaaatataagagccaccatggcccctaagaagaagcgtaaagtgagccggatggaacgcctcgtctacgaggtgcggcagaagtgcagaaacatcgaggacatctgcatctcctgcggatctctgaacgtgaccctggagcacccactgttcatcggcggcatgtgccagaactgtaaaaactgttttctggagtgtgcctatcaatacgacgatgacggctaccagagctactgcaccatctgttgcggcggaagagaggtgctgatgtgtggaaataacaactgctgccggtgcttctgcgtggaatgcgtggacctgctggtgggccccggcgccgcccaggccgctattaaggaagatccttggaactgctacatgtgcggccacaagggcacatacggcctgctgagacggagagaggactggcctagcagactgcagatgttcttcgccaataaccacgaccaggagttcgacccccctaaggtgtaccctcccgtccccgccgagaagagaaagcccatccgggtcctgagcctgttcgatggcatcgccaccggtctgctggtgctgaaggacctgggcatccaggtggataggtacattgcctccgaggtgtgcgaggactccatcaccgtgggaatggtgcgtcatcagggcaagatcatgtacgtgggcgacgtgcggagcgtgacacagaagcatatccaggagtggggccctttcgacctggtgatcggcggcagcccttgcaatgacctgagcatcgtgaacccagcccggaagggcctgtacgagggaaccggcagactgttcttcgagttttacagactgctgcacgacgcccggcctaaggaaggcgacgaccggcccttcttttggctgttcgagaatgtggtggccatgggagtcagcgacaagcgggatattagccggttcctggagagcaaccccgtgatgatcgatgccaaggaagtgagcgccgcccaccgggccagatacttctggggcaatctgcctggcatgaacagacccctggccagcaccgtgaacgacaagctggagctgcaggagtgcctggagcacggccggatcgccaagttcagcaaggtgagaaccatcaccacccgaagcaacagcatcaaacaaggcaaggaccagcactttcctgtgttcatgaacgagaaggaggacatcctgtggtgtaccgagatggagagagtgttcgggttcccagtccactacacagatgtcagcaacatgtctagactggccagacagagactgctgggaagaagctggtccgtccctgtgatcagacacctgttcgcccctctgaaggagtacttcgcctgcgtgagcagcggcaacagcaacgccaacagccggggccccagcttctctagcggcctggtgccactgtccctgagagggagccacatgggccccatggagatctacaaaaccgtgagcgcctggaagcggcagcctgtgcgcgtgctgagcctgtttcggaatatcgataaagtcctgaaaagcctgggattcctggagagcggctctggctccggcggtggcaccctgaagtacgtggaggatgtgacaaacgtggtcagacgggatgtggagaagtggggccccttcgatctggtgtacggcagcacccaacccctgggcagctcttgtgaccggtgccctggctggtacatgtttcagttccaccggatcctgcagtacgccctgccgagacaggagtcccagcggccattcttttggattttcatggacaacttgctgctgaccgaggatgaccaggaaactaccactcggttcctgcagaccgaagccgtgaccctgcaggacgtgagaggccgggactaccagaacgccatgcgggtgtggtccaacatccctggactgaaaagcaagcacgcacctctgacccctaaagaagaggagtacctgcaggcccaggtgcggagcagaagcaagctggacgcccctaaggtggatctgctggtgaagaattgcctcctgcccctgagagagtacttcaagtatttcagccagaatagtctgcccctgggaggcagcggcggcggcgccctggtgacatttgaggacgtcgccgtgcggttcacccaggaggaatgggctctgctggatccttctcagaaaatcctgtaccgggacgtgatgagagagacataccggaatctgacctccgtgggcatcaactgggaatgttgggaccttgaagcctgcttcagaagcctgggaagaaacctgagagtgcaggtggtgaagagaaagtgcgagctgaccaacagcggcccctgcgccgagggcggcccaagcagcggcgcccctcctcccagcggcggcagcccagccggctccccaacctctaccgaggagggcacctctgagtccgccacccccgagagcggccctggcacctccaccgagcccagcgagggcagcgcacccggcagccctgccggcagccccacctccacagaggagggaaccagcaccgagcccagcgaaggcagcgccccaggcaccagcaccgagcctagtgagcaggagattaaacggatcaacaagatcagaagaagacttgtgaaagacagcaacaccaagaaggccggcaagacaggccccatgaaaaccctgctggttagagtgatgacacccgatctgagagagcggctggaaaacctgagaaagaagcctgaaaatatcccccagcccatcagcaatacatctagagccaacctgaataagctgctgaccgattacaccgaaatgaagaaggcgatcctgcatgtgtactgggaagagttccagaaggaccctgtgggcctgatgagccgggtggcccagcctgccagcaagaagatcgatcagaacaagctgaaacctgagatggacgagaagggcaacctgaccaccgccggctttgcctgctctcagtgtggccagcccctgttcgtgtacaagctggagcaggtgtctgagaagggcaaggcttacaccaactacttcggacggtgcaatgtggccgagcacgaaaagctgatcctgctggcccagctgaagcccgagaaggatagcgacgaagccgtgacatatagcctgggaaagtttgggcagagggccctggatttctacagcattcatgtgaccaaggagtccacccaccccgtgaagcccctggcccagatcgccggaaacagatacgcctccggacctgtgggaaaggccctgagcgacgcatgtatgggcacaatcgcctccttcctgtctaagtaccaggacatcatcatcgaacaccagaaggtggtgaagggcaaccagaagagactggagagcctgcgggagctggccggcaaggaaaacctggaataccctagcgtgaccctgccacctcagcctcacaccaaggagggcgttgatgcctacaacgaagtgatcgcccgggtgcgaatgtgggtgaacctgaacctgtggcagaagctgaagctaagcagagatgatgccaagcctctgctgagactgaagggattcccttcctttcctctggtcgagagacaggccaacgaagtggactggtgggacatggtgtgtaacgtgaagaagctgatcaacgagaaaaaggaggatggcaaggtgttttggcagaatctggctggctacaagagacaggaagccctgagaccatacctgagcagcgaggaagatcggaagaagggaaagaaattcgctcggtaccagctgggcgacctgctgctgcacctggaaaagaagcacggcgaggactggggaaaggtgtacgacgaggcctgggagcggattgacaagaaagtggaaggcctgagcaagcacatcaagctggaagaggaacggagaagcgaggacgcccagagcaaggccgccctgaccgactggctgcgggctaaggccagcttcgtgatcgagggcctgaaggaggccgacaaggacgagttctgcagatgcgagctgaagctgcagaagtggtacggggacctgcggggaaagcccttcgccatcgaagccgagaacagcatcctggacatcagcggcttcagcaagcagtacaactgtgccttcatctggcagaaggacggcgtgaagaagctgaacctgtacctgatcatcaactacttcaagggcggcaagctgcggttcaagaagatcaaacctgaagccttcgaagccaacagattctacaccgtgatcaacaaaaagagcggcgagatcgtgcccatggaggtgaacttcaacttcgacgaccccaacctgatcatcctgcctctggcctttggcaagagacagggcagagaattcatctggaacgacctgctgtccctggaaaccggcagcctgaagctggccaacggaagagtgatcgagaagacactgtacaacagaagaacccggcaggatgagcctgccctgttcgtggccctgaccttcgagcggcgggaggtcctggactcctccaatatcaaaccaatgaacctgatcggcgtggcaagaggcgaaaacatccccgccgtgatcgccctgaccgaccccgagggctgcccactgagccggtttaaggatagcctgggaaacccaacccacatcctgagaatcggcgagagctataaggagaagcagcggaccatccaggccaagaaggaggtggagcagcggagagccggcggctacagccggaagtacgccagcaaagccaagaatctggcagacgatatggtgagaaacaccgctagagatctgctgtactacgccgtgacccaggatgccatgctgatcttcgccaacctgagccggggcttcggccggcagggcaagcggaccttcatggccgagagacagtacacacggatggaggactggctgaccgccaagctggcctacgagggcctgagcaagacctacctgtccaagacactggcccagtacacctccaagacatgcagcaactgtgggtttaccatcaccagcgccgactacgacagggtgctggagaagctgaagaagacagcaacaggctggatgaccacaattaacggcaaggagctgaaggtggagggccagattacctactacaacagatacaagagacagaacgtagtcaaggacctgtccgtcgagctggatagactgagcgaagaatctgtgaacaacgacatctcctcctggacaaagggcagaagcggagaagctctgagcctcctgaagaaaagattctcccatagacccgtgcaggagaagttcgtgtgcctgaactgcggcttcgagacacacgcagccgagcaagccgccctgaacatcgccagatcctggctgttcctgcggagccaggagtacaagaaataccagacaaacaagacaaccggcaacaccgataagagagccttcgtcgagacctggcagtccttttaccggaagaagcttaaggaggtgtggaaacctgccgtgcggtctggcggatctggcggaggctccccccaggccagcgtgaccttcaaggacgtggccgtggacttcacctgggaggagtggaggctgctggaccccagccagaaggagctgttctgggaggtgatgctggagaactacaggaacctggtgtgcctgggcctggccgacagcaacaaggacgtgaggatcagcgagctggagagcggcgagccccactggatccccaccggcggcgtgctgaggagctgctggcccggctgggagagcggcggcccaagcagcggcgcccctcctcccagcggcggcagcccagccggctccccaacctctaccgaggagggcacctctgagtccgccacccccgagagcggccctggcacctccaccgagcccagcgagggcagcgcacccggcagccctgccggcagccccacctccacagaggagggaaccagcaccgagcccagcgaaggcagcgccccaggcaccagcaccgagcctagtgagcaggagattaaacggatcaacaagatcagaagaagacttgtgaaagacagcaacaccaagaaggccggcaagacaggccccatgaaaaccctgctggttagagtgatgacacccgatctgagagagcggctggaaaacctgagaaagaagcctgaaaatatcccccagcccatcagcaatacatctagagccaacctgaataagctgctgaccgattacaccgaaatgaagaaggcgatcctgcatgtgtactgggaagagttccagaaggaccctgtgggcctgatgagccgggtggcccagcctgccagcaagaagatcgatcagaacaagctgaaacctgagatggacgagaagggcaacctgaccaccgccggctttgcctgctctcagtgtggccagcccctgttcgtgtacaagctggagcaggtgtctgagaagggcaaggcttacaccaactacttcggacggtgcaatgtggccgagcacgaaaagctgatcctgctggcccagctgaagcccgagaaggatagcgacgaagccgtgacatatagcctgggaaagtttgggcagagggccctggatttctacagcattcatgtgaccaaggagtccacccaccccgtgaagcccctggcccagatcgccggaaacagatacgcctccggacctgtgggaaaggccctgagcgacgcatgtatgggcacaatcgcctccttcctgtctaagtaccaggacatcatcatcgaacaccagaaggtggtgaagggcaaccagaagagactggagagcctgcgggagctggccggcaaggaaaacctggaataccctagcgtgaccctgccacctcagcctcacaccaaggagggcgttgatgcctacaacgaagtgatcgcccgggtgcgaatgtgggtgaacctgaacctgtggcagaagctgaagctaagcagagatgatgccaagcctctgctgagactgaagggattcccttcctttcctctggtcgagagacaggccaacgaagtggactggtgggacatggtgtgtaacgtgaagaagctgatcaacgagaaaaaggaggatggcaaggtgttttggcagaatctggctggctacaagagacaggaagccctgagaccatacctgagcagcgaggaagatcggaagaagggaaagaaattcgctcggtaccagctgggcgacctgctgctgcacctggaaaagaagcacggcgaggactggggaaaggtgtacgacgaggcctgggagcggattgacaagaaagtggaaggcctgagcaagcacatcaagctggaagaggaacggagaagcgaggacgcccagagcaaggccgccctgaccgactggctgcgggctaaggccagcttcgtgatcgagggcctgaaggaggccgacaaggacgagttctgcagatgcgagctgaagctgcagaagtggtacggggacctgcggggaaagcccttcgccatcgaagccgagaacagcatcctggacatcagcggcttcagcaagcagtacaactgtgccttcatctggcagaaggacggcgtgaagaagctgaacctgtacctgatcatcaactacttcaagggcggcaagctgcggttcaagaagatcaaacctgaagccttcgaagccaacagattctacaccgtgatcaacaaaaagagcggcgagatcgtgcccatggaggtgaacttcaacttcgacgaccccaacctgatcatcctgcctctggcctttggcaagagacagggcagagaattcatctggaacgacctgctgtccctggaaaccggcagcctgaagctggccaacggaagagtgatcgagaagacactgtacaacagaagaacccggcaggatgagcctgccctgttcgtggccctgaccttcgagcggcgggaggtcctggactcctccaatatcaaaccaatgaacctgatcggcgtggcaagaggcgaaaacatccccgccgtgatcgccctgaccgaccccgagggctgcccactgagccggtttaaggatagcctgggaaacccaacccacatcctgagaatcggcgagagctataaggagaagcagcggaccatccaggccaagaaggaggtggagcagcggagagccggcggctacagccggaagtacgccagcaaagccaagaatctggcagacgatatggtgagaaacaccgctagagatctgctgtactacgccgtgacccaggatgccatgctgatcttcgccaacctgagccggggcttcggccggcagggcaagcggaccttcatggccgagagacagtacacacggatggaggactggctgaccgccaagctggcctacgagggcctgagcaagacctacctgtccaagacactggcccagtacacctccaagacatgcagcaactgtgggtttaccatcaccagcgccgactacgacagggtgctggagaagctgaagaagacagcaacaggctggatgaccacaattaacggcaaggagctgaaggtggagggccagattacctactacaacagatacaagagacagaacgtagtcaaggacctgtccgtcgagctggatagactgagcgaagaatctgtgaacaacgacatctcctcctggacaaagggcagaagcggagaagctctgagcctcctgaagaaaagattctcccatagacccgtgcaggagaagttcgtgtgcctgaactgcggcttcgagacacacgcagccgagcaagccgccctgaacatcgccagatcctggctgttcctgcggagccaggagtacaagaaataccagacaaacaagacaaccggcaacaccgataagagagccttcgtcgagacctggcagtccttttaccggaagaagcttaaggaggtgtggaaacctgccgtgcggtctggcggatctggcggaggctcctccccaggccagcgtgaccttcaaggacgtggccgtggacttcacctgggaggagtggaggctgctggaccccagccagaaggagctgttctgggaggtgatgctggagaactacaggaacctggtgtgcctgggcctggccgacagcaacaaggacgtgaggatcagcgagctggagagcggcgagccccactggatccccaccggcggcgtgctgaggagctgctggcccggctgggagagcggatctggctccggcagcggccccaagaaaaagagaaaagtctaagctgccttctgcggggcttgccttctggccatgcccttcttctctcccttgcacctgtacctcttggtctttgaataaagcctgagtaggaaggctagcaaaaaaaaaaaaaaaaaaaaaaaaaaaaaaaaaaaaaaaaaaaaaaaaaaaaaaaaaaaaaaaaaaaaaaaaaaaaaaaa

SEQ ID NO: 16766 - RNA, 9485 nt, synthetic construct
  source 1..9485: mol_type = other RNA
aggaaataagagagaaaagaagagtaagaagaaatataagagccaccatggcccctaagaagaagcgtaaagtgagccggatggaacgcctcgtctacgaggtgcggcagaagtgcagaaacatcgaggacatctgcatctcctgcggatctctgaacgtgaccctggagcacccactgttcatcggcggcatgtgccagaactgtaaaaactgttttctggagtgtgcctatcaatacgacgatgacggctaccagagctactgcaccatctgttgcggcggaagagaggtgctgatgtgtggaaataacaactgctgccggtgcttctgcgtggaatgcgtggacctgctggtgggccccggcgccgcccaggccgctattaaggaagatccttggaactgctacatgtgcggccacaagggcacatacggcctgctgagacggagagaggactggcctagcagactgcagatgttcttcgccaataaccacgaccaggagttcgacccccctaaggtgtaccctcccgtccccgccgagaagagaaagcccatccgggtcctgagcctgttcgatggcatcgccaccggtctgctggtgctgaaggacctgggcatccaggtggataggtacattgcctccgaggtgtgcgaggactccatcaccgtgggaatggtgcgtcatcagggcaagatcatgtacgtgggcgacgtgcggagcgtgacacagaagcatatccaggagtggggccctttcgacctggtgatcggcggcagcccttgcaatgacctgagcatcgtgaacccagcccggaagggcctgtacgagggaaccggcagactgttcttcgagttttacagactgctgcacgacgcccggcctaaggaaggcgacgaccggcccttcttttggctgttcgagaatgtggtggccatgggagtcagcgacaagcgggatattagccggttcctggagagcaaccccgtgatgatcgatgccaaggaagtgagcgccgcccaccgggccagatacttctggggcaatctgcctggcatgaacagacccctggccagcaccgtgaacgacaagctggagctgcaggagtgcctggagcacggccggatcgccaagttcagcaaggtgagaaccatcaccacccgaagcaacagcatcaaacaaggcaaggaccagcactttcctgtgttcatgaacgagaaggaggacatcctgtggtgtaccgagatggagagagtgttcgggttcccagtccactacacagatgtcagcaacatgtctagactggccagacagagactgctgggaagaagctggtccgtccctgtgatcagacacctgttcgcccctctgaaggagtacttcgcctgcgtgagcagcggcaacagcaacgccaacagccggggccccagcttctctagcggcctggtgccactgtccctgagagggagccacatgggccccatggagatctacaaaaccgtgagcgcctggaagcggcagcctgtgcgcgtgctgagcctgtttcggaatatcgataaagtcctgaaaagcctgggattcctggagagcggctctggctccggcggtggcaccctgaagtacgtggaggatgtgacaaacgtggtcagacgggatgtggagaagtggggccccttcgatctggtgtacggcagcacccaacccctgggcagctcttgtgaccggtgccctggctggtacatgtttcagttccaccggatcctgcagtacgccctgccgagacaggagtcccagcggccattcttttggattttcatggacaacttgctgctgaccgaggatgaccaggaaactaccactcggttcctgcagaccgaagccgtgaccctgcaggacgtgagaggccgggactaccagaacgccatgcgggtgtggtccaacatccctggactgaaaagcaagcacgcacctctgacccctaaagaagaggagtacctgcaggcccaggtgcggagcagaagcaagctggacgcccctaaggtggatctgctggtgaagaattgcctcctgcccctgagagagtacttcaagtatttcagccagaatagtctgcccctgggaggcagcggcggcggcgccctggtgacatttgaggacgtcgccgtgcggttcacccaggaggaatgggctctgctggatccttctcagaaaatcctgtaccgggacgtgatgagagagacataccggaatctgacctccgtgggcatcaactgggaatgttgggaccttgaagcctgcttcagaagcctgggaagaaacctgagagtgcaggtggtgaagagaaagtgcgagctgaccaacagcggcccctgcgccgagggcggcccaagcagcggcgcccctcctcccagcggcggcagcccagccggctccccaacctctaccgaggagggcacctctgagtccgccacccccgagagcggccctggcacctccaccgagcccagcgagggcagcgcacccggcagccctgccggcagccccacctccacagaggagggaaccagcaccgagcccagcgaaggcagcgccccaggcaccagcaccgagcctagtgagcaggagattaaacggatcaacaagatcagaagaagacttgtgaaagacagcaacaccaagaaggccggcaagacaggccccatgaaaaccctgctggttagagtgatgacacccgatctgagagagcggctggaaaacctgagaaagaagcctgaaaatatcccccagcccatcagcaatacatctagagccaacctgaataagctgctgaccgattacaccgaaatgaagaaggcgatcctgcatgtgtactgggaagagttccagaaggaccctgtgggcctgatgagccgggtggcccagcctgccagcaagaagatcgatcagaacaagctgaaacctgagatggacgagaagggcaacctgaccaccgccggctttgcctgctctcagtgtggccagcccctgttcgtgtacaagctggagcaggtgtctgagaagggcaaggcttacaccaactacttcggacggtgcaatgtggccgagcacgaaaagctgatcctgctggcccagctgaagcccgagaaggatagcgacgaagccgtgacatatagcctgggaaagtttgggcagagggccctggatttctacagcattcatgtgaccaaggagtccacccaccccgtgaagcccctggcccagatcgccggaaacagatacgcctccggacctgtgggaaaggccctgagcgacgcatgtatgggcacaatcgcctccttcctgtctaagtaccaggacatcatcatcgaacaccagaaggtggtgaagggcaaccagaagagactggagagcctgcgggagctggccggcaaggaaaacctggaataccctagcgtgaccctgccacctcagcctcacaccaaggagggcgttgatgcctacaacgaagtgatcgcccgggtgcgaatgtgggtgaacctgaacctgtggcagaagctgaagctaagcagagatgatgccaagcctctgctgagactgaagggattcccttcctttcctctggtcgagagacaggccaacgaagtggactggtgggacatggtgtgtaacgtgaagaagctgatcaacgagaaaaaggaggatggcaaggtgttttggcagaatctggctggctacaagagacaggaagccctgagaccatacctgagcagcgaggaagatcggaagaagggaaagaaattcgctcggtaccagctgggcgacctgctgctgcacctggaaaagaagcacggcgaggactggggaaaggtgtacgacgaggcctgggagcggattgacaagaaagtggaaggcctgagcaagcacatcaagctggaagaggaacggagaagcgaggacgcccagagcaaggccgccctgaccgactggctgcgggctaaggccagcttcgtgatcgagggcctgaaggaggccgacaaggacgagttctgcagatgcgagctgaagctgcagaagtggtacggggacctgcggggaaagcccttcgccatcgaagccgagaacagcatcctggacatcagcggcttcagcaagcagtacaactgtgccttcatctggcagaaggacggcgtgaagaagctgaacctgtacctgatcatcaactacttcaagggcggcaagctgcggttcaagaagatcaaacctgaagccttcgaagccaacagattctacaccgtgatcaacaaaaagagcggcgagatcgtgcccatggaggtgaacttcaacttcgacgaccccaacctgatcatcctgcctctggcctttggcaagagacagggcagagaattcatctggaacgacctgctgtccctggaaaccggcagcctgaagctggccaacggaagagtgatcgagaagacactgtacaacagaagaacccggcaggatgagcctgccctgttcgtggccctgaccttcgagcggcgggaggtcctggactcctccaatatcaaaccaatgaacctgatcggcgtggcaagaggcgaaaacatccccgccgtgatcgccctgaccgaccccgagggctgcccactgagccggtttaaggatagcctgggaaacccaacccacatcctgagaatcggcgagagctataaggagaagcagcggaccatccaggccaagaaggaggtggagcagcggagagccggcggctacagccggaagtacgccagcaaagccaagaatctggcagacgatatggtgagaaacaccgctagagatctgctgtactacgccgtgacccaggatgccatgctgatcttcgccaacctgagccggggcttcggccggcagggcaagcggaccttcatggccgagagacagtacacacggatggaggactggctgaccgccaagctggcctacgagggcctgagcaagacctacctgtccaagacactggcccagtacacctccaagacatgcagcaactgtgggtttaccatcaccagcgccgactacgacagggtgctggagaagctgaagaagacagcaacaggctggatgaccacaattaacggcaaggagctgaaggtggagggccagattacctactacaacagatacaagagacagaacgtagtcaaggacctgtccgtcgagctggatagactgagcgaagaatctgtgaacaacgacatctcctcctggacaaagggcagaagcggagaagctctgagcctcctgaagaaaagattctcccatagacccgtgcaggagaagttcgtgtgcctgaactgcggcttcgagacacacgcagccgagcaagccgccctgaacatcgccagatcctggctgttcctgcggagccaggagtacaagaaataccagacaaacaagacaaccggcaacaccgataagagagccttcgtcgagacctggcagtccttttaccggaagaagcttaaggaggtgtggaaacctgccgtgcggtctggcggatctggcggaggctccagcaaggacctggtgaccttcggcgacgtggccgtgaacttcagccaggaggagtgggagtggctgaaccccgcccagaggaacctgtacaggagggtgatgctggagaactacaggagcctggtgagcctgggcgtgagcgtgagcaagcccgacgtgatcagcctgctggagcagggcaaggagccctggatggtgaagaaggagggcaccaggggcgcctgccccgactgggagtacgtgggcggcccaagcagcggcgcccctcctcccagcggcggcagcccagccggctccccaacctctaccgaggagggcacctctgagtccgccacccccgagagcggccctggcacctccaccgagcccagcgagggcagcgcacccggcagccctgccggcagccccacctccacagaggagggaaccagcaccgagcccagcgaaggcagcgccccaggcaccagcaccgagcctagtgagcaggagattaaacggatcaacaagatcagaagaagacttgtgaaagacagcaacaccaagaaggccggcaagacaggccccatgaaaaccctgctggttagagtgatgacacccgatctgagagagcggctggaaaacctgagaaagaagcctgaaaatatcccccagcccatcagcaatacatctagagccaacctgaataagctgctgaccgattacaccgaaatgaagaaggcgatcctgcatgtgtactgggaagagttccagaaggaccctgtgggcctgatgagccgggtggcccagcctgccagcaagaagatcgatcagaacaagctgaaacctgagatggacgagaagggcaacctgaccaccgccggctttgcctgctctcagtgtggccagcccctgttcgtgtacaagctggagcaggtgtctgagaagggcaaggcttacaccaactacttcggacggtgcaatgtggccgagcacgaaaagctgatcctgctggcccagctgaagcccgagaaggatagcgacgaagccgtgacatatagcctgggaaagtttgggcagagggccctggatttctacagcattcatgtgaccaaggagtccacccaccccgtgaagcccctggcccagatcgccggaaacagatacgcctccggacctgtgggaaaggccctgagcgacgcatgtatgggcacaatcgcctccttcctgtctaagtaccaggacatcatcatcgaacaccagaaggtggtgaagggcaaccagaagagactggagagcctgcgggagctggccggcaaggaaaacctggaataccctagcgtgaccctgccacctcagcctcacaccaaggagggcgttgatgcctacaacgaagtgatcgcccgggtgcgaatgtgggtgaacctgaacctgtggcagaagctgaagctaagcagagatgatgccaagcctctgctgagactgaagggattcccttcctttcctctggtcgagagacaggccaacgaagtggactggtgggacatggtgtgtaacgtgaagaagctgatcaacgagaaaaaggaggatggcaaggtgttttggcagaatctggctggctacaagagacaggaagccctgagaccatacctgagcagcgaggaagatcggaagaagggaaagaaattcgctcggtaccagctgggcgacctgctgctgcacctggaaaagaagcacggcgaggactggggaaaggtgtacgacgaggcctgggagcggattgacaagaaagtggaaggcctgagcaagcacatcaagctggaagaggaacggagaagcgaggacgcccagagcaaggccgccctgaccgactggctgcgggctaaggccagcttcgtgatcgagggcctgaaggaggccgacaaggacgagttctgcagatgcgagctgaagctgcagaagtggtacggggacctgcggggaaagcccttcgccatcgaagccgagaacagcatcctggacatcagcggcttcagcaagcagtacaactgtgccttcatctggcagaaggacggcgtgaagaagctgaacctgtacctgatcatcaactacttcaagggcggcaagctgcggttcaagaagatcaaacctgaagccttcgaagccaacagattctacaccgtgatcaacaaaaagagcggcgagatcgtgcccatggaggtgaacttcaacttcgacgaccccaacctgatcatcctgcctctggcctttggcaagagacagggcagagaattcatctggaacgacctgctgtccctggaaaccggcagcctgaagctggccaacggaagagtgatcgagaagacactgtacaacagaagaacccggcaggatgagcctgccctgttcgtggccctgaccttcgagcggcgggaggtcctggactcctccaatatcaaaccaatgaacctgatcggcgtggcaagaggcgaaaacatccccgccgtgatcgccctgaccgaccccgagggctgcccactgagccggtttaaggatagcctgggaaacccaacccacatcctgagaatcggcgagagctataaggagaagcagcggaccatccaggccaagaaggaggtggagcagcggagagccggcggctacagccggaagtacgccagcaaagccaagaatctggcagacgatatggtgagaaacaccgctagagatctgctgtactacgccgtgacccaggatgccatgctgatcttcgccaacctgagccggggcttcggccggcagggcaagcggaccttcatggccgagagacagtacacacggatggaggactggctgaccgccaagctggcctacgagggcctgagcaagacctacctgtccaagacactggcccagtacacctccaagacatgcagcaactgtgggtttaccatcaccagcgccgactacgacagggtgctggagaagctgaagaagacagcaacaggctggatgaccacaattaacggcaaggagctgaaggtggagggccagattacctactacaacagatacaagagacagaacgtagtcaaggacctgtccgtcgagctggatagactgagcgaagaatctgtgaacaacgacatctcctcctggacaaagggcagaagcggagaagctctgagcctcctgaagaaaagattctcccatagacccgtgcaggagaagttcgtgtgcctgaactgcggcttcgagacacacgcagccgagcaagccgccctgaacatcgccagatcctggctgttcctgcggagccaggagtacaagaaataccagacaaacaagacaaccggcaacaccgataagagagccttcgtcgagacctggcagtccttttaccggaagaagcttaaggaggtgtggaaacctgccgtgcggtctggcggatctggcggaggctcctagcaaggacctggtgaccttcggcgacgtggccgtgaacttcagccaggaggagtgggagtggctgaaccccgcccagaggaacctgtacaggagggtgatgctggagaactacaggagcctggtgagcctgggcgtgagcgtgagcaagcccgacgtgatcagcctgctggagcagggcaaggagccctggatggtgaagaaggagggcaccaggggcgcctgccccgactgggagtacgtgggatctggctccggcagcggccccaagaaaaagagaaaagtctaagctgccttctgcggggcttgccttctggccatgcccttcttctctcccttgcacctgtacctcttggtctttgaataaagcctgagtaggaaggctagcaaaaaaaaaaaaaaaaaaaaaaaaaaaaaaaaaaaaaaaaaaaaaaaaaaaaaaaaaaaaaaaaaaaaaaaaaaaaaaaa

SEQ ID NO: 16767 - RNA, 9485 nt, synthetic construct
  source 1..9485: mol_type = other RNA
aggaaataagagagaaaagaagagtaagaagaaatataagagccaccatggcccctaagaagaagcgtaaagtgagccggatggaacgcctcgtctacgaggtgcggcagaagtgcagaaacatcgaggacatctgcatctcctgcggatctctgaacgtgaccctggagcacccactgttcatcggcggcatgtgccagaactgtaaaaactgttttctggagtgtgcctatcaatacgacgatgacggctaccagagctactgcaccatctgttgcggcggaagagaggtgctgatgtgtggaaataacaactgctgccggtgcttctgcgtggaatgcgtggacctgctggtgggccccggcgccgcccaggccgctattaaggaagatccttggaactgctacatgtgcggccacaagggcacatacggcctgctgagacggagagaggactggcctagcagactgcagatgttcttcgccaataaccacgaccaggagttcgacccccctaaggtgtaccctcccgtccccgccgagaagagaaagcccatccgggtcctgagcctgttcgatggcatcgccaccggtctgctggtgctgaaggacctgggcatccaggtggataggtacattgcctccgaggtgtgcgaggactccatcaccgtgggaatggtgcgtcatcagggcaagatcatgtacgtgggcgacgtgcggagcgtgacacagaagcatatccaggagtggggccctttcgacctggtgatcggcggcagcccttgcaatgacctgagcatcgtgaacccagcccggaagggcctgtacgagggaaccggcagactgttcttcgagttttacagactgctgcacgacgcccggcctaaggaaggcgacgaccggcccttcttttggctgttcgagaatgtggtggccatgggagtcagcgacaagcgggatattagccggttcctggagagcaaccccgtgatgatcgatgccaaggaagtgagcgccgcccaccgggccagatacttctggggcaatctgcctggcatgaacagacccctggccagcaccgtgaacgacaagctggagctgcaggagtgcctggagcacggccggatcgccaagttcagcaaggtgagaaccatcaccacccgaagcaacagcatcaaacaaggcaaggaccagcactttcctgtgttcatgaacgagaaggaggacatcctgtggtgtaccgagatggagagagtgttcgggttcccagtccactacacagatgtcagcaacatgtctagactggccagacagagactgctgggaagaagctggtccgtccctgtgatcagacacctgttcgcccctctgaaggagtacttcgcctgcgtgagcagcggcaacagcaacgccaacagccggggccccagcttctctagcggcctggtgccactgtccctgagagggagccacatgggccccatggagatctacaaaaccgtgagcgcctggaagcggcagcctgtgcgcgtgctgagcctgtttcggaatatcgataaagtcctgaaaagcctgggattcctggagagcggctctggctccggcggtggcaccctgaagtacgtggaggatgtgacaaacgtggtcagacgggatgtggagaagtggggccccttcgatctggtgtacggcagcacccaacccctgggcagctcttgtgaccggtgccctggctggtacatgtttcagttccaccggatcctgcagtacgccctgccgagacaggagtcccagcggccattcttttggattttcatggacaacttgctgctgaccgaggatgaccaggaaactaccactcggttcctgcagaccgaagccgtgaccctgcaggacgtgagaggccgggactaccagaacgccatgcgggtgtggtccaacatccctggactgaaaagcaagcacgcacctctgacccctaaagaagaggagtacctgcaggcccaggtgcggagcagaagcaagctggacgcccctaaggtggatctgctggtgaagaattgcctcctgcccctgagagagtacttcaagtatttcagccagaatagtctgcccctgggaggcagcggcggcggcgccctggtgacatttgaggacgtcgccgtgcggttcacccaggaggaatgggctctgctggatccttctcagaaaatcctgtaccgggacgtgatgagagagacataccggaatctgacctccgtgggcatcaactgggaatgttgggaccttgaagcctgcttcagaagcctgggaagaaacctgagagtgcaggtggtgaagagaaagtgcgagctgaccaacagcggcccctgcgccgagggcggcccaagcagcggcgcccctcctcccagcggcggcagcccagccggctccccaacctctaccgaggagggcacctctgagtccgccacccccgagagcggccctggcacctccaccgagcccagcgagggcagcgcacccggcagccctgccggcagccccacctccacagaggagggaaccagcaccgagcccagcgaaggcagcgccccaggcaccagcaccgagcctagtgagcaggagattaaacggatcaacaagatcagaagaagacttgtgaaagacagcaacaccaagaaggccggcaagacaggccccatgaaaaccctgctggttagagtgatgacacccgatctgagagagcggctggaaaacctgagaaagaagcctgaaaatatcccccagcccatcagcaatacatctagagccaacctgaataagctgctgaccgattacaccgaaatgaagaaggcgatcctgcatgtgtactgggaagagttccagaaggaccctgtgggcctgatgagccgggtggcccagcctgccagcaagaagatcgatcagaacaagctgaaacctgagatggacgagaagggcaacctgaccaccgccggctttgcctgctctcagtgtggccagcccctgttcgtgtacaagctggagcaggtgtctgagaagggcaaggcttacaccaactacttcggacggtgcaatgtggccgagcacgaaaagctgatcctgctggcccagctgaagcccgagaaggatagcgacgaagccgtgacatatagcctgggaaagtttgggcagagggccctggatttctacagcattcatgtgaccaaggagtccacccaccccgtgaagcccctggcccagatcgccggaaacagatacgcctccggacctgtgggaaaggccctgagcgacgcatgtatgggcacaatcgcctccttcctgtctaagtaccaggacatcatcatcgaacaccagaaggtggtgaagggcaaccagaagagactggagagcctgcgggagctggccggcaaggaaaacctggaataccctagcgtgaccctgccacctcagcctcacaccaaggagggcgttgatgcctacaacgaagtgatcgcccgggtgcgaatgtgggtgaacctgaacctgtggcagaagctgaagctaagcagagatgatgccaagcctctgctgagactgaagggattcccttcctttcctctggtcgagagacaggccaacgaagtggactggtgggacatggtgtgtaacgtgaagaagctgatcaacgagaaaaaggaggatggcaaggtgttttggcagaatctggctggctacaagagacaggaagccctgagaccatacctgagcagcgaggaagatcggaagaagggaaagaaattcgctcggtaccagctgggcgacctgctgctgcacctggaaaagaagcacggcgaggactggggaaaggtgtacgacgaggcctgggagcggattgacaagaaagtggaaggcctgagcaagcacatcaagctggaagaggaacggagaagcgaggacgcccagagcaaggccgccctgaccgactggctgcgggctaaggccagcttcgtgatcgagggcctgaaggaggccgacaaggacgagttctgcagatgcgagctgaagctgcagaagtggtacggggacctgcggggaaagcccttcgccatcgaagccgagaacagcatcctggacatcagcggcttcagcaagcagtacaactgtgccttcatctggcagaaggacggcgtgaagaagctgaacctgtacctgatcatcaactacttcaagggcggcaagctgcggttcaagaagatcaaacctgaagccttcgaagccaacagattctacaccgtgatcaacaaaaagagcggcgagatcgtgcccatggaggtgaacttcaacttcgacgaccccaacctgatcatcctgcctctggcctttggcaagagacagggcagagaattcatctggaacgacctgctgtccctggaaaccggcagcctgaagctggccaacggaagagtgatcgagaagacactgtacaacagaagaacccggcaggatgagcctgccctgttcgtggccctgaccttcgagcggcgggaggtcctggactcctccaatatcaaaccaatgaacctgatcggcgtggcaagaggcgaaaacatccccgccgtgatcgccctgaccgaccccgagggctgcccactgagccggtttaaggatagcctgggaaacccaacccacatcctgagaatcggcgagagctataaggagaagcagcggaccatccaggccaagaaggaggtggagcagcggagagccggcggctacagccggaagtacgccagcaaagccaagaatctggcagacgatatggtgagaaacaccgctagagatctgctgtactacgccgtgacccaggatgccatgctgatcttcgccaacctgagccggggcttcggccggcagggcaagcggaccttcatggccgagagacagtacacacggatggaggactggctgaccgccaagctggcctacgagggcctgagcaagacctacctgtccaagacactggcccagtacacctccaagacatgcagcaactgtgggtttaccatcaccagcgccgactacgacagggtgctggagaagctgaagaagacagcaacaggctggatgaccacaattaacggcaaggagctgaaggtggagggccagattacctactacaacagatacaagagacagaacgtagtcaaggacctgtccgtcgagctggatagactgagcgaagaatctgtgaacaacgacatctcctcctggacaaagggcagaagcggagaagctctgagcctcctgaagaaaagattctcccatagacccgtgcaggagaagttcgtgtgcctgaactgcggcttcgagacacacgcagccgagcaagccgccctgaacatcgccagatcctggctgttcctgcggagccaggagtacaagaaataccagacaaacaagacaaccggcaacaccgataagagagccttcgtcgagacctggcagtccttttaccggaagaagcttaaggaggtgtggaaacctgccgtgcggtctggcggatctggcggaggctcccaggtgcccgtgaccttcgaggacatcaccgtgtacttcagcagggagcagtgggagtacctggacgagggccagaaggagctgtacagggaggtgatgaaggagaactacgagaccctgatcagcctgggcaccggccccgagggcttcaaccccgaggtgctggccaggatcaagctggaggaggagagccacgtgtgggaccccaaggagcccggccagaaggaggtgaccaggagctacggcggcccaagcagcggcgcccctcctcccagcggcggcagcccagccggctccccaacctctaccgaggagggcacctctgagtccgccacccccgagagcggccctggcacctccaccgagcccagcgagggcagcgcacccggcagccctgccggcagccccacctccacagaggagggaaccagcaccgagcccagcgaaggcagcgccccaggcaccagcaccgagcctagtgagcaggagattaaacggatcaacaagatcagaagaagacttgtgaaagacagcaacaccaagaaggccggcaagacaggccccatgaaaaccctgctggttagagtgatgacacccgatctgagagagcggctggaaaacctgagaaagaagcctgaaaatatcccccagcccatcagcaatacatctagagccaacctgaataagctgctgaccgattacaccgaaatgaagaaggcgatcctgcatgtgtactgggaagagttccagaaggaccctgtgggcctgatgagccgggtggcccagcctgccagcaagaagatcgatcagaacaagctgaaacctgagatggacgagaagggcaacctgaccaccgccggctttgcctgctctcagtgtggccagcccctgttcgtgtacaagctggagcaggtgtctgagaagggcaaggcttacaccaactacttcggacggtgcaatgtggccgagcacgaaaagctgatcctgctggcccagctgaagcccgagaaggatagcgacgaagccgtgacatatagcctgggaaagtttgggcagagggccctggatttctacagcattcatgtgaccaaggagtccacccaccccgtgaagcccctggcccagatcgccggaaacagatacgcctccggacctgtgggaaaggccctgagcgacgcatgtatgggcacaatcgcctccttcctgtctaagtaccaggacatcatcatcgaacaccagaaggtggtgaagggcaaccagaagagactggagagcctgcgggagctggccggcaaggaaaacctggaataccctagcgtgaccctgccacctcagcctcacaccaaggagggcgttgatgcctacaacgaagtgatcgcccgggtgcgaatgtgggtgaacctgaacctgtggcagaagctgaagctaagcagagatgatgccaagcctctgctgagactgaagggattcccttcctttcctctggtcgagagacaggccaacgaagtggactggtgggacatggtgtgtaacgtgaagaagctgatcaacgagaaaaaggaggatggcaaggtgttttggcagaatctggctggctacaagagacaggaagccctgagaccatacctgagcagcgaggaagatcggaagaagggaaagaaattcgctcggtaccagctgggcgacctgctgctgcacctggaaaagaagcacggcgaggactggggaaaggtgtacgacgaggcctgggagcggattgacaagaaagtggaaggcctgagcaagcacatcaagctggaagaggaacggagaagcgaggacgcccagagcaaggccgccctgaccgactggctgcgggctaaggccagcttcgtgatcgagggcctgaaggaggccgacaaggacgagttctgcagatgcgagctgaagctgcagaagtggtacggggacctgcggggaaagcccttcgccatcgaagccgagaacagcatcctggacatcagcggcttcagcaagcagtacaactgtgccttcatctggcagaaggacggcgtgaagaagctgaacctgtacctgatcatcaactacttcaagggcggcaagctgcggttcaagaagatcaaacctgaagccttcgaagccaacagattctacaccgtgatcaacaaaaagagcggcgagatcgtgcccatggaggtgaacttcaacttcgacgaccccaacctgatcatcctgcctctggcctttggcaagagacagggcagagaattcatctggaacgacctgctgtccctggaaaccggcagcctgaagctggccaacggaagagtgatcgagaagacactgtacaacagaagaacccggcaggatgagcctgccctgttcgtggccctgaccttcgagcggcgggaggtcctggactcctccaatatcaaaccaatgaacctgatcggcgtggcaagaggcgaaaacatccccgccgtgatcgccctgaccgaccccgagggctgcccactgagccggtttaaggatagcctgggaaacccaacccacatcctgagaatcggcgagagctataaggagaagcagcggaccatccaggccaagaaggaggtggagcagcggagagccggcggctacagccggaagtacgccagcaaagccaagaatctggcagacgatatggtgagaaacaccgctagagatctgctgtactacgccgtgacccaggatgccatgctgatcttcgccaacctgagccggggcttcggccggcagggcaagcggaccttcatggccgagagacagtacacacggatggaggactggctgaccgccaagctggcctacgagggcctgagcaagacctacctgtccaagacactggcccagtacacctccaagacatgcagcaactgtgggtttaccatcaccagcgccgactacgacagggtgctggagaagctgaagaagacagcaacaggctggatgaccacaattaacggcaaggagctgaaggtggagggccagattacctactacaacagatacaagagacagaacgtagtcaaggacctgtccgtcgagctggatagactgagcgaagaatctgtgaacaacgacatctcctcctggacaaagggcagaagcggagaagctctgagcctcctgaagaaaagattctcccatagacccgtgcaggagaagttcgtgtgcctgaactgcggcttcgagacacacgcagccgagcaagccgccctgaacatcgccagatcctggctgttcctgcggagccaggagtacaagaaataccagacaaacaagacaaccggcaacaccgataagagagccttcgtcgagacctggcagtccttttaccggaagaagcttaaggaggtgtggaaacctgccgtgcggtctggcggatctggcggaggctcctcaggtgcccgtgaccttcgaggacatcaccgtgtacttcagcagggagcagtgggagtacctggacgagggccagaaggagctgtacagggaggtgatgaaggagaactacgagaccctgatcagcctgggcaccggccccgagggcttcaaccccgaggtgctggccaggatcaagctggaggaggagagccacgtgtgggaccccaaggagcccggccagaaggaggtgaccaggagctacggatctggctccggcagcggccccaagaaaaagagaaaagtctaagctgccttctgcggggcttgccttctggccatgcccttcttctctcccttgcacctgtacctcttggtctttgaataaagcctgagtaggaaggctagcaaaaaaaaaaaaaaaaaaaaaaaaaaaaaaaaaaaaaaaaaaaaaaaaaaaaaaaaaaaaaaaaaaaaaaaaaaaaaaaa

SEQ ID NO: 16768 - RNA, 9485 nt, synthetic construct
  source 1..9485: mol_type = other RNA
aggaaataagagagaaaagaagagtaagaagaaatataagagccaccatggcccctaagaagaagcgtaaagtgagccggatggaacgcctcgtctacgaggtgcggcagaagtgcagaaacatcgaggacatctgcatctcctgcggatctctgaacgtgaccctggagcacccactgttcatcggcggcatgtgccagaactgtaaaaactgttttctggagtgtgcctatcaatacgacgatgacggctaccagagctactgcaccatctgttgcggcggaagagaggtgctgatgtgtggaaataacaactgctgccggtgcttctgcgtggaatgcgtggacctgctggtgggccccggcgccgcccaggccgctattaaggaagatccttggaactgctacatgtgcggccacaagggcacatacggcctgctgagacggagagaggactggcctagcagactgcagatgttcttcgccaataaccacgaccaggagttcgacccccctaaggtgtaccctcccgtccccgccgagaagagaaagcccatccgggtcctgagcctgttcgatggcatcgccaccggtctgctggtgctgaaggacctgggcatccaggtggataggtacattgcctccgaggtgtgcgaggactccatcaccgtgggaatggtgcgtcatcagggcaagatcatgtacgtgggcgacgtgcggagcgtgacacagaagcatatccaggagtggggccctttcgacctggtgatcggcggcagcccttgcaatgacctgagcatcgtgaacccagcccggaagggcctgtacgagggaaccggcagactgttcttcgagttttacagactgctgcacgacgcccggcctaaggaaggcgacgaccggcccttcttttggctgttcgagaatgtggtggccatgggagtcagcgacaagcgggatattagccggttcctggagagcaaccccgtgatgatcgatgccaaggaagtgagcgccgcccaccgggccagatacttctggggcaatctgcctggcatgaacagacccctggccagcaccgtgaacgacaagctggagctgcaggagtgcctggagcacggccggatcgccaagttcagcaaggtgagaaccatcaccacccgaagcaacagcatcaaacaaggcaaggaccagcactttcctgtgttcatgaacgagaaggaggacatcctgtggtgtaccgagatggagagagtgttcgggttcccagtccactacacagatgtcagcaacatgtctagactggccagacagagactgctgggaagaagctggtccgtccctgtgatcagacacctgttcgcccctctgaaggagtacttcgcctgcgtgagcagcggcaacagcaacgccaacagccggggccccagcttctctagcggcctggtgccactgtccctgagagggagccacatgggccccatggagatctacaaaaccgtgagcgcctggaagcggcagcctgtgcgcgtgctgagcctgtttcggaatatcgataaagtcctgaaaagcctgggattcctggagagcggctctggctccggcggtggcaccctgaagtacgtggaggatgtgacaaacgtggtcagacgggatgtggagaagtggggccccttcgatctggtgtacggcagcacccaacccctgggcagctcttgtgaccggtgccctggctggtacatgtttcagttccaccggatcctgcagtacgccctgccgagacaggagtcccagcggccattcttttggattttcatggacaacttgctgctgaccgaggatgaccaggaaactaccactcggttcctgcagaccgaagccgtgaccctgcaggacgtgagaggccgggactaccagaacgccatgcgggtgtggtccaacatccctggactgaaaagcaagcacgcacctctgacccctaaagaagaggagtacctgcaggcccaggtgcggagcagaagcaagctggacgcccctaaggtggatctgctggtgaagaattgcctcctgcccctgagagagtacttcaagtatttcagccagaatagtctgcccctgggaggcagcggcggcggcgccctggtgacatttgaggacgtcgccgtgcggttcacccaggaggaatgggctctgctggatccttctcagaaaatcctgtaccgggacgtgatgagagagacataccggaatctgacctccgtgggcatcaactgggaatgttgggaccttgaagcctgcttcagaagcctgggaagaaacctgagagtgcaggtggtgaagagaaagtgcgagctgaccaacagcggcccctgcgccgagggcggcccaagcagcggcgcccctcctcccagcggcggcagcccagccggctccccaacctctaccgaggagggcacctctgagtccgccacccccgagagcggccctggcacctccaccgagcccagcgagggcagcgcacccggcagccctgccggcagccccacctccacagaggagggaaccagcaccgagcccagcgaaggcagcgccccaggcaccagcaccgagcctagtgagcaggagattaaacggatcaacaagatcagaagaagacttgtgaaagacagcaacaccaagaaggccggcaagacaggccccatgaaaaccctgctggttagagtgatgacacccgatctgagagagcggctggaaaacctgagaaagaagcctgaaaatatcccccagcccatcagcaatacatctagagccaacctgaataagctgctgaccgattacaccgaaatgaagaaggcgatcctgcatgtgtactgggaagagttccagaaggaccctgtgggcctgatgagccgggtggcccagcctgccagcaagaagatcgatcagaacaagctgaaacctgagatggacgagaagggcaacctgaccaccgccggctttgcctgctctcagtgtggccagcccctgttcgtgtacaagctggagcaggtgtctgagaagggcaaggcttacaccaactacttcggacggtgcaatgtggccgagcacgaaaagctgatcctgctggcccagctgaagcccgagaaggatagcgacgaagccgtgacatatagcctgggaaagtttgggcagagggccctggatttctacagcattcatgtgaccaaggagtccacccaccccgtgaagcccctggcccagatcgccggaaacagatacgcctccggacctgtgggaaaggccctgagcgacgcatgtatgggcacaatcgcctccttcctgtctaagtaccaggacatcatcatcgaacaccagaaggtggtgaagggcaaccagaagagactggagagcctgcgggagctggccggcaaggaaaacctggaataccctagcgtgaccctgccacctcagcctcacaccaaggagggcgttgatgcctacaacgaagtgatcgcccgggtgcgaatgtgggtgaacctgaacctgtggcagaagctgaagctaagcagagatgatgccaagcctctgctgagactgaagggattcccttcctttcctctggtcgagagacaggccaacgaagtggactggtgggacatggtgtgtaacgtgaagaagctgatcaacgagaaaaaggaggatggcaaggtgttttggcagaatctggctggctacaagagacaggaagccctgagaccatacctgagcagcgaggaagatcggaagaagggaaagaaattcgctcggtaccagctgggcgacctgctgctgcacctggaaaagaagcacggcgaggactggggaaaggtgtacgacgaggcctgggagcggattgacaagaaagtggaaggcctgagcaagcacatcaagctggaagaggaacggagaagcgaggacgcccagagcaaggccgccctgaccgactggctgcgggctaaggccagcttcgtgatcgagggcctgaaggaggccgacaaggacgagttctgcagatgcgagctgaagctgcagaagtggtacggggacctgcggggaaagcccttcgccatcgaagccgagaacagcatcctggacatcagcggcttcagcaagcagtacaactgtgccttcatctggcagaaggacggcgtgaagaagctgaacctgtacctgatcatcaactacttcaagggcggcaagctgcggttcaagaagatcaaacctgaagccttcgaagccaacagattctacaccgtgatcaacaaaaagagcggcgagatcgtgcccatggaggtgaacttcaacttcgacgaccccaacctgatcatcctgcctctggcctttggcaagagacagggcagagaattcatctggaacgacctgctgtccctggaaaccggcagcctgaagctggccaacggaagagtgatcgagaagacactgtacaacagaagaacccggcaggatgagcctgccctgttcgtggccctgaccttcgagcggcgggaggtcctggactcctccaatatcaaaccaatgaacctgatcggcgtggcaagaggcgaaaacatccccgccgtgatcgccctgaccgaccccgagggctgcccactgagccggtttaaggatagcctgggaaacccaacccacatcctgagaatcggcgagagctataaggagaagcagcggaccatccaggccaagaaggaggtggagcagcggagagccggcggctacagccggaagtacgccagcaaagccaagaatctggcagacgatatggtgagaaacaccgctagagatctgctgtactacgccgtgacccaggatgccatgctgatcttcgccaacctgagccggggcttcggccggcagggcaagcggaccttcatggccgagagacagtacacacggatggaggactggctgaccgccaagctggcctacgagggcctgagcaagacctacctgtccaagacactggcccagtacacctccaagacatgcagcaactgtgggtttaccatcaccagcgccgactacgacagggtgctggagaagctgaagaagacagcaacaggctggatgaccacaattaacggcaaggagctgaaggtggagggccagattacctactacaacagatacaagagacagaacgtagtcaaggacctgtccgtcgagctggatagactgagcgaagaatctgtgaacaacgacatctcctcctggacaaagggcagaagcggagaagctctgagcctcctgaagaaaagattctcccatagacccgtgcaggagaagttcgtgtgcctgaactgcggcttcgagacacacgcagccgagcaagccgccctgaacatcgccagatcctggctgttcctgcggagccaggagtacaagaaataccagacaaacaagacaaccggcaacaccgataagagagccttcgtcgagacctggcagtccttttaccggaagaagcttaaggaggtgtggaaacctgccgtgcggtctggcggatctggcggaggctccttccagggcagcgtgatgttcagggacgtgagcatcaacttcagccaggaggagtgggagtgcctggaccccggccagatgaacctgtacaaggaggtgatgctggagaacttcagcaacctggtgagcgtgggcctgagcagcgccaagcccgtggtgatcagcctgctggaggagggcaaggagccctggatggtggagagggaggtgaagaggggcctgtgcagcgacctggagagcatgggcggcccaagcagcggcgcccctcctcccagcggcggcagcccagccggctccccaacctctaccgaggagggcacctctgagtccgccacccccgagagcggccctggcacctccaccgagcccagcgagggcagcgcacccggcagccctgccggcagccccacctccacagaggagggaaccagcaccgagcccagcgaaggcagcgccccaggcaccagcaccgagcctagtgagcaggagattaaacggatcaacaagatcagaagaagacttgtgaaagacagcaacaccaagaaggccggcaagacaggccccatgaaaaccctgctggttagagtgatgacacccgatctgagagagcggctggaaaacctgagaaagaagcctgaaaatatcccccagcccatcagcaatacatctagagccaacctgaataagctgctgaccgattacaccgaaatgaagaaggcgatcctgcatgtgtactgggaagagttccagaaggaccctgtgggcctgatgagccgggtggcccagcctgccagcaagaagatcgatcagaacaagctgaaacctgagatggacgagaagggcaacctgaccaccgccggctttgcctgctctcagtgtggccagcccctgttcgtgtacaagctggagcaggtgtctgagaagggcaaggcttacaccaactacttcggacggtgcaatgtggccgagcacgaaaagctgatcctgctggcccagctgaagcccgagaaggatagcgacgaagccgtgacatatagcctgggaaagtttgggcagagggccctggatttctacagcattcatgtgaccaaggagtccacccaccccgtgaagcccctggcccagatcgccggaaacagatacgcctccggacctgtgggaaaggccctgagcgacgcatgtatgggcacaatcgcctccttcctgtctaagtaccaggacatcatcatcgaacaccagaaggtggtgaagggcaaccagaagagactggagagcctgcgggagctggccggcaaggaaaacctggaataccctagcgtgaccctgccacctcagcctcacaccaaggagggcgttgatgcctacaacgaagtgatcgcccgggtgcgaatgtgggtgaacctgaacctgtggcagaagctgaagctaagcagagatgatgccaagcctctgctgagactgaagggattcccttcctttcctctggtcgagagacaggccaacgaagtggactggtgggacatggtgtgtaacgtgaagaagctgatcaacgagaaaaaggaggatggcaaggtgttttggcagaatctggctggctacaagagacaggaagccctgagaccatacctgagcagcgaggaagatcggaagaagggaaagaaattcgctcggtaccagctgggcgacctgctgctgcacctggaaaagaagcacggcgaggactggggaaaggtgtacgacgaggcctgggagcggattgacaagaaagtggaaggcctgagcaagcacatcaagctggaagaggaacggagaagcgaggacgcccagagcaaggccgccctgaccgactggctgcgggctaaggccagcttcgtgatcgagggcctgaaggaggccgacaaggacgagttctgcagatgcgagctgaagctgcagaagtggtacggggacctgcggggaaagcccttcgccatcgaagccgagaacagcatcctggacatcagcggcttcagcaagcagtacaactgtgccttcatctggcagaaggacggcgtgaagaagctgaacctgtacctgatcatcaactacttcaagggcggcaagctgcggttcaagaagatcaaacctgaagccttcgaagccaacagattctacaccgtgatcaacaaaaagagcggcgagatcgtgcccatggaggtgaacttcaacttcgacgaccccaacctgatcatcctgcctctggcctttggcaagagacagggcagagaattcatctggaacgacctgctgtccctggaaaccggcagcctgaagctggccaacggaagagtgatcgagaagacactgtacaacagaagaacccggcaggatgagcctgccctgttcgtggccctgaccttcgagcggcgggaggtcctggactcctccaatatcaaaccaatgaacctgatcggcgtggcaagaggcgaaaacatccccgccgtgatcgccctgaccgaccccgagggctgcccactgagccggtttaaggatagcctgggaaacccaacccacatcctgagaatcggcgagagctataaggagaagcagcggaccatccaggccaagaaggaggtggagcagcggagagccggcggctacagccggaagtacgccagcaaagccaagaatctggcagacgatatggtgagaaacaccgctagagatctgctgtactacgccgtgacccaggatgccatgctgatcttcgccaacctgagccggggcttcggccggcagggcaagcggaccttcatggccgagagacagtacacacggatggaggactggctgaccgccaagctggcctacgagggcctgagcaagacctacctgtccaagacactggcccagtacacctccaagacatgcagcaactgtgggtttaccatcaccagcgccgactacgacagggtgctggagaagctgaagaagacagcaacaggctggatgaccacaattaacggcaaggagctgaaggtggagggccagattacctactacaacagatacaagagacagaacgtagtcaaggacctgtccgtcgagctggatagactgagcgaagaatctgtgaacaacgacatctcctcctggacaaagggcagaagcggagaagctctgagcctcctgaagaaaagattctcccatagacccgtgcaggagaagttcgtgtgcctgaactgcggcttcgagacacacgcagccgagcaagccgccctgaacatcgccagatcctggctgttcctgcggagccaggagtacaagaaataccagacaaacaagacaaccggcaacaccgataagagagccttcgtcgagacctggcagtccttttaccggaagaagcttaaggaggtgtggaaacctgccgtgcggtctggcggatctggcggaggctcctttccagggcagcgtgatgttcagggacgtgagcatcaacttcagccaggaggagtgggagtgcctggaccccggccagatgaacctgtacaaggaggtgatgctggagaacttcagcaacctggtgagcgtgggcctgagcagcgccaagcccgtggtgatcagcctgctggaggagggcaaggagccctggatggtggagagggaggtgaagaggggcctgtgcagcgacctggagagcatgggatctggctccggcagcggccccaagaaaaagagaaaagtctaagctgccttctgcggggcttgccttctggccatgcccttcttctctcccttgcacctgtacctcttggtctttgaataaagcctgagtaggaaggctagcaaaaaaaaaaaaaaaaaaaaaaaaaaaaaaaaaaaaaaaaaaaaaaaaaaaaaaaaaaaaaaaaaaaaaaaaaaaaaaaa

SEQ ID NO: 16769 - RNA, 9485 nt, synthetic construct
  source 1..9485: mol_type = other RNA
aggaaataagagagaaaagaagagtaagaagaaatataagagccaccatggcccctaagaagaagcgtaaagtgagccggatggaacgcctcgtctacgaggtgcggcagaagtgcagaaacatcgaggacatctgcatctcctgcggatctctgaacgtgaccctggagcacccactgttcatcggcggcatgtgccagaactgtaaaaactgttttctggagtgtgcctatcaatacgacgatgacggctaccagagctactgcaccatctgttgcggcggaagagaggtgctgatgtgtggaaataacaactgctgccggtgcttctgcgtggaatgcgtggacctgctggtgggccccggcgccgcccaggccgctattaaggaagatccttggaactgctacatgtgcggccacaagggcacatacggcctgctgagacggagagaggactggcctagcagactgcagatgttcttcgccaataaccacgaccaggagttcgacccccctaaggtgtaccctcccgtccccgccgagaagagaaagcccatccgggtcctgagcctgttcgatggcatcgccaccggtctgctggtgctgaaggacctgggcatccaggtggataggtacattgcctccgaggtgtgcgaggactccatcaccgtgggaatggtgcgtcatcagggcaagatcatgtacgtgggcgacgtgcggagcgtgacacagaagcatatccaggagtggggccctttcgacctggtgatcggcggcagcccttgcaatgacctgagcatcgtgaacccagcccggaagggcctgtacgagggaaccggcagactgttcttcgagttttacagactgctgcacgacgcccggcctaaggaaggcgacgaccggcccttcttttggctgttcgagaatgtggtggccatgggagtcagcgacaagcgggatattagccggttcctggagagcaaccccgtgatgatcgatgccaaggaagtgagcgccgcccaccgggccagatacttctggggcaatctgcctggcatgaacagacccctggccagcaccgtgaacgacaagctggagctgcaggagtgcctggagcacggccggatcgccaagttcagcaaggtgagaaccatcaccacccgaagcaacagcatcaaacaaggcaaggaccagcactttcctgtgttcatgaacgagaaggaggacatcctgtggtgtaccgagatggagagagtgttcgggttcccagtccactacacagatgtcagcaacatgtctagactggccagacagagactgctgggaagaagctggtccgtccctgtgatcagacacctgttcgcccctctgaaggagtacttcgcctgcgtgagcagcggcaacagcaacgccaacagccggggccccagcttctctagcggcctggtgccactgtccctgagagggagccacatgggccccatggagatctacaaaaccgtgagcgcctggaagcggcagcctgtgcgcgtgctgagcctgtttcggaatatcgataaagtcctgaaaagcctgggattcctggagagcggctctggctccggcggtggcaccctgaagtacgtggaggatgtgacaaacgtggtcagacgggatgtggagaagtggggccccttcgatctggtgtacggcagcacccaacccctgggcagctcttgtgaccggtgccctggctggtacatgtttcagttccaccggatcctgcagtacgccctgccgagacaggagtcccagcggccattcttttggattttcatggacaacttgctgctgaccgaggatgaccaggaaactaccactcggttcctgcagaccgaagccgtgaccctgcaggacgtgagaggccgggactaccagaacgccatgcgggtgtggtccaacatccctggactgaaaagcaagcacgcacctctgacccctaaagaagaggagtacctgcaggcccaggtgcggagcagaagcaagctggacgcccctaaggtggatctgctggtgaagaattgcctcctgcccctgagagagtacttcaagtatttcagccagaatagtctgcccctgggaggcagcggcggcggcgccctggtgacatttgaggacgtcgccgtgcggttcacccaggaggaatgggctctgctggatccttctcagaaaatcctgtaccgggacgtgatgagagagacataccggaatctgacctccgtgggcatcaactgggaatgttgggaccttgaagcctgcttcagaagcctgggaagaaacctgagagtgcaggtggtgaagagaaagtgcgagctgaccaacagcggcccctgcgccgagggcggcccaagcagcggcgcccctcctcccagcggcggcagcccagccggctccccaacctctaccgaggagggcacctctgagtccgccacccccgagagcggccctggcacctccaccgagcccagcgagggcagcgcacccggcagccctgccggcagccccacctccacagaggagggaaccagcaccgagcccagcgaaggcagcgccccaggcaccagcaccgagcctagtgagcaggagattaaacggatcaacaagatcagaagaagacttgtgaaagacagcaacaccaagaaggccggcaagacaggccccatgaaaaccctgctggttagagtgatgacacccgatctgagagagcggctggaaaacctgagaaagaagcctgaaaatatcccccagcccatcagcaatacatctagagccaacctgaataagctgctgaccgattacaccgaaatgaagaaggcgatcctgcatgtgtactgggaagagttccagaaggaccctgtgggcctgatgagccgggtggcccagcctgccagcaagaagatcgatcagaacaagctgaaacctgagatggacgagaagggcaacctgaccaccgccggctttgcctgctctcagtgtggccagcccctgttcgtgtacaagctggagcaggtgtctgagaagggcaaggcttacaccaactacttcggacggtgcaatgtggccgagcacgaaaagctgatcctgctggcccagctgaagcccgagaaggatagcgacgaagccgtgacatatagcctgggaaagtttgggcagagggccctggatttctacagcattcatgtgaccaaggagtccacccaccccgtgaagcccctggcccagatcgccggaaacagatacgcctccggacctgtgggaaaggccctgagcgacgcatgtatgggcacaatcgcctccttcctgtctaagtaccaggacatcatcatcgaacaccagaaggtggtgaagggcaaccagaagagactggagagcctgcgggagctggccggcaaggaaaacctggaataccctagcgtgaccctgccacctcagcctcacaccaaggagggcgttgatgcctacaacgaagtgatcgcccgggtgcgaatgtgggtgaacctgaacctgtggcagaagctgaagctaagcagagatgatgccaagcctctgctgagactgaagggattcccttcctttcctctggtcgagagacaggccaacgaagtggactggtgggacatggtgtgtaacgtgaagaagctgatcaacgagaaaaaggaggatggcaaggtgttttggcagaatctggctggctacaagagacaggaagccctgagaccatacctgagcagcgaggaagatcggaagaagggaaagaaattcgctcggtaccagctgggcgacctgctgctgcacctggaaaagaagcacggcgaggactggggaaaggtgtacgacgaggcctgggagcggattgacaagaaagtggaaggcctgagcaagcacatcaagctggaagaggaacggagaagcgaggacgcccagagcaaggccgccctgaccgactggctgcgggctaaggccagcttcgtgatcgagggcctgaaggaggccgacaaggacgagttctgcagatgcgagctgaagctgcagaagtggtacggggacctgcggggaaagcccttcgccatcgaagccgagaacagcatcctggacatcagcggcttcagcaagcagtacaactgtgccttcatctggcagaaggacggcgtgaagaagctgaacctgtacctgatcatcaactacttcaagggcggcaagctgcggttcaagaagatcaaacctgaagccttcgaagccaacagattctacaccgtgatcaacaaaaagagcggcgagatcgtgcccatggaggtgaacttcaacttcgacgaccccaacctgatcatcctgcctctggcctttggcaagagacagggcagagaattcatctggaacgacctgctgtccctggaaaccggcagcctgaagctggccaacggaagagtgatcgagaagacactgtacaacagaagaacccggcaggatgagcctgccctgttcgtggccctgaccttcgagcggcgggaggtcctggactcctccaatatcaaaccaatgaacctgatcggcgtggcaagaggcgaaaacatccccgccgtgatcgccctgaccgaccccgagggctgcccactgagccggtttaaggatagcctgggaaacccaacccacatcctgagaatcggcgagagctataaggagaagcagcggaccatccaggccaagaaggaggtggagcagcggagagccggcggctacagccggaagtacgccagcaaagccaagaatctggcagacgatatggtgagaaacaccgctagagatctgctgtactacgccgtgacccaggatgccatgctgatcttcgccaacctgagccggggcttcggccggcagggcaagcggaccttcatggccgagagacagtacacacggatggaggactggctgaccgccaagctggcctacgagggcctgagcaagacctacctgtccaagacactggcccagtacacctccaagacatgcagcaactgtgggtttaccatcaccagcgccgactacgacagggtgctggagaagctgaagaagacagcaacaggctggatgaccacaattaacggcaaggagctgaaggtggagggccagattacctactacaacagatacaagagacagaacgtagtcaaggacctgtccgtcgagctggatagactgagcgaagaatctgtgaacaacgacatctcctcctggacaaagggcagaagcggagaagctctgagcctcctgaagaaaagattctcccatagacccgtgcaggagaagttcgtgtgcctgaactgcggcttcgagacacacgcagccgagcaagccgccctgaacatcgccagatcctggctgttcctgcggagccaggagtacaagaaataccagacaaacaagacaaccggcaacaccgataagagagccttcgtcgagacctggcagtccttttaccggaagaagcttaaggaggtgtggaaacctgccgtgcggtctggcggatctggcggaggctccctgcagggcggcgtgaccttcgaggacgtggccgtggacttcacccaggaggagtggcagcagctgagccccgagcagaggggcctgtacagggacgtgaccctggagaactacaggaacctggccagcatgggcggcgaggacttcgccaagcccgaggtgatcctgaggctggagaacggcgaggagccctggatggtggagacccaggtgctgaggagctgcggccccgccgagaaggacggcggcccaagcagcggcgcccctcctcccagcggcggcagcccagccggctccccaacctctaccgaggagggcacctctgagtccgccacccccgagagcggccctggcacctccaccgagcccagcgagggcagcgcacccggcagccctgccggcagccccacctccacagaggagggaaccagcaccgagcccagcgaaggcagcgccccaggcaccagcaccgagcctagtgagcaggagattaaacggatcaacaagatcagaagaagacttgtgaaagacagcaacaccaagaaggccggcaagacaggccccatgaaaaccctgctggttagagtgatgacacccgatctgagagagcggctggaaaacctgagaaagaagcctgaaaatatcccccagcccatcagcaatacatctagagccaacctgaataagctgctgaccgattacaccgaaatgaagaaggcgatcctgcatgtgtactgggaagagttccagaaggaccctgtgggcctgatgagccgggtggcccagcctgccagcaagaagatcgatcagaacaagctgaaacctgagatggacgagaagggcaacctgaccaccgccggctttgcctgctctcagtgtggccagcccctgttcgtgtacaagctggagcaggtgtctgagaagggcaaggcttacaccaactacttcggacggtgcaatgtggccgagcacgaaaagctgatcctgctggcccagctgaagcccgagaaggatagcgacgaagccgtgacatatagcctgggaaagtttgggcagagggccctggatttctacagcattcatgtgaccaaggagtccacccaccccgtgaagcccctggcccagatcgccggaaacagatacgcctccggacctgtgggaaaggccctgagcgacgcatgtatgggcacaatcgcctccttcctgtctaagtaccaggacatcatcatcgaacaccagaaggtggtgaagggcaaccagaagagactggagagcctgcgggagctggccggcaaggaaaacctggaataccctagcgtgaccctgccacctcagcctcacaccaaggagggcgttgatgcctacaacgaagtgatcgcccgggtgcgaatgtgggtgaacctgaacctgtggcagaagctgaagctaagcagagatgatgccaagcctctgctgagactgaagggattcccttcctttcctctggtcgagagacaggccaacgaagtggactggtgggacatggtgtgtaacgtgaagaagctgatcaacgagaaaaaggaggatggcaaggtgttttggcagaatctggctggctacaagagacaggaagccctgagaccatacctgagcagcgaggaagatcggaagaagggaaagaaattcgctcggtaccagctgggcgacctgctgctgcacctggaaaagaagcacggcgaggactggggaaaggtgtacgacgaggcctgggagcggattgacaagaaagtggaaggcctgagcaagcacatcaagctggaagaggaacggagaagcgaggacgcccagagcaaggccgccctgaccgactggctgcgggctaaggccagcttcgtgatcgagggcctgaaggaggccgacaaggacgagttctgcagatgcgagctgaagctgcagaagtggtacggggacctgcggggaaagcccttcgccatcgaagccgagaacagcatcctggacatcagcggcttcagcaagcagtacaactgtgccttcatctggcagaaggacggcgtgaagaagctgaacctgtacctgatcatcaactacttcaagggcggcaagctgcggttcaagaagatcaaacctgaagccttcgaagccaacagattctacaccgtgatcaacaaaaagagcggcgagatcgtgcccatggaggtgaacttcaacttcgacgaccccaacctgatcatcctgcctctggcctttggcaagagacagggcagagaattcatctggaacgacctgctgtccctggaaaccggcagcctgaagctggccaacggaagagtgatcgagaagacactgtacaacagaagaacccggcaggatgagcctgccctgttcgtggccctgaccttcgagcggcgggaggtcctggactcctccaatatcaaaccaatgaacctgatcggcgtggcaagaggcgaaaacatccccgccgtgatcgccctgaccgaccccgagggctgcccactgagccggtttaaggatagcctgggaaacccaacccacatcctgagaatcggcgagagctataaggagaagcagcggaccatccaggccaagaaggaggtggagcagcggagagccggcggctacagccggaagtacgccagcaaagccaagaatctggcagacgatatggtgagaaacaccgctagagatctgctgtactacgccgtgacccaggatgccatgctgatcttcgccaacctgagccggggcttcggccggcagggcaagcggaccttcatggccgagagacagtacacacggatggaggactggctgaccgccaagctggcctacgagggcctgagcaagacctacctgtccaagacactggcccagtacacctccaagacatgcagcaactgtgggtttaccatcaccagcgccgactacgacagggtgctggagaagctgaagaagacagcaacaggctggatgaccacaattaacggcaaggagctgaaggtggagggccagattacctactacaacagatacaagagacagaacgtagtcaaggacctgtccgtcgagctggatagactgagcgaagaatctgtgaacaacgacatctcctcctggacaaagggcagaagcggagaagctctgagcctcctgaagaaaagattctcccatagacccgtgcaggagaagttcgtgtgcctgaactgcggcttcgagacacacgcagccgagcaagccgccctgaacatcgccagatcctggctgttcctgcggagccaggagtacaagaaataccagacaaacaagacaaccggcaacaccgataagagagccttcgtcgagacctggcagtccttttaccggaagaagcttaaggaggtgtggaaacctgccgtgcggtctggcggatctggcggaggctcctctgcagggcggcgtgaccttcgaggacgtggccgtggacttcacccaggaggagtggcagcagctgagccccgagcagaggggcctgtacagggacgtgaccctggagaactacaggaacctggccagcatgggcggcgaggacttcgccaagcccgaggtgatcctgaggctggagaacggcgaggagccctggatggtggagacccaggtgctgaggagctgcggccccgccgagaaggacggatctggctccggcagcggccccaagaaaaagagaaaagtctaagctgccttctgcggggcttgccttctggccatgcccttcttctctcccttgcacctgtacctcttggtctttgaataaagcctgagtaggaaggctagcaaaaaaaaaaaaaaaaaaaaaaaaaaaaaaaaaaaaaaaaaaaaaaaaaaaaaaaaaaaaaaaaaaaaaaaaaaaaaaaa

SEQ ID NO: 16770 - RNA, 9485 nt, synthetic construct
  source 1..9485: mol_type = other RNA
aggaaataagagagaaaagaagagtaagaagaaatataagagccaccatggcccctaagaagaagcgtaaagtgagccggatggaacgcctcgtctacgaggtgcggcagaagtgcagaaacatcgaggacatctgcatctcctgcggatctctgaacgtgaccctggagcacccactgttcatcggcggcatgtgccagaactgtaaaaactgttttctggagtgtgcctatcaatacgacgatgacggctaccagagctactgcaccatctgttgcggcggaagagaggtgctgatgtgtggaaataacaactgctgccggtgcttctgcgtggaatgcgtggacctgctggtgggccccggcgccgcccaggccgctattaaggaagatccttggaactgctacatgtgcggccacaagggcacatacggcctgctgagacggagagaggactggcctagcagactgcagatgttcttcgccaataaccacgaccaggagttcgacccccctaaggtgtaccctcccgtccccgccgagaagagaaagcccatccgggtcctgagcctgttcgatggcatcgccaccggtctgctggtgctgaaggacctgggcatccaggtggataggtacattgcctccgaggtgtgcgaggactccatcaccgtgggaatggtgcgtcatcagggcaagatcatgtacgtgggcgacgtgcggagcgtgacacagaagcatatccaggagtggggccctttcgacctggtgatcggcggcagcccttgcaatgacctgagcatcgtgaacccagcccggaagggcctgtacgagggaaccggcagactgttcttcgagttttacagactgctgcacgacgcccggcctaaggaaggcgacgaccggcccttcttttggctgttcgagaatgtggtggccatgggagtcagcgacaagcgggatattagccggttcctggagagcaaccccgtgatgatcgatgccaaggaagtgagcgccgcccaccgggccagatacttctggggcaatctgcctggcatgaacagacccctggccagcaccgtgaacgacaagctggagctgcaggagtgcctggagcacggccggatcgccaagttcagcaaggtgagaaccatcaccacccgaagcaacagcatcaaacaaggcaaggaccagcactttcctgtgttcatgaacgagaaggaggacatcctgtggtgtaccgagatggagagagtgttcgggttcccagtccactacacagatgtcagcaacatgtctagactggccagacagagactgctgggaagaagctggtccgtccctgtgatcagacacctgttcgcccctctgaaggagtacttcgcctgcgtgagcagcggcaacagcaacgccaacagccggggccccagcttctctagcggcctggtgccactgtccctgagagggagccacatgggccccatggagatctacaaaaccgtgagcgcctggaagcggcagcctgtgcgcgtgctgagcctgtttcggaatatcgataaagtcctgaaaagcctgggattcctggagagcggctctggctccggcggtggcaccctgaagtacgtggaggatgtgacaaacgtggtcagacgggatgtggagaagtggggccccttcgatctggtgtacggcagcacccaacccctgggcagctcttgtgaccggtgccctggctggtacatgtttcagttccaccggatcctgcagtacgccctgccgagacaggagtcccagcggccattcttttggattttcatggacaacttgctgctgaccgaggatgaccaggaaactaccactcggttcctgcagaccgaagccgtgaccctgcaggacgtgagaggccgggactaccagaacgccatgcgggtgtggtccaacatccctggactgaaaagcaagcacgcacctctgacccctaaagaagaggagtacctgcaggcccaggtgcggagcagaagcaagctggacgcccctaaggtggatctgctggtgaagaattgcctcctgcccctgagagagtacttcaagtatttcagccagaatagtctgcccctgggaggcagcggcggcggcgccctggtgacatttgaggacgtcgccgtgcggttcacccaggaggaatgggctctgctggatccttctcagaaaatcctgtaccgggacgtgatgagagagacataccggaatctgacctccgtgggcatcaactgggaatgttgggaccttgaagcctgcttcagaagcctgggaagaaacctgagagtgcaggtggtgaagagaaagtgcgagctgaccaacagcggcccctgcgccgagggcggcccaagcagcggcgcccctcctcccagcggcggcagcccagccggctccccaacctctaccgaggagggcacctctgagtccgccacccccgagagcggccctggcacctccaccgagcccagcgagggcagcgcacccggcagccctgccggcagccccacctccacagaggagggaaccagcaccgagcccagcgaaggcagcgccccaggcaccagcaccgagcctagtgagcaggagattaaacggatcaacaagatcagaagaagacttgtgaaagacagcaacaccaagaaggccggcaagacaggccccatgaaaaccctgctggttagagtgatgacacccgatctgagagagcggctggaaaacctgagaaagaagcctgaaaatatcccccagcccatcagcaatacatctagagccaacctgaataagctgctgaccgattacaccgaaatgaagaaggcgatcctgcatgtgtactgggaagagttccagaaggaccctgtgggcctgatgagccgggtggcccagcctgccagcaagaagatcgatcagaacaagctgaaacctgagatggacgagaagggcaacctgaccaccgccggctttgcctgctctcagtgtggccagcccctgttcgtgtacaagctggagcaggtgtctgagaagggcaaggcttacaccaactacttcggacggtgcaatgtggccgagcacgaaaagctgatcctgctggcccagctgaagcccgagaaggatagcgacgaagccgtgacatatagcctgggaaagtttgggcagagggccctggatttctacagcattcatgtgaccaaggagtccacccaccccgtgaagcccctggcccagatcgccggaaacagatacgcctccggacctgtgggaaaggccctgagcgacgcatgtatgggcacaatcgcctccttcctgtctaagtaccaggacatcatcatcgaacaccagaaggtggtgaagggcaaccagaagagactggagagcctgcgggagctggccggcaaggaaaacctggaataccctagcgtgaccctgccacctcagcctcacaccaaggagggcgttgatgcctacaacgaagtgatcgcccgggtgcgaatgtgggtgaacctgaacctgtggcagaagctgaagctaagcagagatgatgccaagcctctgctgagactgaagggattcccttcctttcctctggtcgagagacaggccaacgaagtggactggtgggacatggtgtgtaacgtgaagaagctgatcaacgagaaaaaggaggatggcaaggtgttttggcagaatctggctggctacaagagacaggaagccctgagaccatacctgagcagcgaggaagatcggaagaagggaaagaaattcgctcggtaccagctgggcgacctgctgctgcacctggaaaagaagcacggcgaggactggggaaaggtgtacgacgaggcctgggagcggattgacaagaaagtggaaggcctgagcaagcacatcaagctggaagaggaacggagaagcgaggacgcccagagcaaggccgccctgaccgactggctgcgggctaaggccagcttcgtgatcgagggcctgaaggaggccgacaaggacgagttctgcagatgcgagctgaagctgcagaagtggtacggggacctgcggggaaagcccttcgccatcgaagccgagaacagcatcctggacatcagcggcttcagcaagcagtacaactgtgccttcatctggcagaaggacggcgtgaagaagctgaacctgtacctgatcatcaactacttcaagggcggcaagctgcggttcaagaagatcaaacctgaagccttcgaagccaacagattctacaccgtgatcaacaaaaagagcggcgagatcgtgcccatggaggtgaacttcaacttcgacgaccccaacctgatcatcctgcctctggcctttggcaagagacagggcagagaattcatctggaacgacctgctgtccctggaaaccggcagcctgaagctggccaacggaagagtgatcgagaagacactgtacaacagaagaacccggcaggatgagcctgccctgttcgtggccctgaccttcgagcggcgggaggtcctggactcctccaatatcaaaccaatgaacctgatcggcgtggcaagaggcgaaaacatccccgccgtgatcgccctgaccgaccccgagggctgcccactgagccggtttaaggatagcctgggaaacccaacccacatcctgagaatcggcgagagctataaggagaagcagcggaccatccaggccaagaaggaggtggagcagcggagagccggcggctacagccggaagtacgccagcaaagccaagaatctggcagacgatatggtgagaaacaccgctagagatctgctgtactacgccgtgacccaggatgccatgctgatcttcgccaacctgagccggggcttcggccggcagggcaagcggaccttcatggccgagagacagtacacacggatggaggactggctgaccgccaagctggcctacgagggcctgagcaagacctacctgtccaagacactggcccagtacacctccaagacatgcagcaactgtgggtttaccatcaccagcgccgactacgacagggtgctggagaagctgaagaagacagcaacaggctggatgaccacaattaacggcaaggagctgaaggtggagggccagattacctactacaacagatacaagagacagaacgtagtcaaggacctgtccgtcgagctggatagactgagcgaagaatctgtgaacaacgacatctcctcctggacaaagggcagaagcggagaagctctgagcctcctgaagaaaagattctcccatagacccgtgcaggagaagttcgtgtgcctgaactgcggcttcgagacacacgcagccgagcaagccgccctgaacatcgccagatcctggctgttcctgcggagccaggagtacaagaaataccagacaaacaagacaaccggcaacaccgataagagagccttcgtcgagacctggcagtccttttaccggaagaagcttaaggaggtgtggaaacctgccgtgcggtctggcggatctggcggaggctccatggccgccgccgccctgagggaccccgcccagcagggctacgtgaccttcgaggacgtggccgtgtacttcagccaggaggagtggaggctgctggacgaggcccagaagctgctgtacaggaacgtgatgctggagaacttcagcctgctggccagcctgggcctggccagcagcaagacccacgagatcacccagctggagagctgggaggagcccttcatgcccgcctgggaggtggtgggcggcccaagcagcggcgcccctcctcccagcggcggcagcccagccggctccccaacctctaccgaggagggcacctctgagtccgccacccccgagagcggccctggcacctccaccgagcccagcgagggcagcgcacccggcagccctgccggcagccccacctccacagaggagggaaccagcaccgagcccagcgaaggcagcgccccaggcaccagcaccgagcctagtgagcaggagattaaacggatcaacaagatcagaagaagacttgtgaaagacagcaacaccaagaaggccggcaagacaggccccatgaaaaccctgctggttagagtgatgacacccgatctgagagagcggctggaaaacctgagaaagaagcctgaaaatatcccccagcccatcagcaatacatctagagccaacctgaataagctgctgaccgattacaccgaaatgaagaaggcgatcctgcatgtgtactgggaagagttccagaaggaccctgtgggcctgatgagccgggtggcccagcctgccagcaagaagatcgatcagaacaagctgaaacctgagatggacgagaagggcaacctgaccaccgccggctttgcctgctctcagtgtggccagcccctgttcgtgtacaagctggagcaggtgtctgagaagggcaaggcttacaccaactacttcggacggtgcaatgtggccgagcacgaaaagctgatcctgctggcccagctgaagcccgagaaggatagcgacgaagccgtgacatatagcctgggaaagtttgggcagagggccctggatttctacagcattcatgtgaccaaggagtccacccaccccgtgaagcccctggcccagatcgccggaaacagatacgcctccggacctgtgggaaaggccctgagcgacgcatgtatgggcacaatcgcctccttcctgtctaagtaccaggacatcatcatcgaacaccagaaggtggtgaagggcaaccagaagagactggagagcctgcgggagctggccggcaaggaaaacctggaataccctagcgtgaccctgccacctcagcctcacaccaaggagggcgttgatgcctacaacgaagtgatcgcccgggtgcgaatgtgggtgaacctgaacctgtggcagaagctgaagctaagcagagatgatgccaagcctctgctgagactgaagggattcccttcctttcctctggtcgagagacaggccaacgaagtggactggtgggacatggtgtgtaacgtgaagaagctgatcaacgagaaaaaggaggatggcaaggtgttttggcagaatctggctggctacaagagacaggaagccctgagaccatacctgagcagcgaggaagatcggaagaagggaaagaaattcgctcggtaccagctgggcgacctgctgctgcacctggaaaagaagcacggcgaggactggggaaaggtgtacgacgaggcctgggagcggattgacaagaaagtggaaggcctgagcaagcacatcaagctggaagaggaacggagaagcgaggacgcccagagcaaggccgccctgaccgactggctgcgggctaaggccagcttcgtgatcgagggcctgaaggaggccgacaaggacgagttctgcagatgcgagctgaagctgcagaagtggtacggggacctgcggggaaagcccttcgccatcgaagccgagaacagcatcctggacatcagcggcttcagcaagcagtacaactgtgccttcatctggcagaaggacggcgtgaagaagctgaacctgtacctgatcatcaactacttcaagggcggcaagctgcggttcaagaagatcaaacctgaagccttcgaagccaacagattctacaccgtgatcaacaaaaagagcggcgagatcgtgcccatggaggtgaacttcaacttcgacgaccccaacctgatcatcctgcctctggcctttggcaagagacagggcagagaattcatctggaacgacctgctgtccctggaaaccggcagcctgaagctggccaacggaagagtgatcgagaagacactgtacaacagaagaacccggcaggatgagcctgccctgttcgtggccctgaccttcgagcggcgggaggtcctggactcctccaatatcaaaccaatgaacctgatcggcgtggcaagaggcgaaaacatccccgccgtgatcgccctgaccgaccccgagggctgcccactgagccggtttaaggatagcctgggaaacccaacccacatcctgagaatcggcgagagctataaggagaagcagcggaccatccaggccaagaaggaggtggagcagcggagagccggcggctacagccggaagtacgccagcaaagccaagaatctggcagacgatatggtgagaaacaccgctagagatctgctgtactacgccgtgacccaggatgccatgctgatcttcgccaacctgagccggggcttcggccggcagggcaagcggaccttcatggccgagagacagtacacacggatggaggactggctgaccgccaagctggcctacgagggcctgagcaagacctacctgtccaagacactggcccagtacacctccaagacatgcagcaactgtgggtttaccatcaccagcgccgactacgacagggtgctggagaagctgaagaagacagcaacaggctggatgaccacaattaacggcaaggagctgaaggtggagggccagattacctactacaacagatacaagagacagaacgtagtcaaggacctgtccgtcgagctggatagactgagcgaagaatctgtgaacaacgacatctcctcctggacaaagggcagaagcggagaagctctgagcctcctgaagaaaagattctcccatagacccgtgcaggagaagttcgtgtgcctgaactgcggcttcgagacacacgcagccgagcaagccgccctgaacatcgccagatcctggctgttcctgcggagccaggagtacaagaaataccagacaaacaagacaaccggcaacaccgataagagagccttcgtcgagacctggcagtccttttaccggaagaagcttaaggaggtgtggaaacctgccgtgcggtctggcggatctggcggaggctcctatggccgccgccgccctgagggaccccgcccagcagggctacgtgaccttcgaggacgtggccgtgtacttcagccaggaggagtggaggctgctggacgaggcccagaagctgctgtacaggaacgtgatgctggagaacttcagcctgctggccagcctgggcctggccagcagcaagacccacgagatcacccagctggagagctgggaggagcccttcatgcccgcctgggaggtggtgggatctggctccggcagcggccccaagaaaaagagaaaagtctaagctgccttctgcggggcttgccttctggccatgcccttcttctctcccttgcacctgtacctcttggtctttgaataaagcctgagtaggaaggctagcaaaaaaaaaaaaaaaaaaaaaaaaaaaaaaaaaaaaaaaaaaaaaaaaaaaaaaaaaaaaaaaaaaaaaaaaaaaaaaaa

SEQ ID NO: 16771 - RNA, 9485 nt, synthetic construct
  source 1..9485: mol_type = other RNA
aggaaataagagagaaaagaagagtaagaagaaatataagagccaccatggcccctaagaagaagcgtaaagtgagccggatggaacgcctcgtctacgaggtgcggcagaagtgcagaaacatcgaggacatctgcatctcctgcggatctctgaacgtgaccctggagcacccactgttcatcggcggcatgtgccagaactgtaaaaactgttttctggagtgtgcctatcaatacgacgatgacggctaccagagctactgcaccatctgttgcggcggaagagaggtgctgatgtgtggaaataacaactgctgccggtgcttctgcgtggaatgcgtggacctgctggtgggccccggcgccgcccaggccgctattaaggaagatccttggaactgctacatgtgcggccacaagggcacatacggcctgctgagacggagagaggactggcctagcagactgcagatgttcttcgccaataaccacgaccaggagttcgacccccctaaggtgtaccctcccgtccccgccgagaagagaaagcccatccgggtcctgagcctgttcgatggcatcgccaccggtctgctggtgctgaaggacctgggcatccaggtggataggtacattgcctccgaggtgtgcgaggactccatcaccgtgggaatggtgcgtcatcagggcaagatcatgtacgtgggcgacgtgcggagcgtgacacagaagcatatccaggagtggggccctttcgacctggtgatcggcggcagcccttgcaatgacctgagcatcgtgaacccagcccggaagggcctgtacgagggaaccggcagactgttcttcgagttttacagactgctgcacgacgcccggcctaaggaaggcgacgaccggcccttcttttggctgttcgagaatgtggtggccatgggagtcagcgacaagcgggatattagccggttcctggagagcaaccccgtgatgatcgatgccaaggaagtgagcgccgcccaccgggccagatacttctggggcaatctgcctggcatgaacagacccctggccagcaccgtgaacgacaagctggagctgcaggagtgcctggagcacggccggatcgccaagttcagcaaggtgagaaccatcaccacccgaagcaacagcatcaaacaaggcaaggaccagcactttcctgtgttcatgaacgagaaggaggacatcctgtggtgtaccgagatggagagagtgttcgggttcccagtccactacacagatgtcagcaacatgtctagactggccagacagagactgctgggaagaagctggtccgtccctgtgatcagacacctgttcgcccctctgaaggagtacttcgcctgcgtgagcagcggcaacagcaacgccaacagccggggccccagcttctctagcggcctggtgccactgtccctgagagggagccacatgggccccatggagatctacaaaaccgtgagcgcctggaagcggcagcctgtgcgcgtgctgagcctgtttcggaatatcgataaagtcctgaaaagcctgggattcctggagagcggctctggctccggcggtggcaccctgaagtacgtggaggatgtgacaaacgtggtcagacgggatgtggagaagtggggccccttcgatctggtgtacggcagcacccaacccctgggcagctcttgtgaccggtgccctggctggtacatgtttcagttccaccggatcctgcagtacgccctgccgagacaggagtcccagcggccattcttttggattttcatggacaacttgctgctgaccgaggatgaccaggaaactaccactcggttcctgcagaccgaagccgtgaccctgcaggacgtgagaggccgggactaccagaacgccatgcgggtgtggtccaacatccctggactgaaaagcaagcacgcacctctgacccctaaagaagaggagtacctgcaggcccaggtgcggagcagaagcaagctggacgcccctaaggtggatctgctggtgaagaattgcctcctgcccctgagagagtacttcaagtatttcagccagaatagtctgcccctgggaggcagcggcggcggcgccctggtgacatttgaggacgtcgccgtgcggttcacccaggaggaatgggctctgctggatccttctcagaaaatcctgtaccgggacgtgatgagagagacataccggaatctgacctccgtgggcatcaactgggaatgttgggaccttgaagcctgcttcagaagcctgggaagaaacctgagagtgcaggtggtgaagagaaagtgcgagctgaccaacagcggcccctgcgccgagggcggcccaagcagcggcgcccctcctcccagcggcggcagcccagccggctccccaacctctaccgaggagggcacctctgagtccgccacccccgagagcggccctggcacctccaccgagcccagcgagggcagcgcacccggcagccctgccggcagccccacctccacagaggagggaaccagcaccgagcccagcgaaggcagcgccccaggcaccagcaccgagcctagtgagcaggagattaaacggatcaacaagatcagaagaagacttgtgaaagacagcaacaccaagaaggccggcaagacaggccccatgaaaaccctgctggttagagtgatgacacccgatctgagagagcggctggaaaacctgagaaagaagcctgaaaatatcccccagcccatcagcaatacatctagagccaacctgaataagctgctgaccgattacaccgaaatgaagaaggcgatcctgcatgtgtactgggaagagttccagaaggaccctgtgggcctgatgagccgggtggcccagcctgccagcaagaagatcgatcagaacaagctgaaacctgagatggacgagaagggcaacctgaccaccgccggctttgcctgctctcagtgtggccagcccctgttcgtgtacaagctggagcaggtgtctgagaagggcaaggcttacaccaactacttcggacggtgcaatgtggccgagcacgaaaagctgatcctgctggcccagctgaagcccgagaaggatagcgacgaagccgtgacatatagcctgggaaagtttgggcagagggccctggatttctacagcattcatgtgaccaaggagtccacccaccccgtgaagcccctggcccagatcgccggaaacagatacgcctccggacctgtgggaaaggccctgagcgacgcatgtatgggcacaatcgcctccttcctgtctaagtaccaggacatcatcatcgaacaccagaaggtggtgaagggcaaccagaagagactggagagcctgcgggagctggccggcaaggaaaacctggaataccctagcgtgaccctgccacctcagcctcacaccaaggagggcgttgatgcctacaacgaagtgatcgcccgggtgcgaatgtgggtgaacctgaacctgtggcagaagctgaagctaagcagagatgatgccaagcctctgctgagactgaagggattcccttcctttcctctggtcgagagacaggccaacgaagtggactggtgggacatggtgtgtaacgtgaagaagctgatcaacgagaaaaaggaggatggcaaggtgttttggcagaatctggctggctacaagagacaggaagccctgagaccatacctgagcagcgaggaagatcggaagaagggaaagaaattcgctcggtaccagctgggcgacctgctgctgcacctggaaaagaagcacggcgaggactggggaaaggtgtacgacgaggcctgggagcggattgacaagaaagtggaaggcctgagcaagcacatcaagctggaagaggaacggagaagcgaggacgcccagagcaaggccgccctgaccgactggctgcgggctaaggccagcttcgtgatcgagggcctgaaggaggccgacaaggacgagttctgcagatgcgagctgaagctgcagaagtggtacggggacctgcggggaaagcccttcgccatcgaagccgagaacagcatcctggacatcagcggcttcagcaagcagtacaactgtgccttcatctggcagaaggacggcgtgaagaagctgaacctgtacctgatcatcaactacttcaagggcggcaagctgcggttcaagaagatcaaacctgaagccttcgaagccaacagattctacaccgtgatcaacaaaaagagcggcgagatcgtgcccatggaggtgaacttcaacttcgacgaccccaacctgatcatcctgcctctggcctttggcaagagacagggcagagaattcatctggaacgacctgctgtccctggaaaccggcagcctgaagctggccaacggaagagtgatcgagaagacactgtacaacagaagaacccggcaggatgagcctgccctgttcgtggccctgaccttcgagcggcgggaggtcctggactcctccaatatcaaaccaatgaacctgatcggcgtggcaagaggcgaaaacatccccgccgtgatcgccctgaccgaccccgagggctgcccactgagccggtttaaggatagcctgggaaacccaacccacatcctgagaatcggcgagagctataaggagaagcagcggaccatccaggccaagaaggaggtggagcagcggagagccggcggctacagccggaagtacgccagcaaagccaagaatctggcagacgatatggtgagaaacaccgctagagatctgctgtactacgccgtgacccaggatgccatgctgatcttcgccaacctgagccggggcttcggccggcagggcaagcggaccttcatggccgagagacagtacacacggatggaggactggctgaccgccaagctggcctacgagggcctgagcaagacctacctgtccaagacactggcccagtacacctccaagacatgcagcaactgtgggtttaccatcaccagcgccgactacgacagggtgctggagaagctgaagaagacagcaacaggctggatgaccacaattaacggcaaggagctgaaggtggagggccagattacctactacaacagatacaagagacagaacgtagtcaaggacctgtccgtcgagctggatagactgagcgaagaatctgtgaacaacgacatctcctcctggacaaagggcagaagcggagaagctctgagcctcctgaagaaaagattctcccatagacccgtgcaggagaagttcgtgtgcctgaactgcggcttcgagacacacgcagccgagcaagccgccctgaacatcgccagatcctggctgttcctgcggagccaggagtacaagaaataccagacaaacaagacaaccggcaacaccgataagagagccttcgtcgagacctggcagtccttttaccggaagaagcttaaggaggtgtggaaacctgccgtgcggtctggcggatctggcggaggctccgagatggagcccctgaccttcagggacgtggccatcgagttcagcctggaggagtggcagtgcctgaaccccgcccagcaggacctgttcaggaacgtgatgctggagaactacaggaacctggtgttcctgggcatcgccgccagcaagcccgacctgatcacctgcctggagaaggccaaggagccctggaagatgaagcagcacgagatggtggacgagccccccggcgccagcaccttcggcggcccaagcagcggcgcccctcctcccagcggcggcagcccagccggctccccaacctctaccgaggagggcacctctgagtccgccacccccgagagcggccctggcacctccaccgagcccagcgagggcagcgcacccggcagccctgccggcagccccacctccacagaggagggaaccagcaccgagcccagcgaaggcagcgccccaggcaccagcaccgagcctagtgagcaggagattaaacggatcaacaagatcagaagaagacttgtgaaagacagcaacaccaagaaggccggcaagacaggccccatgaaaaccctgctggttagagtgatgacacccgatctgagagagcggctggaaaacctgagaaagaagcctgaaaatatcccccagcccatcagcaatacatctagagccaacctgaataagctgctgaccgattacaccgaaatgaagaaggcgatcctgcatgtgtactgggaagagttccagaaggaccctgtgggcctgatgagccgggtggcccagcctgccagcaagaagatcgatcagaacaagctgaaacctgagatggacgagaagggcaacctgaccaccgccggctttgcctgctctcagtgtggccagcccctgttcgtgtacaagctggagcaggtgtctgagaagggcaaggcttacaccaactacttcggacggtgcaatgtggccgagcacgaaaagctgatcctgctggcccagctgaagcccgagaaggatagcgacgaagccgtgacatatagcctgggaaagtttgggcagagggccctggatttctacagcattcatgtgaccaaggagtccacccaccccgtgaagcccctggcccagatcgccggaaacagatacgcctccggacctgtgggaaaggccctgagcgacgcatgtatgggcacaatcgcctccttcctgtctaagtaccaggacatcatcatcgaacaccagaaggtggtgaagggcaaccagaagagactggagagcctgcgggagctggccggcaaggaaaacctggaataccctagcgtgaccctgccacctcagcctcacaccaaggagggcgttgatgcctacaacgaagtgatcgcccgggtgcgaatgtgggtgaacctgaacctgtggcagaagctgaagctaagcagagatgatgccaagcctctgctgagactgaagggattcccttcctttcctctggtcgagagacaggccaacgaagtggactggtgggacatggtgtgtaacgtgaagaagctgatcaacgagaaaaaggaggatggcaaggtgttttggcagaatctggctggctacaagagacaggaagccctgagaccatacctgagcagcgaggaagatcggaagaagggaaagaaattcgctcggtaccagctgggcgacctgctgctgcacctggaaaagaagcacggcgaggactggggaaaggtgtacgacgaggcctgggagcggattgacaagaaagtggaaggcctgagcaagcacatcaagctggaagaggaacggagaagcgaggacgcccagagcaaggccgccctgaccgactggctgcgggctaaggccagcttcgtgatcgagggcctgaaggaggccgacaaggacgagttctgcagatgcgagctgaagctgcagaagtggtacggggacctgcggggaaagcccttcgccatcgaagccgagaacagcatcctggacatcagcggcttcagcaagcagtacaactgtgccttcatctggcagaaggacggcgtgaagaagctgaacctgtacctgatcatcaactacttcaagggcggcaagctgcggttcaagaagatcaaacctgaagccttcgaagccaacagattctacaccgtgatcaacaaaaagagcggcgagatcgtgcccatggaggtgaacttcaacttcgacgaccccaacctgatcatcctgcctctggcctttggcaagagacagggcagagaattcatctggaacgacctgctgtccctggaaaccggcagcctgaagctggccaacggaagagtgatcgagaagacactgtacaacagaagaacccggcaggatgagcctgccctgttcgtggccctgaccttcgagcggcgggaggtcctggactcctccaatatcaaaccaatgaacctgatcggcgtggcaagaggcgaaaacatccccgccgtgatcgccctgaccgaccccgagggctgcccactgagccggtttaaggatagcctgggaaacccaacccacatcctgagaatcggcgagagctataaggagaagcagcggaccatccaggccaagaaggaggtggagcagcggagagccggcggctacagccggaagtacgccagcaaagccaagaatctggcagacgatatggtgagaaacaccgctagagatctgctgtactacgccgtgacccaggatgccatgctgatcttcgccaacctgagccggggcttcggccggcagggcaagcggaccttcatggccgagagacagtacacacggatggaggactggctgaccgccaagctggcctacgagggcctgagcaagacctacctgtccaagacactggcccagtacacctccaagacatgcagcaactgtgggtttaccatcaccagcgccgactacgacagggtgctggagaagctgaagaagacagcaacaggctggatgaccacaattaacggcaaggagctgaaggtggagggccagattacctactacaacagatacaagagacagaacgtagtcaaggacctgtccgtcgagctggatagactgagcgaagaatctgtgaacaacgacatctcctcctggacaaagggcagaagcggagaagctctgagcctcctgaagaaaagattctcccatagacccgtgcaggagaagttcgtgtgcctgaactgcggcttcgagacacacgcagccgagcaagccgccctgaacatcgccagatcctggctgttcctgcggagccaggagtacaagaaataccagacaaacaagacaaccggcaacaccgataagagagccttcgtcgagacctggcagtccttttaccggaagaagcttaaggaggtgtggaaacctgccgtgcggtctggcggatctggcggaggctcctgagatggagcccctgaccttcagggacgtggccatcgagttcagcctggaggagtggcagtgcctgaaccccgcccagcaggacctgttcaggaacgtgatgctggagaactacaggaacctggtgttcctgggcatcgccgccagcaagcccgacctgatcacctgcctggagaaggccaaggagccctggaagatgaagcagcacgagatggtggacgagccccccggcgccagcaccttcggatctggctccggcagcggccccaagaaaaagagaaaagtctaagctgccttctgcggggcttgccttctggccatgcccttcttctctcccttgcacctgtacctcttggtctttgaataaagcctgagtaggaaggctagcaaaaaaaaaaaaaaaaaaaaaaaaaaaaaaaaaaaaaaaaaaaaaaaaaaaaaaaaaaaaaaaaaaaaaaaaaaaaaaaa

SEQ ID NO: 16772 - RNA, 9485 nt, synthetic construct
  source 1..9485: mol_type = other RNA
aggaaataagagagaaaagaagagtaagaagaaatataagagccaccatggcccctaagaagaagcgtaaagtgagccggatggaacgcctcgtctacgaggtgcggcagaagtgcagaaacatcgaggacatctgcatctcctgcggatctctgaacgtgaccctggagcacccactgttcatcggcggcatgtgccagaactgtaaaaactgttttctggagtgtgcctatcaatacgacgatgacggctaccagagctactgcaccatctgttgcggcggaagagaggtgctgatgtgtggaaataacaactgctgccggtgcttctgcgtggaatgcgtggacctgctggtgggccccggcgccgcccaggccgctattaaggaagatccttggaactgctacatgtgcggccacaagggcacatacggcctgctgagacggagagaggactggcctagcagactgcagatgttcttcgccaataaccacgaccaggagttcgacccccctaaggtgtaccctcccgtccccgccgagaagagaaagcccatccgggtcctgagcctgttcgatggcatcgccaccggtctgctggtgctgaaggacctgggcatccaggtggataggtacattgcctccgaggtgtgcgaggactccatcaccgtgggaatggtgcgtcatcagggcaagatcatgtacgtgggcgacgtgcggagcgtgacacagaagcatatccaggagtggggccctttcgacctggtgatcggcggcagcccttgcaatgacctgagcatcgtgaacccagcccggaagggcctgtacgagggaaccggcagactgttcttcgagttttacagactgctgcacgacgcccggcctaaggaaggcgacgaccggcccttcttttggctgttcgagaatgtggtggccatgggagtcagcgacaagcgggatattagccggttcctggagagcaaccccgtgatgatcgatgccaaggaagtgagcgccgcccaccgggccagatacttctggggcaatctgcctggcatgaacagacccctggccagcaccgtgaacgacaagctggagctgcaggagtgcctggagcacggccggatcgccaagttcagcaaggtgagaaccatcaccacccgaagcaacagcatcaaacaaggcaaggaccagcactttcctgtgttcatgaacgagaaggaggacatcctgtggtgtaccgagatggagagagtgttcgggttcccagtccactacacagatgtcagcaacatgtctagactggccagacagagactgctgggaagaagctggtccgtccctgtgatcagacacctgttcgcccctctgaaggagtacttcgcctgcgtgagcagcggcaacagcaacgccaacagccggggccccagcttctctagcggcctggtgccactgtccctgagagggagccacatgggccccatggagatctacaaaaccgtgagcgcctggaagcggcagcctgtgcgcgtgctgagcctgtttcggaatatcgataaagtcctgaaaagcctgggattcctggagagcggctctggctccggcggtggcaccctgaagtacgtggaggatgtgacaaacgtggtcagacgggatgtggagaagtggggccccttcgatctggtgtacggcagcacccaacccctgggcagctcttgtgaccggtgccctggctggtacatgtttcagttccaccggatcctgcagtacgccctgccgagacaggagtcccagcggccattcttttggattttcatggacaacttgctgctgaccgaggatgaccaggaaactaccactcggttcctgcagaccgaagccgtgaccctgcaggacgtgagaggccgggactaccagaacgccatgcgggtgtggtccaacatccctggactgaaaagcaagcacgcacctctgacccctaaagaagaggagtacctgcaggcccaggtgcggagcagaagcaagctggacgcccctaaggtggatctgctggtgaagaattgcctcctgcccctgagagagtacttcaagtatttcagccagaatagtctgcccctgggaggcagcggcggcggcgccctggtgacatttgaggacgtcgccgtgcggttcacccaggaggaatgggctctgctggatccttctcagaaaatcctgtaccgggacgtgatgagagagacataccggaatctgacctccgtgggcatcaactgggaatgttgggaccttgaagcctgcttcagaagcctgggaagaaacctgagagtgcaggtggtgaagagaaagtgcgagctgaccaacagcggcccctgcgccgagggcggcccaagcagcggcgcccctcctcccagcggcggcagcccagccggctccccaacctctaccgaggagggcacctctgagtccgccacccccgagagcggccctggcacctccaccgagcccagcgagggcagcgcacccggcagccctgccggcagccccacctccacagaggagggaaccagcaccgagcccagcgaaggcagcgccccaggcaccagcaccgagcctagtgagcaggagattaaacggatcaacaagatcagaagaagacttgtgaaagacagcaacaccaagaaggccggcaagacaggccccatgaaaaccctgctggttagagtgatgacacccgatctgagagagcggctggaaaacctgagaaagaagcctgaaaatatcccccagcccatcagcaatacatctagagccaacctgaataagctgctgaccgattacaccgaaatgaagaaggcgatcctgcatgtgtactgggaagagttccagaaggaccctgtgggcctgatgagccgggtggcccagcctgccagcaagaagatcgatcagaacaagctgaaacctgagatggacgagaagggcaacctgaccaccgccggctttgcctgctctcagtgtggccagcccctgttcgtgtacaagctggagcaggtgtctgagaagggcaaggcttacaccaactacttcggacggtgcaatgtggccgagcacgaaaagctgatcctgctggcccagctgaagcccgagaaggatagcgacgaagccgtgacatatagcctgggaaagtttgggcagagggccctggatttctacagcattcatgtgaccaaggagtccacccaccccgtgaagcccctggcccagatcgccggaaacagatacgcctccggacctgtgggaaaggccctgagcgacgcatgtatgggcacaatcgcctccttcctgtctaagtaccaggacatcatcatcgaacaccagaaggtggtgaagggcaaccagaagagactggagagcctgcgggagctggccggcaaggaaaacctggaataccctagcgtgaccctgccacctcagcctcacaccaaggagggcgttgatgcctacaacgaagtgatcgcccgggtgcgaatgtgggtgaacctgaacctgtggcagaagctgaagctaagcagagatgatgccaagcctctgctgagactgaagggattcccttcctttcctctggtcgagagacaggccaacgaagtggactggtgggacatggtgtgtaacgtgaagaagctgatcaacgagaaaaaggaggatggcaaggtgttttggcagaatctggctggctacaagagacaggaagccctgagaccatacctgagcagcgaggaagatcggaagaagggaaagaaattcgctcggtaccagctgggcgacctgctgctgcacctggaaaagaagcacggcgaggactggggaaaggtgtacgacgaggcctgggagcggattgacaagaaagtggaaggcctgagcaagcacatcaagctggaagaggaacggagaagcgaggacgcccagagcaaggccgccctgaccgactggctgcgggctaaggccagcttcgtgatcgagggcctgaaggaggccgacaaggacgagttctgcagatgcgagctgaagctgcagaagtggtacggggacctgcggggaaagcccttcgccatcgaagccgagaacagcatcctggacatcagcggcttcagcaagcagtacaactgtgccttcatctggcagaaggacggcgtgaagaagctgaacctgtacctgatcatcaactacttcaagggcggcaagctgcggttcaagaagatcaaacctgaagccttcgaagccaacagattctacaccgtgatcaacaaaaagagcggcgagatcgtgcccatggaggtgaacttcaacttcgacgaccccaacctgatcatcctgcctctggcctttggcaagagacagggcagagaattcatctggaacgacctgctgtccctggaaaccggcagcctgaagctggccaacggaagagtgatcgagaagacactgtacaacagaagaacccggcaggatgagcctgccctgttcgtggccctgaccttcgagcggcgggaggtcctggactcctccaatatcaaaccaatgaacctgatcggcgtggcaagaggcgaaaacatccccgccgtgatcgccctgaccgaccccgagggctgcccactgagccggtttaaggatagcctgggaaacccaacccacatcctgagaatcggcgagagctataaggagaagcagcggaccatccaggccaagaaggaggtggagcagcggagagccggcggctacagccggaagtacgccagcaaagccaagaatctggcagacgatatggtgagaaacaccgctagagatctgctgtactacgccgtgacccaggatgccatgctgatcttcgccaacctgagccggggcttcggccggcagggcaagcggaccttcatggccgagagacagtacacacggatggaggactggctgaccgccaagctggcctacgagggcctgagcaagacctacctgtccaagacactggcccagtacacctccaagacatgcagcaactgtgggtttaccatcaccagcgccgactacgacagggtgctggagaagctgaagaagacagcaacaggctggatgaccacaattaacggcaaggagctgaaggtggagggccagattacctactacaacagatacaagagacagaacgtagtcaaggacctgtccgtcgagctggatagactgagcgaagaatctgtgaacaacgacatctcctcctggacaaagggcagaagcggagaagctctgagcctcctgaagaaaagattctcccatagacccgtgcaggagaagttcgtgtgcctgaactgcggcttcgagacacacgcagccgagcaagccgccctgaacatcgccagatcctggctgttcctgcggagccaggagtacaagaaataccagacaaacaagacaaccggcaacaccgataagagagccttcgtcgagacctggcagtccttttaccggaagaagcttaaggaggtgtggaaacctgccgtgcggtctggcggatctggcggaggctccaagcccggcgccgtgagcttcgccgacgtggccgtgtacttcagccccgaggagtggggctgcctgaggcccgcccagaggagcctgtacagggacgtgatgagggagacctacggccacctgggcgccctgggcttccccggccccaagcccgccctgatcagctggatggagcaggagagcgaggcctggagcagcgccgcccaggaccccgagaagggcgagagcctgggcggcgcccagggcggcccaagcagcggcgcccctcctcccagcggcggcagcccagccggctccccaacctctaccgaggagggcacctctgagtccgccacccccgagagcggccctggcacctccaccgagcccagcgagggcagcgcacccggcagccctgccggcagccccacctccacagaggagggaaccagcaccgagcccagcgaaggcagcgccccaggcaccagcaccgagcctagtgagcaggagattaaacggatcaacaagatcagaagaagacttgtgaaagacagcaacaccaagaaggccggcaagacaggccccatgaaaaccctgctggttagagtgatgacacccgatctgagagagcggctggaaaacctgagaaagaagcctgaaaatatcccccagcccatcagcaatacatctagagccaacctgaataagctgctgaccgattacaccgaaatgaagaaggcgatcctgcatgtgtactgggaagagttccagaaggaccctgtgggcctgatgagccgggtggcccagcctgccagcaagaagatcgatcagaacaagctgaaacctgagatggacgagaagggcaacctgaccaccgccggctttgcctgctctcagtgtggccagcccctgttcgtgtacaagctggagcaggtgtctgagaagggcaaggcttacaccaactacttcggacggtgcaatgtggccgagcacgaaaagctgatcctgctggcccagctgaagcccgagaaggatagcgacgaagccgtgacatatagcctgggaaagtttgggcagagggccctggatttctacagcattcatgtgaccaaggagtccacccaccccgtgaagcccctggcccagatcgccggaaacagatacgcctccggacctgtgggaaaggccctgagcgacgcatgtatgggcacaatcgcctccttcctgtctaagtaccaggacatcatcatcgaacaccagaaggtggtgaagggcaaccagaagagactggagagcctgcgggagctggccggcaaggaaaacctggaataccctagcgtgaccctgccacctcagcctcacaccaaggagggcgttgatgcctacaacgaagtgatcgcccgggtgcgaatgtgggtgaacctgaacctgtggcagaagctgaagctaagcagagatgatgccaagcctctgctgagactgaagggattcccttcctttcctctggtcgagagacaggccaacgaagtggactggtgggacatggtgtgtaacgtgaagaagctgatcaacgagaaaaaggaggatggcaaggtgttttggcagaatctggctggctacaagagacaggaagccctgagaccatacctgagcagcgaggaagatcggaagaagggaaagaaattcgctcggtaccagctgggcgacctgctgctgcacctggaaaagaagcacggcgaggactggggaaaggtgtacgacgaggcctgggagcggattgacaagaaagtggaaggcctgagcaagcacatcaagctggaagaggaacggagaagcgaggacgcccagagcaaggccgccctgaccgactggctgcgggctaaggccagcttcgtgatcgagggcctgaaggaggccgacaaggacgagttctgcagatgcgagctgaagctgcagaagtggtacggggacctgcggggaaagcccttcgccatcgaagccgagaacagcatcctggacatcagcggcttcagcaagcagtacaactgtgccttcatctggcagaaggacggcgtgaagaagctgaacctgtacctgatcatcaactacttcaagggcggcaagctgcggttcaagaagatcaaacctgaagccttcgaagccaacagattctacaccgtgatcaacaaaaagagcggcgagatcgtgcccatggaggtgaacttcaacttcgacgaccccaacctgatcatcctgcctctggcctttggcaagagacagggcagagaattcatctggaacgacctgctgtccctggaaaccggcagcctgaagctggccaacggaagagtgatcgagaagacactgtacaacagaagaacccggcaggatgagcctgccctgttcgtggccctgaccttcgagcggcgggaggtcctggactcctccaatatcaaaccaatgaacctgatcggcgtggcaagaggcgaaaacatccccgccgtgatcgccctgaccgaccccgagggctgcccactgagccggtttaaggatagcctgggaaacccaacccacatcctgagaatcggcgagagctataaggagaagcagcggaccatccaggccaagaaggaggtggagcagcggagagccggcggctacagccggaagtacgccagcaaagccaagaatctggcagacgatatggtgagaaacaccgctagagatctgctgtactacgccgtgacccaggatgccatgctgatcttcgccaacctgagccggggcttcggccggcagggcaagcggaccttcatggccgagagacagtacacacggatggaggactggctgaccgccaagctggcctacgagggcctgagcaagacctacctgtccaagacactggcccagtacacctccaagacatgcagcaactgtgggtttaccatcaccagcgccgactacgacagggtgctggagaagctgaagaagacagcaacaggctggatgaccacaattaacggcaaggagctgaaggtggagggccagattacctactacaacagatacaagagacagaacgtagtcaaggacctgtccgtcgagctggatagactgagcgaagaatctgtgaacaacgacatctcctcctggacaaagggcagaagcggagaagctctgagcctcctgaagaaaagattctcccatagacccgtgcaggagaagttcgtgtgcctgaactgcggcttcgagacacacgcagccgagcaagccgccctgaacatcgccagatcctggctgttcctgcggagccaggagtacaagaaataccagacaaacaagacaaccggcaacaccgataagagagccttcgtcgagacctggcagtccttttaccggaagaagcttaaggaggtgtggaaacctgccgtgcggtctggcggatctggcggaggctcctaagcccggcgccgtgagcttcgccgacgtggccgtgtacttcagccccgaggagtggggctgcctgaggcccgcccagaggagcctgtacagggacgtgatgagggagacctacggccacctgggcgccctgggcttccccggccccaagcccgccctgatcagctggatggagcaggagagcgaggcctggagcagcgccgcccaggaccccgagaagggcgagagcctgggcggcgcccagggatctggctccggcagcggccccaagaaaaagagaaaagtctaagctgccttctgcggggcttgccttctggccatgcccttcttctctcccttgcacctgtacctcttggtctttgaataaagcctgagtaggaaggctagcaaaaaaaaaaaaaaaaaaaaaaaaaaaaaaaaaaaaaaaaaaaaaaaaaaaaaaaaaaaaaaaaaaaaaaaaaaaaaaaa

SEQ ID NO: 16773 - RNA, 9485 nt, synthetic construct
  source 1..9485: mol_type = other RNA
aggaaataagagagaaaagaagagtaagaagaaatataagagccaccatggcccctaagaagaagcgtaaagtgagccggatggaacgcctcgtctacgaggtgcggcagaagtgcagaaacatcgaggacatctgcatctcctgcggatctctgaacgtgaccctggagcacccactgttcatcggcggcatgtgccagaactgtaaaaactgttttctggagtgtgcctatcaatacgacgatgacggctaccagagctactgcaccatctgttgcggcggaagagaggtgctgatgtgtggaaataacaactgctgccggtgcttctgcgtggaatgcgtggacctgctggtgggccccggcgccgcccaggccgctattaaggaagatccttggaactgctacatgtgcggccacaagggcacatacggcctgctgagacggagagaggactggcctagcagactgcagatgttcttcgccaataaccacgaccaggagttcgacccccctaaggtgtaccctcccgtccccgccgagaagagaaagcccatccgggtcctgagcctgttcgatggcatcgccaccggtctgctggtgctgaaggacctgggcatccaggtggataggtacattgcctccgaggtgtgcgaggactccatcaccgtgggaatggtgcgtcatcagggcaagatcatgtacgtgggcgacgtgcggagcgtgacacagaagcatatccaggagtggggccctttcgacctggtgatcggcggcagcccttgcaatgacctgagcatcgtgaacccagcccggaagggcctgtacgagggaaccggcagactgttcttcgagttttacagactgctgcacgacgcccggcctaaggaaggcgacgaccggcccttcttttggctgttcgagaatgtggtggccatgggagtcagcgacaagcgggatattagccggttcctggagagcaaccccgtgatgatcgatgccaaggaagtgagcgccgcccaccgggccagatacttctggggcaatctgcctggcatgaacagacccctggccagcaccgtgaacgacaagctggagctgcaggagtgcctggagcacggccggatcgccaagttcagcaaggtgagaaccatcaccacccgaagcaacagcatcaaacaaggcaaggaccagcactttcctgtgttcatgaacgagaaggaggacatcctgtggtgtaccgagatggagagagtgttcgggttcccagtccactacacagatgtcagcaacatgtctagactggccagacagagactgctgggaagaagctggtccgtccctgtgatcagacacctgttcgcccctctgaaggagtacttcgcctgcgtgagcagcggcaacagcaacgccaacagccggggccccagcttctctagcggcctggtgccactgtccctgagagggagccacatgggccccatggagatctacaaaaccgtgagcgcctggaagcggcagcctgtgcgcgtgctgagcctgtttcggaatatcgataaagtcctgaaaagcctgggattcctggagagcggctctggctccggcggtggcaccctgaagtacgtggaggatgtgacaaacgtggtcagacgggatgtggagaagtggggccccttcgatctggtgtacggcagcacccaacccctgggcagctcttgtgaccggtgccctggctggtacatgtttcagttccaccggatcctgcagtacgccctgccgagacaggagtcccagcggccattcttttggattttcatggacaacttgctgctgaccgaggatgaccaggaaactaccactcggttcctgcagaccgaagccgtgaccctgcaggacgtgagaggccgggactaccagaacgccatgcgggtgtggtccaacatccctggactgaaaagcaagcacgcacctctgacccctaaagaagaggagtacctgcaggcccaggtgcggagcagaagcaagctggacgcccctaaggtggatctgctggtgaagaattgcctcctgcccctgagagagtacttcaagtatttcagccagaatagtctgcccctgggaggcagcggcggcggcgccctggtgacatttgaggacgtcgccgtgcggttcacccaggaggaatgggctctgctggatccttctcagaaaatcctgtaccgggacgtgatgagagagacataccggaatctgacctccgtgggcatcaactgggaatgttgggaccttgaagcctgcttcagaagcctgggaagaaacctgagagtgcaggtggtgaagagaaagtgcgagctgaccaacagcggcccctgcgccgagggcggcccaagcagcggcgcccctcctcccagcggcggcagcccagccggctccccaacctctaccgaggagggcacctctgagtccgccacccccgagagcggccctggcacctccaccgagcccagcgagggcagcgcacccggcagccctgccggcagccccacctccacagaggagggaaccagcaccgagcccagcgaaggcagcgccccaggcaccagcaccgagcctagtgagcaggagattaaacggatcaacaagatcagaagaagacttgtgaaagacagcaacaccaagaaggccggcaagacaggccccatgaaaaccctgctggttagagtgatgacacccgatctgagagagcggctggaaaacctgagaaagaagcctgaaaatatcccccagcccatcagcaatacatctagagccaacctgaataagctgctgaccgattacaccgaaatgaagaaggcgatcctgcatgtgtactgggaagagttccagaaggaccctgtgggcctgatgagccgggtggcccagcctgccagcaagaagatcgatcagaacaagctgaaacctgagatggacgagaagggcaacctgaccaccgccggctttgcctgctctcagtgtggccagcccctgttcgtgtacaagctggagcaggtgtctgagaagggcaaggcttacaccaactacttcggacggtgcaatgtggccgagcacgaaaagctgatcctgctggcccagctgaagcccgagaaggatagcgacgaagccgtgacatatagcctgggaaagtttgggcagagggccctggatttctacagcattcatgtgaccaaggagtccacccaccccgtgaagcccctggcccagatcgccggaaacagatacgcctccggacctgtgggaaaggccctgagcgacgcatgtatgggcacaatcgcctccttcctgtctaagtaccaggacatcatcatcgaacaccagaaggtggtgaagggcaaccagaagagactggagagcctgcgggagctggccggcaaggaaaacctggaataccctagcgtgaccctgccacctcagcctcacaccaaggagggcgttgatgcctacaacgaagtgatcgcccgggtgcgaatgtgggtgaacctgaacctgtggcagaagctgaagctaagcagagatgatgccaagcctctgctgagactgaagggattcccttcctttcctctggtcgagagacaggccaacgaagtggactggtgggacatggtgtgtaacgtgaagaagctgatcaacgagaaaaaggaggatggcaaggtgttttggcagaatctggctggctacaagagacaggaagccctgagaccatacctgagcagcgaggaagatcggaagaagggaaagaaattcgctcggtaccagctgggcgacctgctgctgcacctggaaaagaagcacggcgaggactggggaaaggtgtacgacgaggcctgggagcggattgacaagaaagtggaaggcctgagcaagcacatcaagctggaagaggaacggagaagcgaggacgcccagagcaaggccgccctgaccgactggctgcgggctaaggccagcttcgtgatcgagggcctgaaggaggccgacaaggacgagttctgcagatgcgagctgaagctgcagaagtggtacggggacctgcggggaaagcccttcgccatcgaagccgagaacagcatcctggacatcagcggcttcagcaagcagtacaactgtgccttcatctggcagaaggacggcgtgaagaagctgaacctgtacctgatcatcaactacttcaagggcggcaagctgcggttcaagaagatcaaacctgaagccttcgaagccaacagattctacaccgtgatcaacaaaaagagcggcgagatcgtgcccatggaggtgaacttcaacttcgacgaccccaacctgatcatcctgcctctggcctttggcaagagacagggcagagaattcatctggaacgacctgctgtccctggaaaccggcagcctgaagctggccaacggaagagtgatcgagaagacactgtacaacagaagaacccggcaggatgagcctgccctgttcgtggccctgaccttcgagcggcgggaggtcctggactcctccaatatcaaaccaatgaacctgatcggcgtggcaagaggcgaaaacatccccgccgtgatcgccctgaccgaccccgagggctgcccactgagccggtttaaggatagcctgggaaacccaacccacatcctgagaatcggcgagagctataaggagaagcagcggaccatccaggccaagaaggaggtggagcagcggagagccggcggctacagccggaagtacgccagcaaagccaagaatctggcagacgatatggtgagaaacaccgctagagatctgctgtactacgccgtgacccaggatgccatgctgatcttcgccaacctgagccggggcttcggccggcagggcaagcggaccttcatggccgagagacagtacacacggatggaggactggctgaccgccaagctggcctacgagggcctgagcaagacctacctgtccaagacactggcccagtacacctccaagacatgcagcaactgtgggtttaccatcaccagcgccgactacgacagggtgctggagaagctgaagaagacagcaacaggctggatgaccacaattaacggcaaggagctgaaggtggagggccagattacctactacaacagatacaagagacagaacgtagtcaaggacctgtccgtcgagctggatagactgagcgaagaatctgtgaacaacgacatctcctcctggacaaagggcagaagcggagaagctctgagcctcctgaagaaaagattctcccatagacccgtgcaggagaagttcgtgtgcctgaactgcggcttcgagacacacgcagccgagcaagccgccctgaacatcgccagatcctggctgttcctgcggagccaggagtacaagaaataccagacaaacaagacaaccggcaacaccgataagagagccttcgtcgagacctggcagtccttttaccggaagaagcttaaggaggtgtggaaacctgccgtgcggtctggcggatctggcggaggctccttccaggagctggtgagcttcaaggacgtgaccgtgggcttcacccaggaggagtggcagcacctggaccccacccagaggagcctgtacagggacgtgatgctggagaactacagcaacctggtgagcgtgggctactgcgtgaccaagcccgaggtgatcttcaggctggagcagggcgaggagccctggatcctggaggaggagttccccaggcagagcttccccgaggtgtggaagatcggcggcccaagcagcggcgcccctcctcccagcggcggcagcccagccggctccccaacctctaccgaggagggcacctctgagtccgccacccccgagagcggccctggcacctccaccgagcccagcgagggcagcgcacccggcagccctgccggcagccccacctccacagaggagggaaccagcaccgagcccagcgaaggcagcgccccaggcaccagcaccgagcctagtgagcaggagattaaacggatcaacaagatcagaagaagacttgtgaaagacagcaacaccaagaaggccggcaagacaggccccatgaaaaccctgctggttagagtgatgacacccgatctgagagagcggctggaaaacctgagaaagaagcctgaaaatatcccccagcccatcagcaatacatctagagccaacctgaataagctgctgaccgattacaccgaaatgaagaaggcgatcctgcatgtgtactgggaagagttccagaaggaccctgtgggcctgatgagccgggtggcccagcctgccagcaagaagatcgatcagaacaagctgaaacctgagatggacgagaagggcaacctgaccaccgccggctttgcctgctctcagtgtggccagcccctgttcgtgtacaagctggagcaggtgtctgagaagggcaaggcttacaccaactacttcggacggtgcaatgtggccgagcacgaaaagctgatcctgctggcccagctgaagcccgagaaggatagcgacgaagccgtgacatatagcctgggaaagtttgggcagagggccctggatttctacagcattcatgtgaccaaggagtccacccaccccgtgaagcccctggcccagatcgccggaaacagatacgcctccggacctgtgggaaaggccctgagcgacgcatgtatgggcacaatcgcctccttcctgtctaagtaccaggacatcatcatcgaacaccagaaggtggtgaagggcaaccagaagagactggagagcctgcgggagctggccggcaaggaaaacctggaataccctagcgtgaccctgccacctcagcctcacaccaaggagggcgttgatgcctacaacgaagtgatcgcccgggtgcgaatgtgggtgaacctgaacctgtggcagaagctgaagctaagcagagatgatgccaagcctctgctgagactgaagggattcccttcctttcctctggtcgagagacaggccaacgaagtggactggtgggacatggtgtgtaacgtgaagaagctgatcaacgagaaaaaggaggatggcaaggtgttttggcagaatctggctggctacaagagacaggaagccctgagaccatacctgagcagcgaggaagatcggaagaagggaaagaaattcgctcggtaccagctgggcgacctgctgctgcacctggaaaagaagcacggcgaggactggggaaaggtgtacgacgaggcctgggagcggattgacaagaaagtggaaggcctgagcaagcacatcaagctggaagaggaacggagaagcgaggacgcccagagcaaggccgccctgaccgactggctgcgggctaaggccagcttcgtgatcgagggcctgaaggaggccgacaaggacgagttctgcagatgcgagctgaagctgcagaagtggtacggggacctgcggggaaagcccttcgccatcgaagccgagaacagcatcctggacatcagcggcttcagcaagcagtacaactgtgccttcatctggcagaaggacggcgtgaagaagctgaacctgtacctgatcatcaactacttcaagggcggcaagctgcggttcaagaagatcaaacctgaagccttcgaagccaacagattctacaccgtgatcaacaaaaagagcggcgagatcgtgcccatggaggtgaacttcaacttcgacgaccccaacctgatcatcctgcctctggcctttggcaagagacagggcagagaattcatctggaacgacctgctgtccctggaaaccggcagcctgaagctggccaacggaagagtgatcgagaagacactgtacaacagaagaacccggcaggatgagcctgccctgttcgtggccctgaccttcgagcggcgggaggtcctggactcctccaatatcaaaccaatgaacctgatcggcgtggcaagaggcgaaaacatccccgccgtgatcgccctgaccgaccccgagggctgcccactgagccggtttaaggatagcctgggaaacccaacccacatcctgagaatcggcgagagctataaggagaagcagcggaccatccaggccaagaaggaggtggagcagcggagagccggcggctacagccggaagtacgccagcaaagccaagaatctggcagacgatatggtgagaaacaccgctagagatctgctgtactacgccgtgacccaggatgccatgctgatcttcgccaacctgagccggggcttcggccggcagggcaagcggaccttcatggccgagagacagtacacacggatggaggactggctgaccgccaagctggcctacgagggcctgagcaagacctacctgtccaagacactggcccagtacacctccaagacatgcagcaactgtgggtttaccatcaccagcgccgactacgacagggtgctggagaagctgaagaagacagcaacaggctggatgaccacaattaacggcaaggagctgaaggtggagggccagattacctactacaacagatacaagagacagaacgtagtcaaggacctgtccgtcgagctggatagactgagcgaagaatctgtgaacaacgacatctcctcctggacaaagggcagaagcggagaagctctgagcctcctgaagaaaagattctcccatagacccgtgcaggagaagttcgtgtgcctgaactgcggcttcgagacacacgcagccgagcaagccgccctgaacatcgccagatcctggctgttcctgcggagccaggagtacaagaaataccagacaaacaagacaaccggcaacaccgataagagagccttcgtcgagacctggcagtccttttaccggaagaagcttaaggaggtgtggaaacctgccgtgcggtctggcggatctggcggaggctcctttccaggagctggtgagcttcaaggacgtgaccgtgggcttcacccaggaggagtggcagcacctggaccccacccagaggagcctgtacagggacgtgatgctggagaactacagcaacctggtgagcgtgggctactgcgtgaccaagcccgaggtgatcttcaggctggagcagggcgaggagccctggatcctggaggaggagttccccaggcagagcttccccgaggtgtggaagatcggatctggctccggcagcggccccaagaaaaagagaaaagtctaagctgccttctgcggggcttgccttctggccatgcccttcttctctcccttgcacctgtacctcttggtctttgaataaagcctgagtaggaaggctagcaaaaaaaaaaaaaaaaaaaaaaaaaaaaaaaaaaaaaaaaaaaaaaaaaaaaaaaaaaaaaaaaaaaaaaaaaaaaaaaa

SEQ ID NO: 16774 - RNA, 9485 nt, synthetic construct
  source 1..9485: mol_type = other RNA
aggaaataagagagaaaagaagagtaagaagaaatataagagccaccatggcccctaagaagaagcgtaaagtgagccggatggaacgcctcgtctacgaggtgcggcagaagtgcagaaacatcgaggacatctgcatctcctgcggatctctgaacgtgaccctggagcacccactgttcatcggcggcatgtgccagaactgtaaaaactgttttctggagtgtgcctatcaatacgacgatgacggctaccagagctactgcaccatctgttgcggcggaagagaggtgctgatgtgtggaaataacaactgctgccggtgcttctgcgtggaatgcgtggacctgctggtgggccccggcgccgcccaggccgctattaaggaagatccttggaactgctacatgtgcggccacaagggcacatacggcctgctgagacggagagaggactggcctagcagactgcagatgttcttcgccaataaccacgaccaggagttcgacccccctaaggtgtaccctcccgtccccgccgagaagagaaagcccatccgggtcctgagcctgttcgatggcatcgccaccggtctgctggtgctgaaggacctgggcatccaggtggataggtacattgcctccgaggtgtgcgaggactccatcaccgtgggaatggtgcgtcatcagggcaagatcatgtacgtgggcgacgtgcggagcgtgacacagaagcatatccaggagtggggccctttcgacctggtgatcggcggcagcccttgcaatgacctgagcatcgtgaacccagcccggaagggcctgtacgagggaaccggcagactgttcttcgagttttacagactgctgcacgacgcccggcctaaggaaggcgacgaccggcccttcttttggctgttcgagaatgtggtggccatgggagtcagcgacaagcgggatattagccggttcctggagagcaaccccgtgatgatcgatgccaaggaagtgagcgccgcccaccgggccagatacttctggggcaatctgcctggcatgaacagacccctggccagcaccgtgaacgacaagctggagctgcaggagtgcctggagcacggccggatcgccaagttcagcaaggtgagaaccatcaccacccgaagcaacagcatcaaacaaggcaaggaccagcactttcctgtgttcatgaacgagaaggaggacatcctgtggtgtaccgagatggagagagtgttcgggttcccagtccactacacagatgtcagcaacatgtctagactggccagacagagactgctgggaagaagctggtccgtccctgtgatcagacacctgttcgcccctctgaaggagtacttcgcctgcgtgagcagcggcaacagcaacgccaacagccggggccccagcttctctagcggcctggtgccactgtccctgagagggagccacatgggccccatggagatctacaaaaccgtgagcgcctggaagcggcagcctgtgcgcgtgctgagcctgtttcggaatatcgataaagtcctgaaaagcctgggattcctggagagcggctctggctccggcggtggcaccctgaagtacgtggaggatgtgacaaacgtggtcagacgggatgtggagaagtggggccccttcgatctggtgtacggcagcacccaacccctgggcagctcttgtgaccggtgccctggctggtacatgtttcagttccaccggatcctgcagtacgccctgccgagacaggagtcccagcggccattcttttggattttcatggacaacttgctgctgaccgaggatgaccaggaaactaccactcggttcctgcagaccgaagccgtgaccctgcaggacgtgagaggccgggactaccagaacgccatgcgggtgtggtccaacatccctggactgaaaagcaagcacgcacctctgacccctaaagaagaggagtacctgcaggcccaggtgcggagcagaagcaagctggacgcccctaaggtggatctgctggtgaagaattgcctcctgcccctgagagagtacttcaagtatttcagccagaatagtctgcccctgggaggcagcggcggcggcgccctggtgacatttgaggacgtcgccgtgcggttcacccaggaggaatgggctctgctggatccttctcagaaaatcctgtaccgggacgtgatgagagagacataccggaatctgacctccgtgggcatcaactgggaatgttgggaccttgaagcctgcttcagaagcctgggaagaaacctgagagtgcaggtggtgaagagaaagtgcgagctgaccaacagcggcccctgcgccgagggcggcccaagcagcggcgcccctcctcccagcggcggcagcccagccggctccccaacctctaccgaggagggcacctctgagtccgccacccccgagagcggccctggcacctccaccgagcccagcgagggcagcgcacccggcagccctgccggcagccccacctccacagaggagggaaccagcaccgagcccagcgaaggcagcgccccaggcaccagcaccgagcctagtgagcaggagattaaacggatcaacaagatcagaagaagacttgtgaaagacagcaacaccaagaaggccggcaagacaggccccatgaaaaccctgctggttagagtgatgacacccgatctgagagagcggctggaaaacctgagaaagaagcctgaaaatatcccccagcccatcagcaatacatctagagccaacctgaataagctgctgaccgattacaccgaaatgaagaaggcgatcctgcatgtgtactgggaagagttccagaaggaccctgtgggcctgatgagccgggtggcccagcctgccagcaagaagatcgatcagaacaagctgaaacctgagatggacgagaagggcaacctgaccaccgccggctttgcctgctctcagtgtggccagcccctgttcgtgtacaagctggagcaggtgtctgagaagggcaaggcttacaccaactacttcggacggtgcaatgtggccgagcacgaaaagctgatcctgctggcccagctgaagcccgagaaggatagcgacgaagccgtgacatatagcctgggaaagtttgggcagagggccctggatttctacagcattcatgtgaccaaggagtccacccaccccgtgaagcccctggcccagatcgccggaaacagatacgcctccggacctgtgggaaaggccctgagcgacgcatgtatgggcacaatcgcctccttcctgtctaagtaccaggacatcatcatcgaacaccagaaggtggtgaagggcaaccagaagagactggagagcctgcgggagctggccggcaaggaaaacctggaataccctagcgtgaccctgccacctcagcctcacaccaaggagggcgttgatgcctacaacgaagtgatcgcccgggtgcgaatgtgggtgaacctgaacctgtggcagaagctgaagctaagcagagatgatgccaagcctctgctgagactgaagggattcccttcctttcctctggtcgagagacaggccaacgaagtggactggtgggacatggtgtgtaacgtgaagaagctgatcaacgagaaaaaggaggatggcaaggtgttttggcagaatctggctggctacaagagacaggaagccctgagaccatacctgagcagcgaggaagatcggaagaagggaaagaaattcgctcggtaccagctgggcgacctgctgctgcacctggaaaagaagcacggcgaggactggggaaaggtgtacgacgaggcctgggagcggattgacaagaaagtggaaggcctgagcaagcacatcaagctggaagaggaacggagaagcgaggacgcccagagcaaggccgccctgaccgactggctgcgggctaaggccagcttcgtgatcgagggcctgaaggaggccgacaaggacgagttctgcagatgcgagctgaagctgcagaagtggtacggggacctgcggggaaagcccttcgccatcgaagccgagaacagcatcctggacatcagcggcttcagcaagcagtacaactgtgccttcatctggcagaaggacggcgtgaagaagctgaacctgtacctgatcatcaactacttcaagggcggcaagctgcggttcaagaagatcaaacctgaagccttcgaagccaacagattctacaccgtgatcaacaaaaagagcggcgagatcgtgcccatggaggtgaacttcaacttcgacgaccccaacctgatcatcctgcctctggcctttggcaagagacagggcagagaattcatctggaacgacctgctgtccctggaaaccggcagcctgaagctggccaacggaagagtgatcgagaagacactgtacaacagaagaacccggcaggatgagcctgccctgttcgtggccctgaccttcgagcggcgggaggtcctggactcctccaatatcaaaccaatgaacctgatcggcgtggcaagaggcgaaaacatccccgccgtgatcgccctgaccgaccccgagggctgcccactgagccggtttaaggatagcctgggaaacccaacccacatcctgagaatcggcgagagctataaggagaagcagcggaccatccaggccaagaaggaggtggagcagcggagagccggcggctacagccggaagtacgccagcaaagccaagaatctggcagacgatatggtgagaaacaccgctagagatctgctgtactacgccgtgacccaggatgccatgctgatcttcgccaacctgagccggggcttcggccggcagggcaagcggaccttcatggccgagagacagtacacacggatggaggactggctgaccgccaagctggcctacgagggcctgagcaagacctacctgtccaagacactggcccagtacacctccaagacatgcagcaactgtgggtttaccatcaccagcgccgactacgacagggtgctggagaagctgaagaagacagcaacaggctggatgaccacaattaacggcaaggagctgaaggtggagggccagattacctactacaacagatacaagagacagaacgtagtcaaggacctgtccgtcgagctggatagactgagcgaagaatctgtgaacaacgacatctcctcctggacaaagggcagaagcggagaagctctgagcctcctgaagaaaagattctcccatagacccgtgcaggagaagttcgtgtgcctgaactgcggcttcgagacacacgcagccgagcaagccgccctgaacatcgccagatcctggctgttcctgcggagccaggagtacaagaaataccagacaaacaagacaaccggcaacaccgataagagagccttcgtcgagacctggcagtccttttaccggaagaagcttaaggaggtgtggaaacctgccgtgcggtctggcggatctggcggaggctccctgagggagagcgtgaccttcaaggacgtggccgtggacttcaccggcgaggagtggaggaggctggaccccgcccagagggccctgtacagggacgtgatgctggagaactacgagaacctggtgagcctgggcctgcccgtgagcaagctggacgtgatcagcctgctggagaggggcgaggccccctggtggctggagggcggcggcctgcagagcccctgcagcgacgccctgagccagggcggcccaagcagcggcgcccctcctcccagcggcggcagcccagccggctccccaacctctaccgaggagggcacctctgagtccgccacccccgagagcggccctggcacctccaccgagcccagcgagggcagcgcacccggcagccctgccggcagccccacctccacagaggagggaaccagcaccgagcccagcgaaggcagcgccccaggcaccagcaccgagcctagtgagcaggagattaaacggatcaacaagatcagaagaagacttgtgaaagacagcaacaccaagaaggccggcaagacaggccccatgaaaaccctgctggttagagtgatgacacccgatctgagagagcggctggaaaacctgagaaagaagcctgaaaatatcccccagcccatcagcaatacatctagagccaacctgaataagctgctgaccgattacaccgaaatgaagaaggcgatcctgcatgtgtactgggaagagttccagaaggaccctgtgggcctgatgagccgggtggcccagcctgccagcaagaagatcgatcagaacaagctgaaacctgagatggacgagaagggcaacctgaccaccgccggctttgcctgctctcagtgtggccagcccctgttcgtgtacaagctggagcaggtgtctgagaagggcaaggcttacaccaactacttcggacggtgcaatgtggccgagcacgaaaagctgatcctgctggcccagctgaagcccgagaaggatagcgacgaagccgtgacatatagcctgggaaagtttgggcagagggccctggatttctacagcattcatgtgaccaaggagtccacccaccccgtgaagcccctggcccagatcgccggaaacagatacgcctccggacctgtgggaaaggccctgagcgacgcatgtatgggcacaatcgcctccttcctgtctaagtaccaggacatcatcatcgaacaccagaaggtggtgaagggcaaccagaagagactggagagcctgcgggagctggccggcaaggaaaacctggaataccctagcgtgaccctgccacctcagcctcacaccaaggagggcgttgatgcctacaacgaagtgatcgcccgggtgcgaatgtgggtgaacctgaacctgtggcagaagctgaagctaagcagagatgatgccaagcctctgctgagactgaagggattcccttcctttcctctggtcgagagacaggccaacgaagtggactggtgggacatggtgtgtaacgtgaagaagctgatcaacgagaaaaaggaggatggcaaggtgttttggcagaatctggctggctacaagagacaggaagccctgagaccatacctgagcagcgaggaagatcggaagaagggaaagaaattcgctcggtaccagctgggcgacctgctgctgcacctggaaaagaagcacggcgaggactggggaaaggtgtacgacgaggcctgggagcggattgacaagaaagtggaaggcctgagcaagcacatcaagctggaagaggaacggagaagcgaggacgcccagagcaaggccgccctgaccgactggctgcgggctaaggccagcttcgtgatcgagggcctgaaggaggccgacaaggacgagttctgcagatgcgagctgaagctgcagaagtggtacggggacctgcggggaaagcccttcgccatcgaagccgagaacagcatcctggacatcagcggcttcagcaagcagtacaactgtgccttcatctggcagaaggacggcgtgaagaagctgaacctgtacctgatcatcaactacttcaagggcggcaagctgcggttcaagaagatcaaacctgaagccttcgaagccaacagattctacaccgtgatcaacaaaaagagcggcgagatcgtgcccatggaggtgaacttcaacttcgacgaccccaacctgatcatcctgcctctggcctttggcaagagacagggcagagaattcatctggaacgacctgctgtccctggaaaccggcagcctgaagctggccaacggaagagtgatcgagaagacactgtacaacagaagaacccggcaggatgagcctgccctgttcgtggccctgaccttcgagcggcgggaggtcctggactcctccaatatcaaaccaatgaacctgatcggcgtggcaagaggcgaaaacatccccgccgtgatcgccctgaccgaccccgagggctgcccactgagccggtttaaggatagcctgggaaacccaacccacatcctgagaatcggcgagagctataaggagaagcagcggaccatccaggccaagaaggaggtggagcagcggagagccggcggctacagccggaagtacgccagcaaagccaagaatctggcagacgatatggtgagaaacaccgctagagatctgctgtactacgccgtgacccaggatgccatgctgatcttcgccaacctgagccggggcttcggccggcagggcaagcggaccttcatggccgagagacagtacacacggatggaggactggctgaccgccaagctggcctacgagggcctgagcaagacctacctgtccaagacactggcccagtacacctccaagacatgcagcaactgtgggtttaccatcaccagcgccgactacgacagggtgctggagaagctgaagaagacagcaacaggctggatgaccacaattaacggcaaggagctgaaggtggagggccagattacctactacaacagatacaagagacagaacgtagtcaaggacctgtccgtcgagctggatagactgagcgaagaatctgtgaacaacgacatctcctcctggacaaagggcagaagcggagaagctctgagcctcctgaagaaaagattctcccatagacccgtgcaggagaagttcgtgtgcctgaactgcggcttcgagacacacgcagccgagcaagccgccctgaacatcgccagatcctggctgttcctgcggagccaggagtacaagaaataccagacaaacaagacaaccggcaacaccgataagagagccttcgtcgagacctggcagtccttttaccggaagaagcttaaggaggtgtggaaacctgccgtgcggtctggcggatctggcggaggctcctctgagggagagcgtgaccttcaaggacgtggccgtggacttcaccggcgaggagtggaggaggctggaccccgcccagagggccctgtacagggacgtgatgctggagaactacgagaacctggtgagcctgggcctgcccgtgagcaagctggacgtgatcagcctgctggagaggggcgaggccccctggtggctggagggcggcggcctgcagagcccctgcagcgacgccctgagccagggatctggctccggcagcggccccaagaaaaagagaaaagtctaagctgccttctgcggggcttgccttctggccatgcccttcttctctcccttgcacctgtacctcttggtctttgaataaagcctgagtaggaaggctagcaaaaaaaaaaaaaaaaaaaaaaaaaaaaaaaaaaaaaaaaaaaaaaaaaaaaaaaaaaaaaaaaaaaaaaaaaaaaaaaa

SEQ ID NO: 16775 - RNA, 9485 nt, synthetic construct
  source 1..9485: mol_type = other RNA
aggaaataagagagaaaagaagagtaagaagaaatataagagccaccatggcccctaagaagaagcgtaaagtgagccggatggaacgcctcgtctacgaggtgcggcagaagtgcagaaacatcgaggacatctgcatctcctgcggatctctgaacgtgaccctggagcacccactgttcatcggcggcatgtgccagaactgtaaaaactgttttctggagtgtgcctatcaatacgacgatgacggctaccagagctactgcaccatctgttgcggcggaagagaggtgctgatgtgtggaaataacaactgctgccggtgcttctgcgtggaatgcgtggacctgctggtgggccccggcgccgcccaggccgctattaaggaagatccttggaactgctacatgtgcggccacaagggcacatacggcctgctgagacggagagaggactggcctagcagactgcagatgttcttcgccaataaccacgaccaggagttcgacccccctaaggtgtaccctcccgtccccgccgagaagagaaagcccatccgggtcctgagcctgttcgatggcatcgccaccggtctgctggtgctgaaggacctgggcatccaggtggataggtacattgcctccgaggtgtgcgaggactccatcaccgtgggaatggtgcgtcatcagggcaagatcatgtacgtgggcgacgtgcggagcgtgacacagaagcatatccaggagtggggccctttcgacctggtgatcggcggcagcccttgcaatgacctgagcatcgtgaacccagcccggaagggcctgtacgagggaaccggcagactgttcttcgagttttacagactgctgcacgacgcccggcctaaggaaggcgacgaccggcccttcttttggctgttcgagaatgtggtggccatgggagtcagcgacaagcgggatattagccggttcctggagagcaaccccgtgatgatcgatgccaaggaagtgagcgccgcccaccgggccagatacttctggggcaatctgcctggcatgaacagacccctggccagcaccgtgaacgacaagctggagctgcaggagtgcctggagcacggccggatcgccaagttcagcaaggtgagaaccatcaccacccgaagcaacagcatcaaacaaggcaaggaccagcactttcctgtgttcatgaacgagaaggaggacatcctgtggtgtaccgagatggagagagtgttcgggttcccagtccactacacagatgtcagcaacatgtctagactggccagacagagactgctgggaagaagctggtccgtccctgtgatcagacacctgttcgcccctctgaaggagtacttcgcctgcgtgagcagcggcaacagcaacgccaacagccggggccccagcttctctagcggcctggtgccactgtccctgagagggagccacatgggccccatggagatctacaaaaccgtgagcgcctggaagcggcagcctgtgcgcgtgctgagcctgtttcggaatatcgataaagtcctgaaaagcctgggattcctggagagcggctctggctccggcggtggcaccctgaagtacgtggaggatgtgacaaacgtggtcagacgggatgtggagaagtggggccccttcgatctggtgtacggcagcacccaacccctgggcagctcttgtgaccggtgccctggctggtacatgtttcagttccaccggatcctgcagtacgccctgccgagacaggagtcccagcggccattcttttggattttcatggacaacttgctgctgaccgaggatgaccaggaaactaccactcggttcctgcagaccgaagccgtgaccctgcaggacgtgagaggccgggactaccagaacgccatgcgggtgtggtccaacatccctggactgaaaagcaagcacgcacctctgacccctaaagaagaggagtacctgcaggcccaggtgcggagcagaagcaagctggacgcccctaaggtggatctgctggtgaagaattgcctcctgcccctgagagagtacttcaagtatttcagccagaatagtctgcccctgggaggcagcggcggcggcgccctggtgacatttgaggacgtcgccgtgcggttcacccaggaggaatgggctctgctggatccttctcagaaaatcctgtaccgggacgtgatgagagagacataccggaatctgacctccgtgggcatcaactgggaatgttgggaccttgaagcctgcttcagaagcctgggaagaaacctgagagtgcaggtggtgaagagaaagtgcgagctgaccaacagcggcccctgcgccgagggcggcccaagcagcggcgcccctcctcccagcggcggcagcccagccggctccccaacctctaccgaggagggcacctctgagtccgccacccccgagagcggccctggcacctccaccgagcccagcgagggcagcgcacccggcagccctgccggcagccccacctccacagaggagggaaccagcaccgagcccagcgaaggcagcgccccaggcaccagcaccgagcctagtgagcaggagattaaacggatcaacaagatcagaagaagacttgtgaaagacagcaacaccaagaaggccggcaagacaggccccatgaaaaccctgctggttagagtgatgacacccgatctgagagagcggctggaaaacctgagaaagaagcctgaaaatatcccccagcccatcagcaatacatctagagccaacctgaataagctgctgaccgattacaccgaaatgaagaaggcgatcctgcatgtgtactgggaagagttccagaaggaccctgtgggcctgatgagccgggtggcccagcctgccagcaagaagatcgatcagaacaagctgaaacctgagatggacgagaagggcaacctgaccaccgccggctttgcctgctctcagtgtggccagcccctgttcgtgtacaagctggagcaggtgtctgagaagggcaaggcttacaccaactacttcggacggtgcaatgtggccgagcacgaaaagctgatcctgctggcccagctgaagcccgagaaggatagcgacgaagccgtgacatatagcctgggaaagtttgggcagagggccctggatttctacagcattcatgtgaccaaggagtccacccaccccgtgaagcccctggcccagatcgccggaaacagatacgcctccggacctgtgggaaaggccctgagcgacgcatgtatgggcacaatcgcctccttcctgtctaagtaccaggacatcatcatcgaacaccagaaggtggtgaagggcaaccagaagagactggagagcctgcgggagctggccggcaaggaaaacctggaataccctagcgtgaccctgccacctcagcctcacaccaaggagggcgttgatgcctacaacgaagtgatcgcccgggtgcgaatgtgggtgaacctgaacctgtggcagaagctgaagctaagcagagatgatgccaagcctctgctgagactgaagggattcccttcctttcctctggtcgagagacaggccaacgaagtggactggtgggacatggtgtgtaacgtgaagaagctgatcaacgagaaaaaggaggatggcaaggtgttttggcagaatctggctggctacaagagacaggaagccctgagaccatacctgagcagcgaggaagatcggaagaagggaaagaaattcgctcggtaccagctgggcgacctgctgctgcacctggaaaagaagcacggcgaggactggggaaaggtgtacgacgaggcctgggagcggattgacaagaaagtggaaggcctgagcaagcacatcaagctggaagaggaacggagaagcgaggacgcccagagcaaggccgccctgaccgactggctgcgggctaaggccagcttcgtgatcgagggcctgaaggaggccgacaaggacgagttctgcagatgcgagctgaagctgcagaagtggtacggggacctgcggggaaagcccttcgccatcgaagccgagaacagcatcctggacatcagcggcttcagcaagcagtacaactgtgccttcatctggcagaaggacggcgtgaagaagctgaacctgtacctgatcatcaactacttcaagggcggcaagctgcggttcaagaagatcaaacctgaagccttcgaagccaacagattctacaccgtgatcaacaaaaagagcggcgagatcgtgcccatggaggtgaacttcaacttcgacgaccccaacctgatcatcctgcctctggcctttggcaagagacagggcagagaattcatctggaacgacctgctgtccctggaaaccggcagcctgaagctggccaacggaagagtgatcgagaagacactgtacaacagaagaacccggcaggatgagcctgccctgttcgtggccctgaccttcgagcggcgggaggtcctggactcctccaatatcaaaccaatgaacctgatcggcgtggcaagaggcgaaaacatccccgccgtgatcgccctgaccgaccccgagggctgcccactgagccggtttaaggatagcctgggaaacccaacccacatcctgagaatcggcgagagctataaggagaagcagcggaccatccaggccaagaaggaggtggagcagcggagagccggcggctacagccggaagtacgccagcaaagccaagaatctggcagacgatatggtgagaaacaccgctagagatctgctgtactacgccgtgacccaggatgccatgctgatcttcgccaacctgagccggggcttcggccggcagggcaagcggaccttcatggccgagagacagtacacacggatggaggactggctgaccgccaagctggcctacgagggcctgagcaagacctacctgtccaagacactggcccagtacacctccaagacatgcagcaactgtgggtttaccatcaccagcgccgactacgacagggtgctggagaagctgaagaagacagcaacaggctggatgaccacaattaacggcaaggagctgaaggtggagggccagattacctactacaacagatacaagagacagaacgtagtcaaggacctgtccgtcgagctggatagactgagcgaagaatctgtgaacaacgacatctcctcctggacaaagggcagaagcggagaagctctgagcctcctgaagaaaagattctcccatagacccgtgcaggagaagttcgtgtgcctgaactgcggcttcgagacacacgcagccgagcaagccgccctgaacatcgccagatcctggctgttcctgcggagccaggagtacaagaaataccagacaaacaagacaaccggcaacaccgataagagagccttcgtcgagacctggcagtccttttaccggaagaagcttaaggaggtgtggaaacctgccgtgcggtctggcggatctggcggaggctccttccagggccccgtgaccttcgaggaggtggccgtgtacttcaccagcgaggagtgggccctgctggaccccacccagagggccctgtactgggacgtgatgcaggagaactacgagaacgtgaccagcctgggcttccccgtgagcaagccccacatcatcagccagctggagcagggcgccgagccctgggtgcccgacctgcagggcagcgaggagatcctgagcaagcaccagaggatcggcggcccaagcagcggcgcccctcctcccagcggcggcagcccagccggctccccaacctctaccgaggagggcacctctgagtccgccacccccgagagcggccctggcacctccaccgagcccagcgagggcagcgcacccggcagccctgccggcagccccacctccacagaggagggaaccagcaccgagcccagcgaaggcagcgccccaggcaccagcaccgagcctagtgagcaggagattaaacggatcaacaagatcagaagaagacttgtgaaagacagcaacaccaagaaggccggcaagacaggccccatgaaaaccctgctggttagagtgatgacacccgatctgagagagcggctggaaaacctgagaaagaagcctgaaaatatcccccagcccatcagcaatacatctagagccaacctgaataagctgctgaccgattacaccgaaatgaagaaggcgatcctgcatgtgtactgggaagagttccagaaggaccctgtgggcctgatgagccgggtggcccagcctgccagcaagaagatcgatcagaacaagctgaaacctgagatggacgagaagggcaacctgaccaccgccggctttgcctgctctcagtgtggccagcccctgttcgtgtacaagctggagcaggtgtctgagaagggcaaggcttacaccaactacttcggacggtgcaatgtggccgagcacgaaaagctgatcctgctggcccagctgaagcccgagaaggatagcgacgaagccgtgacatatagcctgggaaagtttgggcagagggccctggatttctacagcattcatgtgaccaaggagtccacccaccccgtgaagcccctggcccagatcgccggaaacagatacgcctccggacctgtgggaaaggccctgagcgacgcatgtatgggcacaatcgcctccttcctgtctaagtaccaggacatcatcatcgaacaccagaaggtggtgaagggcaaccagaagagactggagagcctgcgggagctggccggcaaggaaaacctggaataccctagcgtgaccctgccacctcagcctcacaccaaggagggcgttgatgcctacaacgaagtgatcgcccgggtgcgaatgtgggtgaacctgaacctgtggcagaagctgaagctaagcagagatgatgccaagcctctgctgagactgaagggattcccttcctttcctctggtcgagagacaggccaacgaagtggactggtgggacatggtgtgtaacgtgaagaagctgatcaacgagaaaaaggaggatggcaaggtgttttggcagaatctggctggctacaagagacaggaagccctgagaccatacctgagcagcgaggaagatcggaagaagggaaagaaattcgctcggtaccagctgggcgacctgctgctgcacctggaaaagaagcacggcgaggactggggaaaggtgtacgacgaggcctgggagcggattgacaagaaagtggaaggcctgagcaagcacatcaagctggaagaggaacggagaagcgaggacgcccagagcaaggccgccctgaccgactggctgcgggctaaggccagcttcgtgatcgagggcctgaaggaggccgacaaggacgagttctgcagatgcgagctgaagctgcagaagtggtacggggacctgcggggaaagcccttcgccatcgaagccgagaacagcatcctggacatcagcggcttcagcaagcagtacaactgtgccttcatctggcagaaggacggcgtgaagaagctgaacctgtacctgatcatcaactacttcaagggcggcaagctgcggttcaagaagatcaaacctgaagccttcgaagccaacagattctacaccgtgatcaacaaaaagagcggcgagatcgtgcccatggaggtgaacttcaacttcgacgaccccaacctgatcatcctgcctctggcctttggcaagagacagggcagagaattcatctggaacgacctgctgtccctggaaaccggcagcctgaagctggccaacggaagagtgatcgagaagacactgtacaacagaagaacccggcaggatgagcctgccctgttcgtggccctgaccttcgagcggcgggaggtcctggactcctccaatatcaaaccaatgaacctgatcggcgtggcaagaggcgaaaacatccccgccgtgatcgccctgaccgaccccgagggctgcccactgagccggtttaaggatagcctgggaaacccaacccacatcctgagaatcggcgagagctataaggagaagcagcggaccatccaggccaagaaggaggtggagcagcggagagccggcggctacagccggaagtacgccagcaaagccaagaatctggcagacgatatggtgagaaacaccgctagagatctgctgtactacgccgtgacccaggatgccatgctgatcttcgccaacctgagccggggcttcggccggcagggcaagcggaccttcatggccgagagacagtacacacggatggaggactggctgaccgccaagctggcctacgagggcctgagcaagacctacctgtccaagacactggcccagtacacctccaagacatgcagcaactgtgggtttaccatcaccagcgccgactacgacagggtgctggagaagctgaagaagacagcaacaggctggatgaccacaattaacggcaaggagctgaaggtggagggccagattacctactacaacagatacaagagacagaacgtagtcaaggacctgtccgtcgagctggatagactgagcgaagaatctgtgaacaacgacatctcctcctggacaaagggcagaagcggagaagctctgagcctcctgaagaaaagattctcccatagacccgtgcaggagaagttcgtgtgcctgaactgcggcttcgagacacacgcagccgagcaagccgccctgaacatcgccagatcctggctgttcctgcggagccaggagtacaagaaataccagacaaacaagacaaccggcaacaccgataagagagccttcgtcgagacctggcagtccttttaccggaagaagcttaaggaggtgtggaaacctgccgtgcggtctggcggatctggcggaggctcctttccagggccccgtgaccttcgaggaggtggccgtgtacttcaccagcgaggagtgggccctgctggaccccacccagagggccctgtactgggacgtgatgcaggagaactacgagaacgtgaccagcctgggcttccccgtgagcaagccccacatcatcagccagctggagcagggcgccgagccctgggtgcccgacctgcagggcagcgaggagatcctgagcaagcaccagaggatcggatctggctccggcagcggccccaagaaaaagagaaaagtctaagctgccttctgcggggcttgccttctggccatgcccttcttctctcccttgcacctgtacctcttggtctttgaataaagcctgagtaggaaggctagcaaaaaaaaaaaaaaaaaaaaaaaaaaaaaaaaaaaaaaaaaaaaaaaaaaaaaaaaaaaaaaaaaaaaaaaaaaaaaaaa

SEQ ID NO: 16776 - RNA, 9485 nt, synthetic construct
  source 1..9485: mol_type = other RNA
aggaaataagagagaaaagaagagtaagaagaaatataagagccaccatggcccctaagaagaagcgtaaagtgagccggatggaacgcctcgtctacgaggtgcggcagaagtgcagaaacatcgaggacatctgcatctcctgcggatctctgaacgtgaccctggagcacccactgttcatcggcggcatgtgccagaactgtaaaaactgttttctggagtgtgcctatcaatacgacgatgacggctaccagagctactgcaccatctgttgcggcggaagagaggtgctgatgtgtggaaataacaactgctgccggtgcttctgcgtggaatgcgtggacctgctggtgggccccggcgccgcccaggccgctattaaggaagatccttggaactgctacatgtgcggccacaagggcacatacggcctgctgagacggagagaggactggcctagcagactgcagatgttcttcgccaataaccacgaccaggagttcgacccccctaaggtgtaccctcccgtccccgccgagaagagaaagcccatccgggtcctgagcctgttcgatggcatcgccaccggtctgctggtgctgaaggacctgggcatccaggtggataggtacattgcctccgaggtgtgcgaggactccatcaccgtgggaatggtgcgtcatcagggcaagatcatgtacgtgggcgacgtgcggagcgtgacacagaagcatatccaggagtggggccctttcgacctggtgatcggcggcagcccttgcaatgacctgagcatcgtgaacccagcccggaagggcctgtacgagggaaccggcagactgttcttcgagttttacagactgctgcacgacgcccggcctaaggaaggcgacgaccggcccttcttttggctgttcgagaatgtggtggccatgggagtcagcgacaagcgggatattagccggttcctggagagcaaccccgtgatgatcgatgccaaggaagtgagcgccgcccaccgggccagatacttctggggcaatctgcctggcatgaacagacccctggccagcaccgtgaacgacaagctggagctgcaggagtgcctggagcacggccggatcgccaagttcagcaaggtgagaaccatcaccacccgaagcaacagcatcaaacaaggcaaggaccagcactttcctgtgttcatgaacgagaaggaggacatcctgtggtgtaccgagatggagagagtgttcgggttcccagtccactacacagatgtcagcaacatgtctagactggccagacagagactgctgggaagaagctggtccgtccctgtgatcagacacctgttcgcccctctgaaggagtacttcgcctgcgtgagcagcggcaacagcaacgccaacagccggggccccagcttctctagcggcctggtgccactgtccctgagagggagccacatgggccccatggagatctacaaaaccgtgagcgcctggaagcggcagcctgtgcgcgtgctgagcctgtttcggaatatcgataaagtcctgaaaagcctgggattcctggagagcggctctggctccggcggtggcaccctgaagtacgtggaggatgtgacaaacgtggtcagacgggatgtggagaagtggggccccttcgatctggtgtacggcagcacccaacccctgggcagctcttgtgaccggtgccctggctggtacatgtttcagttccaccggatcctgcagtacgccctgccgagacaggagtcccagcggccattcttttggattttcatggacaacttgctgctgaccgaggatgaccaggaaactaccactcggttcctgcagaccgaagccgtgaccctgcaggacgtgagaggccgggactaccagaacgccatgcgggtgtggtccaacatccctggactgaaaagcaagcacgcacctctgacccctaaagaagaggagtacctgcaggcccaggtgcggagcagaagcaagctggacgcccctaaggtggatctgctggtgaagaattgcctcctgcccctgagagagtacttcaagtatttcagccagaatagtctgcccctgggaggcagcggcggcggcgccctggtgacatttgaggacgtcgccgtgcggttcacccaggaggaatgggctctgctggatccttctcagaaaatcctgtaccgggacgtgatgagagagacataccggaatctgacctccgtgggcatcaactgggaatgttgggaccttgaagcctgcttcagaagcctgggaagaaacctgagagtgcaggtggtgaagagaaagtgcgagctgaccaacagcggcccctgcgccgagggcggcccaagcagcggcgcccctcctcccagcggcggcagcccagccggctccccaacctctaccgaggagggcacctctgagtccgccacccccgagagcggccctggcacctccaccgagcccagcgagggcagcgcacccggcagccctgccggcagccccacctccacagaggagggaaccagcaccgagcccagcgaaggcagcgccccaggcaccagcaccgagcctagtgagcaggagattaaacggatcaacaagatcagaagaagacttgtgaaagacagcaacaccaagaaggccggcaagacaggccccatgaaaaccctgctggttagagtgatgacacccgatctgagagagcggctggaaaacctgagaaagaagcctgaaaatatcccccagcccatcagcaatacatctagagccaacctgaataagctgctgaccgattacaccgaaatgaagaaggcgatcctgcatgtgtactgggaagagttccagaaggaccctgtgggcctgatgagccgggtggcccagcctgccagcaagaagatcgatcagaacaagctgaaacctgagatggacgagaagggcaacctgaccaccgccggctttgcctgctctcagtgtggccagcccctgttcgtgtacaagctggagcaggtgtctgagaagggcaaggcttacaccaactacttcggacggtgcaatgtggccgagcacgaaaagctgatcctgctggcccagctgaagcccgagaaggatagcgacgaagccgtgacatatagcctgggaaagtttgggcagagggccctggatttctacagcattcatgtgaccaaggagtccacccaccccgtgaagcccctggcccagatcgccggaaacagatacgcctccggacctgtgggaaaggccctgagcgacgcatgtatgggcacaatcgcctccttcctgtctaagtaccaggacatcatcatcgaacaccagaaggtggtgaagggcaaccagaagagactggagagcctgcgggagctggccggcaaggaaaacctggaataccctagcgtgaccctgccacctcagcctcacaccaaggagggcgttgatgcctacaacgaagtgatcgcccgggtgcgaatgtgggtgaacctgaacctgtggcagaagctgaagctaagcagagatgatgccaagcctctgctgagactgaagggattcccttcctttcctctggtcgagagacaggccaacgaagtggactggtgggacatggtgtgtaacgtgaagaagctgatcaacgagaaaaaggaggatggcaaggtgttttggcagaatctggctggctacaagagacaggaagccctgagaccatacctgagcagcgaggaagatcggaagaagggaaagaaattcgctcggtaccagctgggcgacctgctgctgcacctggaaaagaagcacggcgaggactggggaaaggtgtacgacgaggcctgggagcggattgacaagaaagtggaaggcctgagcaagcacatcaagctggaagaggaacggagaagcgaggacgcccagagcaaggccgccctgaccgactggctgcgggctaaggccagcttcgtgatcgagggcctgaaggaggccgacaaggacgagttctgcagatgcgagctgaagctgcagaagtggtacggggacctgcggggaaagcccttcgccatcgaagccgagaacagcatcctggacatcagcggcttcagcaagcagtacaactgtgccttcatctggcagaaggacggcgtgaagaagctgaacctgtacctgatcatcaactacttcaagggcggcaagctgcggttcaagaagatcaaacctgaagccttcgaagccaacagattctacaccgtgatcaacaaaaagagcggcgagatcgtgcccatggaggtgaacttcaacttcgacgaccccaacctgatcatcctgcctctggcctttggcaagagacagggcagagaattcatctggaacgacctgctgtccctggaaaccggcagcctgaagctggccaacggaagagtgatcgagaagacactgtacaacagaagaacccggcaggatgagcctgccctgttcgtggccctgaccttcgagcggcgggaggtcctggactcctccaatatcaaaccaatgaacctgatcggcgtggcaagaggcgaaaacatccccgccgtgatcgccctgaccgaccccgagggctgcccactgagccggtttaaggatagcctgggaaacccaacccacatcctgagaatcggcgagagctataaggagaagcagcggaccatccaggccaagaaggaggtggagcagcggagagccggcggctacagccggaagtacgccagcaaagccaagaatctggcagacgatatggtgagaaacaccgctagagatctgctgtactacgccgtgacccaggatgccatgctgatcttcgccaacctgagccggggcttcggccggcagggcaagcggaccttcatggccgagagacagtacacacggatggaggactggctgaccgccaagctggcctacgagggcctgagcaagacctacctgtccaagacactggcccagtacacctccaagacatgcagcaactgtgggtttaccatcaccagcgccgactacgacagggtgctggagaagctgaagaagacagcaacaggctggatgaccacaattaacggcaaggagctgaaggtggagggccagattacctactacaacagatacaagagacagaacgtagtcaaggacctgtccgtcgagctggatagactgagcgaagaatctgtgaacaacgacatctcctcctggacaaagggcagaagcggagaagctctgagcctcctgaagaaaagattctcccatagacccgtgcaggagaagttcgtgtgcctgaactgcggcttcgagacacacgcagccgagcaagccgccctgaacatcgccagatcctggctgttcctgcggagccaggagtacaagaaataccagacaaacaagacaaccggcaacaccgataagagagccttcgtcgagacctggcagtccttttaccggaagaagcttaaggaggtgtggaaacctgccgtgcggtctggcggatctggcggaggctccccccaggagcccgtgaccttcgccgacgtggccgtgctgttcacccccgaggagtggctgttcctggacagcgcccagaagagcctgtacagggacgtgatgctggagaactacaggaacctggccagcgtgggcgaccagctgtgcaagaccaggatgagcagccacatggagcagagggaggagctgtgcgtgaccgagaggggcgtgttccccggcgcccacctgggcccccacctgcagggcggcccaagcagcggcgcccctcctcccagcggcggcagcccagccggctccccaacctctaccgaggagggcacctctgagtccgccacccccgagagcggccctggcacctccaccgagcccagcgagggcagcgcacccggcagccctgccggcagccccacctccacagaggagggaaccagcaccgagcccagcgaaggcagcgccccaggcaccagcaccgagcctagtgagcaggagattaaacggatcaacaagatcagaagaagacttgtgaaagacagcaacaccaagaaggccggcaagacaggccccatgaaaaccctgctggttagagtgatgacacccgatctgagagagcggctggaaaacctgagaaagaagcctgaaaatatcccccagcccatcagcaatacatctagagccaacctgaataagctgctgaccgattacaccgaaatgaagaaggcgatcctgcatgtgtactgggaagagttccagaaggaccctgtgggcctgatgagccgggtggcccagcctgccagcaagaagatcgatcagaacaagctgaaacctgagatggacgagaagggcaacctgaccaccgccggctttgcctgctctcagtgtggccagcccctgttcgtgtacaagctggagcaggtgtctgagaagggcaaggcttacaccaactacttcggacggtgcaatgtggccgagcacgaaaagctgatcctgctggcccagctgaagcccgagaaggatagcgacgaagccgtgacatatagcctgggaaagtttgggcagagggccctggatttctacagcattcatgtgaccaaggagtccacccaccccgtgaagcccctggcccagatcgccggaaacagatacgcctccggacctgtgggaaaggccctgagcgacgcatgtatgggcacaatcgcctccttcctgtctaagtaccaggacatcatcatcgaacaccagaaggtggtgaagggcaaccagaagagactggagagcctgcgggagctggccggcaaggaaaacctggaataccctagcgtgaccctgccacctcagcctcacaccaaggagggcgttgatgcctacaacgaagtgatcgcccgggtgcgaatgtgggtgaacctgaacctgtggcagaagctgaagctaagcagagatgatgccaagcctctgctgagactgaagggattcccttcctttcctctggtcgagagacaggccaacgaagtggactggtgggacatggtgtgtaacgtgaagaagctgatcaacgagaaaaaggaggatggcaaggtgttttggcagaatctggctggctacaagagacaggaagccctgagaccatacctgagcagcgaggaagatcggaagaagggaaagaaattcgctcggtaccagctgggcgacctgctgctgcacctggaaaagaagcacggcgaggactggggaaaggtgtacgacgaggcctgggagcggattgacaagaaagtggaaggcctgagcaagcacatcaagctggaagaggaacggagaagcgaggacgcccagagcaaggccgccctgaccgactggctgcgggctaaggccagcttcgtgatcgagggcctgaaggaggccgacaaggacgagttctgcagatgcgagctgaagctgcagaagtggtacggggacctgcggggaaagcccttcgccatcgaagccgagaacagcatcctggacatcagcggcttcagcaagcagtacaactgtgccttcatctggcagaaggacggcgtgaagaagctgaacctgtacctgatcatcaactacttcaagggcggcaagctgcggttcaagaagatcaaacctgaagccttcgaagccaacagattctacaccgtgatcaacaaaaagagcggcgagatcgtgcccatggaggtgaacttcaacttcgacgaccccaacctgatcatcctgcctctggcctttggcaagagacagggcagagaattcatctggaacgacctgctgtccctggaaaccggcagcctgaagctggccaacggaagagtgatcgagaagacactgtacaacagaagaacccggcaggatgagcctgccctgttcgtggccctgaccttcgagcggcgggaggtcctggactcctccaatatcaaaccaatgaacctgatcggcgtggcaagaggcgaaaacatccccgccgtgatcgccctgaccgaccccgagggctgcccactgagccggtttaaggatagcctgggaaacccaacccacatcctgagaatcggcgagagctataaggagaagcagcggaccatccaggccaagaaggaggtggagcagcggagagccggcggctacagccggaagtacgccagcaaagccaagaatctggcagacgatatggtgagaaacaccgctagagatctgctgtactacgccgtgacccaggatgccatgctgatcttcgccaacctgagccggggcttcggccggcagggcaagcggaccttcatggccgagagacagtacacacggatggaggactggctgaccgccaagctggcctacgagggcctgagcaagacctacctgtccaagacactggcccagtacacctccaagacatgcagcaactgtgggtttaccatcaccagcgccgactacgacagggtgctggagaagctgaagaagacagcaacaggctggatgaccacaattaacggcaaggagctgaaggtggagggccagattacctactacaacagatacaagagacagaacgtagtcaaggacctgtccgtcgagctggatagactgagcgaagaatctgtgaacaacgacatctcctcctggacaaagggcagaagcggagaagctctgagcctcctgaagaaaagattctcccatagacccgtgcaggagaagttcgtgtgcctgaactgcggcttcgagacacacgcagccgagcaagccgccctgaacatcgccagatcctggctgttcctgcggagccaggagtacaagaaataccagacaaacaagacaaccggcaacaccgataagagagccttcgtcgagacctggcagtccttttaccggaagaagcttaaggaggtgtggaaacctgccgtgcggtctggcggatctggcggaggctcctccccaggagcccgtgaccttcgccgacgtggccgtgctgttcacccccgaggagtggctgttcctggacagcgcccagaagagcctgtacagggacgtgatgctggagaactacaggaacctggccagcgtgggcgaccagctgtgcaagaccaggatgagcagccacatggagcagagggaggagctgtgcgtgaccgagaggggcgtgttccccggcgcccacctgggcccccacctgcagggatctggctccggcagcggccccaagaaaaagagaaaagtctaagctgccttctgcggggcttgccttctggccatgcccttcttctctcccttgcacctgtacctcttggtctttgaataaagcctgagtaggaaggctagcaaaaaaaaaaaaaaaaaaaaaaaaaaaaaaaaaaaaaaaaaaaaaaaaaaaaaaaaaaaaaaaaaaaaaaaaaaaaaaaa

SEQ ID NO: 16777 - RNA, 9485 nt, synthetic construct
  source 1..9485: mol_type = other RNA
aggaaataagagagaaaagaagagtaagaagaaatataagagccaccatggcccctaagaagaagcgtaaagtgagccggatggaacgcctcgtctacgaggtgcggcagaagtgcagaaacatcgaggacatctgcatctcctgcggatctctgaacgtgaccctggagcacccactgttcatcggcggcatgtgccagaactgtaaaaactgttttctggagtgtgcctatcaatacgacgatgacggctaccagagctactgcaccatctgttgcggcggaagagaggtgctgatgtgtggaaataacaactgctgccggtgcttctgcgtggaatgcgtggacctgctggtgggccccggcgccgcccaggccgctattaaggaagatccttggaactgctacatgtgcggccacaagggcacatacggcctgctgagacggagagaggactggcctagcagactgcagatgttcttcgccaataaccacgaccaggagttcgacccccctaaggtgtaccctcccgtccccgccgagaagagaaagcccatccgggtcctgagcctgttcgatggcatcgccaccggtctgctggtgctgaaggacctgggcatccaggtggataggtacattgcctccgaggtgtgcgaggactccatcaccgtgggaatggtgcgtcatcagggcaagatcatgtacgtgggcgacgtgcggagcgtgacacagaagcatatccaggagtggggccctttcgacctggtgatcggcggcagcccttgcaatgacctgagcatcgtgaacccagcccggaagggcctgtacgagggaaccggcagactgttcttcgagttttacagactgctgcacgacgcccggcctaaggaaggcgacgaccggcccttcttttggctgttcgagaatgtggtggccatgggagtcagcgacaagcgggatattagccggttcctggagagcaaccccgtgatgatcgatgccaaggaagtgagcgccgcccaccgggccagatacttctggggcaatctgcctggcatgaacagacccctggccagcaccgtgaacgacaagctggagctgcaggagtgcctggagcacggccggatcgccaagttcagcaaggtgagaaccatcaccacccgaagcaacagcatcaaacaaggcaaggaccagcactttcctgtgttcatgaacgagaaggaggacatcctgtggtgtaccgagatggagagagtgttcgggttcccagtccactacacagatgtcagcaacatgtctagactggccagacagagactgctgggaagaagctggtccgtccctgtgatcagacacctgttcgcccctctgaaggagtacttcgcctgcgtgagcagcggcaacagcaacgccaacagccggggccccagcttctctagcggcctggtgccactgtccctgagagggagccacatgggccccatggagatctacaaaaccgtgagcgcctggaagcggcagcctgtgcgcgtgctgagcctgtttcggaatatcgataaagtcctgaaaagcctgggattcctggagagcggctctggctccggcggtggcaccctgaagtacgtggaggatgtgacaaacgtggtcagacgggatgtggagaagtggggccccttcgatctggtgtacggcagcacccaacccctgggcagctcttgtgaccggtgccctggctggtacatgtttcagttccaccggatcctgcagtacgccctgccgagacaggagtcccagcggccattcttttggattttcatggacaacttgctgctgaccgaggatgaccaggaaactaccactcggttcctgcagaccgaagccgtgaccctgcaggacgtgagaggccgggactaccagaacgccatgcgggtgtggtccaacatccctggactgaaaagcaagcacgcacctctgacccctaaagaagaggagtacctgcaggcccaggtgcggagcagaagcaagctggacgcccctaaggtggatctgctggtgaagaattgcctcctgcccctgagagagtacttcaagtatttcagccagaatagtctgcccctgggaggcagcggcggcggcgccctggtgacatttgaggacgtcgccgtgcggttcacccaggaggaatgggctctgctggatccttctcagaaaatcctgtaccgggacgtgatgagagagacataccggaatctgacctccgtgggcatcaactgggaatgttgggaccttgaagcctgcttcagaagcctgggaagaaacctgagagtgcaggtggtgaagagaaagtgcgagctgaccaacagcggcccctgcgccgagggcggcccaagcagcggcgcccctcctcccagcggcggcagcccagccggctccccaacctctaccgaggagggcacctctgagtccgccacccccgagagcggccctggcacctccaccgagcccagcgagggcagcgcacccggcagccctgccggcagccccacctccacagaggagggaaccagcaccgagcccagcgaaggcagcgccccaggcaccagcaccgagcctagtgagcaggagattaaacggatcaacaagatcagaagaagacttgtgaaagacagcaacaccaagaaggccggcaagacaggccccatgaaaaccctgctggttagagtgatgacacccgatctgagagagcggctggaaaacctgagaaagaagcctgaaaatatcccccagcccatcagcaatacatctagagccaacctgaataagctgctgaccgattacaccgaaatgaagaaggcgatcctgcatgtgtactgggaagagttccagaaggaccctgtgggcctgatgagccgggtggcccagcctgccagcaagaagatcgatcagaacaagctgaaacctgagatggacgagaagggcaacctgaccaccgccggctttgcctgctctcagtgtggccagcccctgttcgtgtacaagctggagcaggtgtctgagaagggcaaggcttacaccaactacttcggacggtgcaatgtggccgagcacgaaaagctgatcctgctggcccagctgaagcccgagaaggatagcgacgaagccgtgacatatagcctgggaaagtttgggcagagggccctggatttctacagcattcatgtgaccaaggagtccacccaccccgtgaagcccctggcccagatcgccggaaacagatacgcctccggacctgtgggaaaggccctgagcgacgcatgtatgggcacaatcgcctccttcctgtctaagtaccaggacatcatcatcgaacaccagaaggtggtgaagggcaaccagaagagactggagagcctgcgggagctggccggcaaggaaaacctggaataccctagcgtgaccctgccacctcagcctcacaccaaggagggcgttgatgcctacaacgaagtgatcgcccgggtgcgaatgtgggtgaacctgaacctgtggcagaagctgaagctaagcagagatgatgccaagcctctgctgagactgaagggattcccttcctttcctctggtcgagagacaggccaacgaagtggactggtgggacatggtgtgtaacgtgaagaagctgatcaacgagaaaaaggaggatggcaaggtgttttggcagaatctggctggctacaagagacaggaagccctgagaccatacctgagcagcgaggaagatcggaagaagggaaagaaattcgctcggtaccagctgggcgacctgctgctgcacctggaaaagaagcacggcgaggactggggaaaggtgtacgacgaggcctgggagcggattgacaagaaagtggaaggcctgagcaagcacatcaagctggaagaggaacggagaagcgaggacgcccagagcaaggccgccctgaccgactggctgcgggctaaggccagcttcgtgatcgagggcctgaaggaggccgacaaggacgagttctgcagatgcgagctgaagctgcagaagtggtacggggacctgcggggaaagcccttcgccatcgaagccgagaacagcatcctggacatcagcggcttcagcaagcagtacaactgtgccttcatctggcagaaggacggcgtgaagaagctgaacctgtacctgatcatcaactacttcaagggcggcaagctgcggttcaagaagatcaaacctgaagccttcgaagccaacagattctacaccgtgatcaacaaaaagagcggcgagatcgtgcccatggaggtgaacttcaacttcgacgaccccaacctgatcatcctgcctctggcctttggcaagagacagggcagagaattcatctggaacgacctgctgtccctggaaaccggcagcctgaagctggccaacggaagagtgatcgagaagacactgtacaacagaagaacccggcaggatgagcctgccctgttcgtggccctgaccttcgagcggcgggaggtcctggactcctccaatatcaaaccaatgaacctgatcggcgtggcaagaggcgaaaacatccccgccgtgatcgccctgaccgaccccgagggctgcccactgagccggtttaaggatagcctgggaaacccaacccacatcctgagaatcggcgagagctataaggagaagcagcggaccatccaggccaagaaggaggtggagcagcggagagccggcggctacagccggaagtacgccagcaaagccaagaatctggcagacgatatggtgagaaacaccgctagagatctgctgtactacgccgtgacccaggatgccatgctgatcttcgccaacctgagccggggcttcggccggcagggcaagcggaccttcatggccgagagacagtacacacggatggaggactggctgaccgccaagctggcctacgagggcctgagcaagacctacctgtccaagacactggcccagtacacctccaagacatgcagcaactgtgggtttaccatcaccagcgccgactacgacagggtgctggagaagctgaagaagacagcaacaggctggatgaccacaattaacggcaaggagctgaaggtggagggccagattacctactacaacagatacaagagacagaacgtagtcaaggacctgtccgtcgagctggatagactgagcgaagaatctgtgaacaacgacatctcctcctggacaaagggcagaagcggagaagctctgagcctcctgaagaaaagattctcccatagacccgtgcaggagaagttcgtgtgcctgaactgcggcttcgagacacacgcagccgagcaagccgccctgaacatcgccagatcctggctgttcctgcggagccaggagtacaagaaataccagacaaacaagacaaccggcaacaccgataagagagccttcgtcgagacctggcagtccttttaccggaagaagcttaaggaggtgtggaaacctgccgtgcggtctggcggatctggcggaggctccagggagcccgcccaggtgctggtggccgccgagagcctgatcgacaacgaggagggctacgtgaccttcgaggacgtggccgtgtacttcagccaggaggagtggaggctgctggacgaggcccagaggctgctgtacaggaacgtgatgctggagaacttcagcctgatggccagcctgggcctggccagcagcaagacccacgagatcacccagctggagagctgggaggagcccttcgtgggcggcccaagcagcggcgcccctcctcccagcggcggcagcccagccggctccccaacctctaccgaggagggcacctctgagtccgccacccccgagagcggccctggcacctccaccgagcccagcgagggcagcgcacccggcagccctgccggcagccccacctccacagaggagggaaccagcaccgagcccagcgaaggcagcgccccaggcaccagcaccgagcctagtgagcaggagattaaacggatcaacaagatcagaagaagacttgtgaaagacagcaacaccaagaaggccggcaagacaggccccatgaaaaccctgctggttagagtgatgacacccgatctgagagagcggctggaaaacctgagaaagaagcctgaaaatatcccccagcccatcagcaatacatctagagccaacctgaataagctgctgaccgattacaccgaaatgaagaaggcgatcctgcatgtgtactgggaagagttccagaaggaccctgtgggcctgatgagccgggtggcccagcctgccagcaagaagatcgatcagaacaagctgaaacctgagatggacgagaagggcaacctgaccaccgccggctttgcctgctctcagtgtggccagcccctgttcgtgtacaagctggagcaggtgtctgagaagggcaaggcttacaccaactacttcggacggtgcaatgtggccgagcacgaaaagctgatcctgctggcccagctgaagcccgagaaggatagcgacgaagccgtgacatatagcctgggaaagtttgggcagagggccctggatttctacagcattcatgtgaccaaggagtccacccaccccgtgaagcccctggcccagatcgccggaaacagatacgcctccggacctgtgggaaaggccctgagcgacgcatgtatgggcacaatcgcctccttcctgtctaagtaccaggacatcatcatcgaacaccagaaggtggtgaagggcaaccagaagagactggagagcctgcgggagctggccggcaaggaaaacctggaataccctagcgtgaccctgccacctcagcctcacaccaaggagggcgttgatgcctacaacgaagtgatcgcccgggtgcgaatgtgggtgaacctgaacctgtggcagaagctgaagctaagcagagatgatgccaagcctctgctgagactgaagggattcccttcctttcctctggtcgagagacaggccaacgaagtggactggtgggacatggtgtgtaacgtgaagaagctgatcaacgagaaaaaggaggatggcaaggtgttttggcagaatctggctggctacaagagacaggaagccctgagaccatacctgagcagcgaggaagatcggaagaagggaaagaaattcgctcggtaccagctgggcgacctgctgctgcacctggaaaagaagcacggcgaggactggggaaaggtgtacgacgaggcctgggagcggattgacaagaaagtggaaggcctgagcaagcacatcaagctggaagaggaacggagaagcgaggacgcccagagcaaggccgccctgaccgactggctgcgggctaaggccagcttcgtgatcgagggcctgaaggaggccgacaaggacgagttctgcagatgcgagctgaagctgcagaagtggtacggggacctgcggggaaagcccttcgccatcgaagccgagaacagcatcctggacatcagcggcttcagcaagcagtacaactgtgccttcatctggcagaaggacggcgtgaagaagctgaacctgtacctgatcatcaactacttcaagggcggcaagctgcggttcaagaagatcaaacctgaagccttcgaagccaacagattctacaccgtgatcaacaaaaagagcggcgagatcgtgcccatggaggtgaacttcaacttcgacgaccccaacctgatcatcctgcctctggcctttggcaagagacagggcagagaattcatctggaacgacctgctgtccctggaaaccggcagcctgaagctggccaacggaagagtgatcgagaagacactgtacaacagaagaacccggcaggatgagcctgccctgttcgtggccctgaccttcgagcggcgggaggtcctggactcctccaatatcaaaccaatgaacctgatcggcgtggcaagaggcgaaaacatccccgccgtgatcgccctgaccgaccccgagggctgcccactgagccggtttaaggatagcctgggaaacccaacccacatcctgagaatcggcgagagctataaggagaagcagcggaccatccaggccaagaaggaggtggagcagcggagagccggcggctacagccggaagtacgccagcaaagccaagaatctggcagacgatatggtgagaaacaccgctagagatctgctgtactacgccgtgacccaggatgccatgctgatcttcgccaacctgagccggggcttcggccggcagggcaagcggaccttcatggccgagagacagtacacacggatggaggactggctgaccgccaagctggcctacgagggcctgagcaagacctacctgtccaagacactggcccagtacacctccaagacatgcagcaactgtgggtttaccatcaccagcgccgactacgacagggtgctggagaagctgaagaagacagcaacaggctggatgaccacaattaacggcaaggagctgaaggtggagggccagattacctactacaacagatacaagagacagaacgtagtcaaggacctgtccgtcgagctggatagactgagcgaagaatctgtgaacaacgacatctcctcctggacaaagggcagaagcggagaagctctgagcctcctgaagaaaagattctcccatagacccgtgcaggagaagttcgtgtgcctgaactgcggcttcgagacacacgcagccgagcaagccgccctgaacatcgccagatcctggctgttcctgcggagccaggagtacaagaaataccagacaaacaagacaaccggcaacaccgataagagagccttcgtcgagacctggcagtccttttaccggaagaagcttaaggaggtgtggaaacctgccgtgcggtctggcggatctggcggaggctcctagggagcccgcccaggtgctggtggccgccgagagcctgatcgacaacgaggagggctacgtgaccttcgaggacgtggccgtgtacttcagccaggaggagtggaggctgctggacgaggcccagaggctgctgtacaggaacgtgatgctggagaacttcagcctgatggccagcctgggcctggccagcagcaagacccacgagatcacccagctggagagctgggaggagcccttcgtgggatctggctccggcagcggccccaagaaaaagagaaaagtctaagctgccttctgcggggcttgccttctggccatgcccttcttctctcccttgcacctgtacctcttggtctttgaataaagcctgagtaggaaggctagcaaaaaaaaaaaaaaaaaaaaaaaaaaaaaaaaaaaaaaaaaaaaaaaaaaaaaaaaaaaaaaaaaaaaaaaaaaaaaaaa

SEQ ID NO: 16778 - RNA, 9485 nt, synthetic construct
  source 1..9485: mol_type = other RNA
aggaaataagagagaaaagaagagtaagaagaaatataagagccaccatggcccctaagaagaagcgtaaagtgagccggatggaacgcctcgtctacgaggtgcggcagaagtgcagaaacatcgaggacatctgcatctcctgcggatctctgaacgtgaccctggagcacccactgttcatcggcggcatgtgccagaactgtaaaaactgttttctggagtgtgcctatcaatacgacgatgacggctaccagagctactgcaccatctgttgcggcggaagagaggtgctgatgtgtggaaataacaactgctgccggtgcttctgcgtggaatgcgtggacctgctggtgggccccggcgccgcccaggccgctattaaggaagatccttggaactgctacatgtgcggccacaagggcacatacggcctgctgagacggagagaggactggcctagcagactgcagatgttcttcgccaataaccacgaccaggagttcgacccccctaaggtgtaccctcccgtccccgccgagaagagaaagcccatccgggtcctgagcctgttcgatggcatcgccaccggtctgctggtgctgaaggacctgggcatccaggtggataggtacattgcctccgaggtgtgcgaggactccatcaccgtgggaatggtgcgtcatcagggcaagatcatgtacgtgggcgacgtgcggagcgtgacacagaagcatatccaggagtggggccctttcgacctggtgatcggcggcagcccttgcaatgacctgagcatcgtgaacccagcccggaagggcctgtacgagggaaccggcagactgttcttcgagttttacagactgctgcacgacgcccggcctaaggaaggcgacgaccggcccttcttttggctgttcgagaatgtggtggccatgggagtcagcgacaagcgggatattagccggttcctggagagcaaccccgtgatgatcgatgccaaggaagtgagcgccgcccaccgggccagatacttctggggcaatctgcctggcatgaacagacccctggccagcaccgtgaacgacaagctggagctgcaggagtgcctggagcacggccggatcgccaagttcagcaaggtgagaaccatcaccacccgaagcaacagcatcaaacaaggcaaggaccagcactttcctgtgttcatgaacgagaaggaggacatcctgtggtgtaccgagatggagagagtgttcgggttcccagtccactacacagatgtcagcaacatgtctagactggccagacagagactgctgggaagaagctggtccgtccctgtgatcagacacctgttcgcccctctgaaggagtacttcgcctgcgtgagcagcggcaacagcaacgccaacagccggggccccagcttctctagcggcctggtgccactgtccctgagagggagccacatgggccccatggagatctacaaaaccgtgagcgcctggaagcggcagcctgtgcgcgtgctgagcctgtttcggaatatcgataaagtcctgaaaagcctgggattcctggagagcggctctggctccggcggtggcaccctgaagtacgtggaggatgtgacaaacgtggtcagacgggatgtggagaagtggggccccttcgatctggtgtacggcagcacccaacccctgggcagctcttgtgaccggtgccctggctggtacatgtttcagttccaccggatcctgcagtacgccctgccgagacaggagtcccagcggccattcttttggattttcatggacaacttgctgctgaccgaggatgaccaggaaactaccactcggttcctgcagaccgaagccgtgaccctgcaggacgtgagaggccgggactaccagaacgccatgcgggtgtggtccaacatccctggactgaaaagcaagcacgcacctctgacccctaaagaagaggagtacctgcaggcccaggtgcggagcagaagcaagctggacgcccctaaggtggatctgctggtgaagaattgcctcctgcccctgagagagtacttcaagtatttcagccagaatagtctgcccctgggaggcagcggcggcggcgccctggtgacatttgaggacgtcgccgtgcggttcacccaggaggaatgggctctgctggatccttctcagaaaatcctgtaccgggacgtgatgagagagacataccggaatctgacctccgtgggcatcaactgggaatgttgggaccttgaagcctgcttcagaagcctgggaagaaacctgagagtgcaggtggtgaagagaaagtgcgagctgaccaacagcggcccctgcgccgagggcggcccaagcagcggcgcccctcctcccagcggcggcagcccagccggctccccaacctctaccgaggagggcacctctgagtccgccacccccgagagcggccctggcacctccaccgagcccagcgagggcagcgcacccggcagccctgccggcagccccacctccacagaggagggaaccagcaccgagcccagcgaaggcagcgccccaggcaccagcaccgagcctagtgagcaggagattaaacggatcaacaagatcagaagaagacttgtgaaagacagcaacaccaagaaggccggcaagacaggccccatgaaaaccctgctggttagagtgatgacacccgatctgagagagcggctggaaaacctgagaaagaagcctgaaaatatcccccagcccatcagcaatacatctagagccaacctgaataagctgctgaccgattacaccgaaatgaagaaggcgatcctgcatgtgtactgggaagagttccagaaggaccctgtgggcctgatgagccgggtggcccagcctgccagcaagaagatcgatcagaacaagctgaaacctgagatggacgagaagggcaacctgaccaccgccggctttgcctgctctcagtgtggccagcccctgttcgtgtacaagctggagcaggtgtctgagaagggcaaggcttacaccaactacttcggacggtgcaatgtggccgagcacgaaaagctgatcctgctggcccagctgaagcccgagaaggatagcgacgaagccgtgacatatagcctgggaaagtttgggcagagggccctggatttctacagcattcatgtgaccaaggagtccacccaccccgtgaagcccctggcccagatcgccggaaacagatacgcctccggacctgtgggaaaggccctgagcgacgcatgtatgggcacaatcgcctccttcctgtctaagtaccaggacatcatcatcgaacaccagaaggtggtgaagggcaaccagaagagactggagagcctgcgggagctggccggcaaggaaaacctggaataccctagcgtgaccctgccacctcagcctcacaccaaggagggcgttgatgcctacaacgaagtgatcgcccgggtgcgaatgtgggtgaacctgaacctgtggcagaagctgaagctaagcagagatgatgccaagcctctgctgagactgaagggattcccttcctttcctctggtcgagagacaggccaacgaagtggactggtgggacatggtgtgtaacgtgaagaagctgatcaacgagaaaaaggaggatggcaaggtgttttggcagaatctggctggctacaagagacaggaagccctgagaccatacctgagcagcgaggaagatcggaagaagggaaagaaattcgctcggtaccagctgggcgacctgctgctgcacctggaaaagaagcacggcgaggactggggaaaggtgtacgacgaggcctgggagcggattgacaagaaagtggaaggcctgagcaagcacatcaagctggaagaggaacggagaagcgaggacgcccagagcaaggccgccctgaccgactggctgcgggctaaggccagcttcgtgatcgagggcctgaaggaggccgacaaggacgagttctgcagatgcgagctgaagctgcagaagtggtacggggacctgcggggaaagcccttcgccatcgaagccgagaacagcatcctggacatcagcggcttcagcaagcagtacaactgtgccttcatctggcagaaggacggcgtgaagaagctgaacctgtacctgatcatcaactacttcaagggcggcaagctgcggttcaagaagatcaaacctgaagccttcgaagccaacagattctacaccgtgatcaacaaaaagagcggcgagatcgtgcccatggaggtgaacttcaacttcgacgaccccaacctgatcatcctgcctctggcctttggcaagagacagggcagagaattcatctggaacgacctgctgtccctggaaaccggcagcctgaagctggccaacggaagagtgatcgagaagacactgtacaacagaagaacccggcaggatgagcctgccctgttcgtggccctgaccttcgagcggcgggaggtcctggactcctccaatatcaaaccaatgaacctgatcggcgtggcaagaggcgaaaacatccccgccgtgatcgccctgaccgaccccgagggctgcccactgagccggtttaaggatagcctgggaaacccaacccacatcctgagaatcggcgagagctataaggagaagcagcggaccatccaggccaagaaggaggtggagcagcggagagccggcggctacagccggaagtacgccagcaaagccaagaatctggcagacgatatggtgagaaacaccgctagagatctgctgtactacgccgtgacccaggatgccatgctgatcttcgccaacctgagccggggcttcggccggcagggcaagcggaccttcatggccgagagacagtacacacggatggaggactggctgaccgccaagctggcctacgagggcctgagcaagacctacctgtccaagacactggcccagtacacctccaagacatgcagcaactgtgggtttaccatcaccagcgccgactacgacagggtgctggagaagctgaagaagacagcaacaggctggatgaccacaattaacggcaaggagctgaaggtggagggccagattacctactacaacagatacaagagacagaacgtagtcaaggacctgtccgtcgagctggatagactgagcgaagaatctgtgaacaacgacatctcctcctggacaaagggcagaagcggagaagctctgagcctcctgaagaaaagattctcccatagacccgtgcaggagaagttcgtgtgcctgaactgcggcttcgagacacacgcagccgagcaagccgccctgaacatcgccagatcctggctgttcctgcggagccaggagtacaagaaataccagacaaacaagacaaccggcaacaccgataagagagccttcgtcgagacctggcagtccttttaccggaagaagcttaaggaggtgtggaaacctgccgtgcggtctggcggatctggcggaggctccttccaggccagcgtggtgttcgaggacgtggccgtgaagttcacccccgaggagtgggccctgctggacaggggccagaggaagctgtacagggacgtgatgctggagacctgcaggaacctgagcagcgtggagaagcagaagttccacagcaacggcgacctgaccaggatgcaggagggcctgctgaggagccccctggtggagagcgtgtgcgagaggatcgagggcgaccagtgcggcggcggcccaagcagcggcgcccctcctcccagcggcggcagcccagccggctccccaacctctaccgaggagggcacctctgagtccgccacccccgagagcggccctggcacctccaccgagcccagcgagggcagcgcacccggcagccctgccggcagccccacctccacagaggagggaaccagcaccgagcccagcgaaggcagcgccccaggcaccagcaccgagcctagtgagcaggagattaaacggatcaacaagatcagaagaagacttgtgaaagacagcaacaccaagaaggccggcaagacaggccccatgaaaaccctgctggttagagtgatgacacccgatctgagagagcggctggaaaacctgagaaagaagcctgaaaatatcccccagcccatcagcaatacatctagagccaacctgaataagctgctgaccgattacaccgaaatgaagaaggcgatcctgcatgtgtactgggaagagttccagaaggaccctgtgggcctgatgagccgggtggcccagcctgccagcaagaagatcgatcagaacaagctgaaacctgagatggacgagaagggcaacctgaccaccgccggctttgcctgctctcagtgtggccagcccctgttcgtgtacaagctggagcaggtgtctgagaagggcaaggcttacaccaactacttcggacggtgcaatgtggccgagcacgaaaagctgatcctgctggcccagctgaagcccgagaaggatagcgacgaagccgtgacatatagcctgggaaagtttgggcagagggccctggatttctacagcattcatgtgaccaaggagtccacccaccccgtgaagcccctggcccagatcgccggaaacagatacgcctccggacctgtgggaaaggccctgagcgacgcatgtatgggcacaatcgcctccttcctgtctaagtaccaggacatcatcatcgaacaccagaaggtggtgaagggcaaccagaagagactggagagcctgcgggagctggccggcaaggaaaacctggaataccctagcgtgaccctgccacctcagcctcacaccaaggagggcgttgatgcctacaacgaagtgatcgcccgggtgcgaatgtgggtgaacctgaacctgtggcagaagctgaagctaagcagagatgatgccaagcctctgctgagactgaagggattcccttcctttcctctggtcgagagacaggccaacgaagtggactggtgggacatggtgtgtaacgtgaagaagctgatcaacgagaaaaaggaggatggcaaggtgttttggcagaatctggctggctacaagagacaggaagccctgagaccatacctgagcagcgaggaagatcggaagaagggaaagaaattcgctcggtaccagctgggcgacctgctgctgcacctggaaaagaagcacggcgaggactggggaaaggtgtacgacgaggcctgggagcggattgacaagaaagtggaaggcctgagcaagcacatcaagctggaagaggaacggagaagcgaggacgcccagagcaaggccgccctgaccgactggctgcgggctaaggccagcttcgtgatcgagggcctgaaggaggccgacaaggacgagttctgcagatgcgagctgaagctgcagaagtggtacggggacctgcggggaaagcccttcgccatcgaagccgagaacagcatcctggacatcagcggcttcagcaagcagtacaactgtgccttcatctggcagaaggacggcgtgaagaagctgaacctgtacctgatcatcaactacttcaagggcggcaagctgcggttcaagaagatcaaacctgaagccttcgaagccaacagattctacaccgtgatcaacaaaaagagcggcgagatcgtgcccatggaggtgaacttcaacttcgacgaccccaacctgatcatcctgcctctggcctttggcaagagacagggcagagaattcatctggaacgacctgctgtccctggaaaccggcagcctgaagctggccaacggaagagtgatcgagaagacactgtacaacagaagaacccggcaggatgagcctgccctgttcgtggccctgaccttcgagcggcgggaggtcctggactcctccaatatcaaaccaatgaacctgatcggcgtggcaagaggcgaaaacatccccgccgtgatcgccctgaccgaccccgagggctgcccactgagccggtttaaggatagcctgggaaacccaacccacatcctgagaatcggcgagagctataaggagaagcagcggaccatccaggccaagaaggaggtggagcagcggagagccggcggctacagccggaagtacgccagcaaagccaagaatctggcagacgatatggtgagaaacaccgctagagatctgctgtactacgccgtgacccaggatgccatgctgatcttcgccaacctgagccggggcttcggccggcagggcaagcggaccttcatggccgagagacagtacacacggatggaggactggctgaccgccaagctggcctacgagggcctgagcaagacctacctgtccaagacactggcccagtacacctccaagacatgcagcaactgtgggtttaccatcaccagcgccgactacgacagggtgctggagaagctgaagaagacagcaacaggctggatgaccacaattaacggcaaggagctgaaggtggagggccagattacctactacaacagatacaagagacagaacgtagtcaaggacctgtccgtcgagctggatagactgagcgaagaatctgtgaacaacgacatctcctcctggacaaagggcagaagcggagaagctctgagcctcctgaagaaaagattctcccatagacccgtgcaggagaagttcgtgtgcctgaactgcggcttcgagacacacgcagccgagcaagccgccctgaacatcgccagatcctggctgttcctgcggagccaggagtacaagaaataccagacaaacaagacaaccggcaacaccgataagagagccttcgtcgagacctggcagtccttttaccggaagaagcttaaggaggtgtggaaacctgccgtgcggtctggcggatctggcggaggctcctttccaggccagcgtggtgttcgaggacgtggccgtgaagttcacccccgaggagtgggccctgctggacaggggccagaggaagctgtacagggacgtgatgctggagacctgcaggaacctgagcagcgtggagaagcagaagttccacagcaacggcgacctgaccaggatgcaggagggcctgctgaggagccccctggtggagagcgtgtgcgagaggatcgagggcgaccagtgcggcggatctggctccggcagcggccccaagaaaaagagaaaagtctaagctgccttctgcggggcttgccttctggccatgcccttcttctctcccttgcacctgtacctcttggtctttgaataaagcctgagtaggaaggctagcaaaaaaaaaaaaaaaaaaaaaaaaaaaaaaaaaaaaaaaaaaaaaaaaaaaaaaaaaaaaaaaaaaaaaaaaaaaaaaaa

SEQ ID NO: 16779 - RNA, 9485 nt, synthetic construct
  source 1..9485: mol_type = other RNA
aggaaataagagagaaaagaagagtaagaagaaatataagagccaccatggcccctaagaagaagcgtaaagtgagccggatggaacgcctcgtctacgaggtgcggcagaagtgcagaaacatcgaggacatctgcatctcctgcggatctctgaacgtgaccctggagcacccactgttcatcggcggcatgtgccagaactgtaaaaactgttttctggagtgtgcctatcaatacgacgatgacggctaccagagctactgcaccatctgttgcggcggaagagaggtgctgatgtgtggaaataacaactgctgccggtgcttctgcgtggaatgcgtggacctgctggtgggccccggcgccgcccaggccgctattaaggaagatccttggaactgctacatgtgcggccacaagggcacatacggcctgctgagacggagagaggactggcctagcagactgcagatgttcttcgccaataaccacgaccaggagttcgacccccctaaggtgtaccctcccgtccccgccgagaagagaaagcccatccgggtcctgagcctgttcgatggcatcgccaccggtctgctggtgctgaaggacctgggcatccaggtggataggtacattgcctccgaggtgtgcgaggactccatcaccgtgggaatggtgcgtcatcagggcaagatcatgtacgtgggcgacgtgcggagcgtgacacagaagcatatccaggagtggggccctttcgacctggtgatcggcggcagcccttgcaatgacctgagcatcgtgaacccagcccggaagggcctgtacgagggaaccggcagactgttcttcgagttttacagactgctgcacgacgcccggcctaaggaaggcgacgaccggcccttcttttggctgttcgagaatgtggtggccatgggagtcagcgacaagcgggatattagccggttcctggagagcaaccccgtgatgatcgatgccaaggaagtgagcgccgcccaccgggccagatacttctggggcaatctgcctggcatgaacagacccctggccagcaccgtgaacgacaagctggagctgcaggagtgcctggagcacggccggatcgccaagttcagcaaggtgagaaccatcaccacccgaagcaacagcatcaaacaaggcaaggaccagcactttcctgtgttcatgaacgagaaggaggacatcctgtggtgtaccgagatggagagagtgttcgggttcccagtccactacacagatgtcagcaacatgtctagactggccagacagagactgctgggaagaagctggtccgtccctgtgatcagacacctgttcgcccctctgaaggagtacttcgcctgcgtgagcagcggcaacagcaacgccaacagccggggccccagcttctctagcggcctggtgccactgtccctgagagggagccacatgggccccatggagatctacaaaaccgtgagcgcctggaagcggcagcctgtgcgcgtgctgagcctgtttcggaatatcgataaagtcctgaaaagcctgggattcctggagagcggctctggctccggcggtggcaccctgaagtacgtggaggatgtgacaaacgtggtcagacgggatgtggagaagtggggccccttcgatctggtgtacggcagcacccaacccctgggcagctcttgtgaccggtgccctggctggtacatgtttcagttccaccggatcctgcagtacgccctgccgagacaggagtcccagcggccattcttttggattttcatggacaacttgctgctgaccgaggatgaccaggaaactaccactcggttcctgcagaccgaagccgtgaccctgcaggacgtgagaggccgggactaccagaacgccatgcgggtgtggtccaacatccctggactgaaaagcaagcacgcacctctgacccctaaagaagaggagtacctgcaggcccaggtgcggagcagaagcaagctggacgcccctaaggtggatctgctggtgaagaattgcctcctgcccctgagagagtacttcaagtatttcagccagaatagtctgcccctgggaggcagcggcggcggcgccctggtgacatttgaggacgtcgccgtgcggttcacccaggaggaatgggctctgctggatccttctcagaaaatcctgtaccgggacgtgatgagagagacataccggaatctgacctccgtgggcatcaactgggaatgttgggaccttgaagcctgcttcagaagcctgggaagaaacctgagagtgcaggtggtgaagagaaagtgcgagctgaccaacagcggcccctgcgccgagggcggcccaagcagcggcgcccctcctcccagcggcggcagcccagccggctccccaacctctaccgaggagggcacctctgagtccgccacccccgagagcggccctggcacctccaccgagcccagcgagggcagcgcacccggcagccctgccggcagccccacctccacagaggagggaaccagcaccgagcccagcgaaggcagcgccccaggcaccagcaccgagcctagtgagcaggagattaaacggatcaacaagatcagaagaagacttgtgaaagacagcaacaccaagaaggccggcaagacaggccccatgaaaaccctgctggttagagtgatgacacccgatctgagagagcggctggaaaacctgagaaagaagcctgaaaatatcccccagcccatcagcaatacatctagagccaacctgaataagctgctgaccgattacaccgaaatgaagaaggcgatcctgcatgtgtactgggaagagttccagaaggaccctgtgggcctgatgagccgggtggcccagcctgccagcaagaagatcgatcagaacaagctgaaacctgagatggacgagaagggcaacctgaccaccgccggctttgcctgctctcagtgtggccagcccctgttcgtgtacaagctggagcaggtgtctgagaagggcaaggcttacaccaactacttcggacggtgcaatgtggccgagcacgaaaagctgatcctgctggcccagctgaagcccgagaaggatagcgacgaagccgtgacatatagcctgggaaagtttgggcagagggccctggatttctacagcattcatgtgaccaaggagtccacccaccccgtgaagcccctggcccagatcgccggaaacagatacgcctccggacctgtgggaaaggccctgagcgacgcatgtatgggcacaatcgcctccttcctgtctaagtaccaggacatcatcatcgaacaccagaaggtggtgaagggcaaccagaagagactggagagcctgcgggagctggccggcaaggaaaacctggaataccctagcgtgaccctgccacctcagcctcacaccaaggagggcgttgatgcctacaacgaagtgatcgcccgggtgcgaatgtgggtgaacctgaacctgtggcagaagctgaagctaagcagagatgatgccaagcctctgctgagactgaagggattcccttcctttcctctggtcgagagacaggccaacgaagtggactggtgggacatggtgtgtaacgtgaagaagctgatcaacgagaaaaaggaggatggcaaggtgttttggcagaatctggctggctacaagagacaggaagccctgagaccatacctgagcagcgaggaagatcggaagaagggaaagaaattcgctcggtaccagctgggcgacctgctgctgcacctggaaaagaagcacggcgaggactggggaaaggtgtacgacgaggcctgggagcggattgacaagaaagtggaaggcctgagcaagcacatcaagctggaagaggaacggagaagcgaggacgcccagagcaaggccgccctgaccgactggctgcgggctaaggccagcttcgtgatcgagggcctgaaggaggccgacaaggacgagttctgcagatgcgagctgaagctgcagaagtggtacggggacctgcggggaaagcccttcgccatcgaagccgagaacagcatcctggacatcagcggcttcagcaagcagtacaactgtgccttcatctggcagaaggacggcgtgaagaagctgaacctgtacctgatcatcaactacttcaagggcggcaagctgcggttcaagaagatcaaacctgaagccttcgaagccaacagattctacaccgtgatcaacaaaaagagcggcgagatcgtgcccatggaggtgaacttcaacttcgacgaccccaacctgatcatcctgcctctggcctttggcaagagacagggcagagaattcatctggaacgacctgctgtccctggaaaccggcagcctgaagctggccaacggaagagtgatcgagaagacactgtacaacagaagaacccggcaggatgagcctgccctgttcgtggccctgaccttcgagcggcgggaggtcctggactcctccaatatcaaaccaatgaacctgatcggcgtggcaagaggcgaaaacatccccgccgtgatcgccctgaccgaccccgagggctgcccactgagccggtttaaggatagcctgggaaacccaacccacatcctgagaatcggcgagagctataaggagaagcagcggaccatccaggccaagaaggaggtggagcagcggagagccggcggctacagccggaagtacgccagcaaagccaagaatctggcagacgatatggtgagaaacaccgctagagatctgctgtactacgccgtgacccaggatgccatgctgatcttcgccaacctgagccggggcttcggccggcagggcaagcggaccttcatggccgagagacagtacacacggatggaggactggctgaccgccaagctggcctacgagggcctgagcaagacctacctgtccaagacactggcccagtacacctccaagacatgcagcaactgtgggtttaccatcaccagcgccgactacgacagggtgctggagaagctgaagaagacagcaacaggctggatgaccacaattaacggcaaggagctgaaggtggagggccagattacctactacaacagatacaagagacagaacgtagtcaaggacctgtccgtcgagctggatagactgagcgaagaatctgtgaacaacgacatctcctcctggacaaagggcagaagcggagaagctctgagcctcctgaagaaaagattctcccatagacccgtgcaggagaagttcgtgtgcctgaactgcggcttcgagacacacgcagccgagcaagccgccctgaacatcgccagatcctggctgttcctgcggagccaggagtacaagaaataccagacaaacaagacaaccggcaacaccgataagagagccttcgtcgagacctggcagtccttttaccggaagaagcttaaggaggtgtggaaacctgccgtgcggtctggcggatctggcggaggctcccagtgcctgctgaccttcaaggacgtgttcctggacttcagcagcgaggagtgggagtgcctgaacttcgcccagaggaccctgtacatggacgtgatgctggagaactacaacaacctgctgttcgtggagaaccactgcatctgcggcaactacgagaaggagaaggtgctggagcaggacacccagcacatcgtgaacgagcacggccacaacaggaagaagagcagcaagtgcaacgagggcggcccaagcagcggcgcccctcctcccagcggcggcagcccagccggctccccaacctctaccgaggagggcacctctgagtccgccacccccgagagcggccctggcacctccaccgagcccagcgagggcagcgcacccggcagccctgccggcagccccacctccacagaggagggaaccagcaccgagcccagcgaaggcagcgccccaggcaccagcaccgagcctagtgagcaggagattaaacggatcaacaagatcagaagaagacttgtgaaagacagcaacaccaagaaggccggcaagacaggccccatgaaaaccctgctggttagagtgatgacacccgatctgagagagcggctggaaaacctgagaaagaagcctgaaaatatcccccagcccatcagcaatacatctagagccaacctgaataagctgctgaccgattacaccgaaatgaagaaggcgatcctgcatgtgtactgggaagagttccagaaggaccctgtgggcctgatgagccgggtggcccagcctgccagcaagaagatcgatcagaacaagctgaaacctgagatggacgagaagggcaacctgaccaccgccggctttgcctgctctcagtgtggccagcccctgttcgtgtacaagctggagcaggtgtctgagaagggcaaggcttacaccaactacttcggacggtgcaatgtggccgagcacgaaaagctgatcctgctggcccagctgaagcccgagaaggatagcgacgaagccgtgacatatagcctgggaaagtttgggcagagggccctggatttctacagcattcatgtgaccaaggagtccacccaccccgtgaagcccctggcccagatcgccggaaacagatacgcctccggacctgtgggaaaggccctgagcgacgcatgtatgggcacaatcgcctccttcctgtctaagtaccaggacatcatcatcgaacaccagaaggtggtgaagggcaaccagaagagactggagagcctgcgggagctggccggcaaggaaaacctggaataccctagcgtgaccctgccacctcagcctcacaccaaggagggcgttgatgcctacaacgaagtgatcgcccgggtgcgaatgtgggtgaacctgaacctgtggcagaagctgaagctaagcagagatgatgccaagcctctgctgagactgaagggattcccttcctttcctctggtcgagagacaggccaacgaagtggactggtgggacatggtgtgtaacgtgaagaagctgatcaacgagaaaaaggaggatggcaaggtgttttggcagaatctggctggctacaagagacaggaagccctgagaccatacctgagcagcgaggaagatcggaagaagggaaagaaattcgctcggtaccagctgggcgacctgctgctgcacctggaaaagaagcacggcgaggactggggaaaggtgtacgacgaggcctgggagcggattgacaagaaagtggaaggcctgagcaagcacatcaagctggaagaggaacggagaagcgaggacgcccagagcaaggccgccctgaccgactggctgcgggctaaggccagcttcgtgatcgagggcctgaaggaggccgacaaggacgagttctgcagatgcgagctgaagctgcagaagtggtacggggacctgcggggaaagcccttcgccatcgaagccgagaacagcatcctggacatcagcggcttcagcaagcagtacaactgtgccttcatctggcagaaggacggcgtgaagaagctgaacctgtacctgatcatcaactacttcaagggcggcaagctgcggttcaagaagatcaaacctgaagccttcgaagccaacagattctacaccgtgatcaacaaaaagagcggcgagatcgtgcccatggaggtgaacttcaacttcgacgaccccaacctgatcatcctgcctctggcctttggcaagagacagggcagagaattcatctggaacgacctgctgtccctggaaaccggcagcctgaagctggccaacggaagagtgatcgagaagacactgtacaacagaagaacccggcaggatgagcctgccctgttcgtggccctgaccttcgagcggcgggaggtcctggactcctccaatatcaaaccaatgaacctgatcggcgtggcaagaggcgaaaacatccccgccgtgatcgccctgaccgaccccgagggctgcccactgagccggtttaaggatagcctgggaaacccaacccacatcctgagaatcggcgagagctataaggagaagcagcggaccatccaggccaagaaggaggtggagcagcggagagccggcggctacagccggaagtacgccagcaaagccaagaatctggcagacgatatggtgagaaacaccgctagagatctgctgtactacgccgtgacccaggatgccatgctgatcttcgccaacctgagccggggcttcggccggcagggcaagcggaccttcatggccgagagacagtacacacggatggaggactggctgaccgccaagctggcctacgagggcctgagcaagacctacctgtccaagacactggcccagtacacctccaagacatgcagcaactgtgggtttaccatcaccagcgccgactacgacagggtgctggagaagctgaagaagacagcaacaggctggatgaccacaattaacggcaaggagctgaaggtggagggccagattacctactacaacagatacaagagacagaacgtagtcaaggacctgtccgtcgagctggatagactgagcgaagaatctgtgaacaacgacatctcctcctggacaaagggcagaagcggagaagctctgagcctcctgaagaaaagattctcccatagacccgtgcaggagaagttcgtgtgcctgaactgcggcttcgagacacacgcagccgagcaagccgccctgaacatcgccagatcctggctgttcctgcggagccaggagtacaagaaataccagacaaacaagacaaccggcaacaccgataagagagccttcgtcgagacctggcagtccttttaccggaagaagcttaaggaggtgtggaaacctgccgtgcggtctggcggatctggcggaggctcctcagtgcctgctgaccttcaaggacgtgttcctggacttcagcagcgaggagtgggagtgcctgaacttcgcccagaggaccctgtacatggacgtgatgctggagaactacaacaacctgctgttcgtggagaaccactgcatctgcggcaactacgagaaggagaaggtgctggagcaggacacccagcacatcgtgaacgagcacggccacaacaggaagaagagcagcaagtgcaacgagggatctggctccggcagcggccccaagaaaaagagaaaagtctaagctgccttctgcggggcttgccttctggccatgcccttcttctctcccttgcacctgtacctcttggtctttgaataaagcctgagtaggaaggctagcaaaaaaaaaaaaaaaaaaaaaaaaaaaaaaaaaaaaaaaaaaaaaaaaaaaaaaaaaaaaaaaaaaaaaaaaaaaaaaaa

SEQ ID NO: 16780 - RNA, 9485 nt, synthetic construct
  source 1..9485: mol_type = other RNA
aggaaataagagagaaaagaagagtaagaagaaatataagagccaccatggcccctaagaagaagcgtaaagtgagccggatggaacgcctcgtctacgaggtgcggcagaagtgcagaaacatcgaggacatctgcatctcctgcggatctctgaacgtgaccctggagcacccactgttcatcggcggcatgtgccagaactgtaaaaactgttttctggagtgtgcctatcaatacgacgatgacggctaccagagctactgcaccatctgttgcggcggaagagaggtgctgatgtgtggaaataacaactgctgccggtgcttctgcgtggaatgcgtggacctgctggtgggccccggcgccgcccaggccgctattaaggaagatccttggaactgctacatgtgcggccacaagggcacatacggcctgctgagacggagagaggactggcctagcagactgcagatgttcttcgccaataaccacgaccaggagttcgacccccctaaggtgtaccctcccgtccccgccgagaagagaaagcccatccgggtcctgagcctgttcgatggcatcgccaccggtctgctggtgctgaaggacctgggcatccaggtggataggtacattgcctccgaggtgtgcgaggactccatcaccgtgggaatggtgcgtcatcagggcaagatcatgtacgtgggcgacgtgcggagcgtgacacagaagcatatccaggagtggggccctttcgacctggtgatcggcggcagcccttgcaatgacctgagcatcgtgaacccagcccggaagggcctgtacgagggaaccggcagactgttcttcgagttttacagactgctgcacgacgcccggcctaaggaaggcgacgaccggcccttcttttggctgttcgagaatgtggtggccatgggagtcagcgacaagcgggatattagccggttcctggagagcaaccccgtgatgatcgatgccaaggaagtgagcgccgcccaccgggccagatacttctggggcaatctgcctggcatgaacagacccctggccagcaccgtgaacgacaagctggagctgcaggagtgcctggagcacggccggatcgccaagttcagcaaggtgagaaccatcaccacccgaagcaacagcatcaaacaaggcaaggaccagcactttcctgtgttcatgaacgagaaggaggacatcctgtggtgtaccgagatggagagagtgttcgggttcccagtccactacacagatgtcagcaacatgtctagactggccagacagagactgctgggaagaagctggtccgtccctgtgatcagacacctgttcgcccctctgaaggagtacttcgcctgcgtgagcagcggcaacagcaacgccaacagccggggccccagcttctctagcggcctggtgccactgtccctgagagggagccacatgggccccatggagatctacaaaaccgtgagcgcctggaagcggcagcctgtgcgcgtgctgagcctgtttcggaatatcgataaagtcctgaaaagcctgggattcctggagagcggctctggctccggcggtggcaccctgaagtacgtggaggatgtgacaaacgtggtcagacgggatgtggagaagtggggccccttcgatctggtgtacggcagcacccaacccctgggcagctcttgtgaccggtgccctggctggtacatgtttcagttccaccggatcctgcagtacgccctgccgagacaggagtcccagcggccattcttttggattttcatggacaacttgctgctgaccgaggatgaccaggaaactaccactcggttcctgcagaccgaagccgtgaccctgcaggacgtgagaggccgggactaccagaacgccatgcgggtgtggtccaacatccctggactgaaaagcaagcacgcacctctgacccctaaagaagaggagtacctgcaggcccaggtgcggagcagaagcaagctggacgcccctaaggtggatctgctggtgaagaattgcctcctgcccctgagagagtacttcaagtatttcagccagaatagtctgcccctgggaggcagcggcggcggcgccctggtgacatttgaggacgtcgccgtgcggttcacccaggaggaatgggctctgctggatccttctcagaaaatcctgtaccgggacgtgatgagagagacataccggaatctgacctccgtgggcatcaactgggaatgttgggaccttgaagcctgcttcagaagcctgggaagaaacctgagagtgcaggtggtgaagagaaagtgcgagctgaccaacagcggcccctgcgccgagggcggcccaagcagcggcgcccctcctcccagcggcggcagcccagccggctccccaacctctaccgaggagggcacctctgagtccgccacccccgagagcggccctggcacctccaccgagcccagcgagggcagcgcacccggcagccctgccggcagccccacctccacagaggagggaaccagcaccgagcccagcgaaggcagcgccccaggcaccagcaccgagcctagtgagcaggagattaaacggatcaacaagatcagaagaagacttgtgaaagacagcaacaccaagaaggccggcaagacaggccccatgaaaaccctgctggttagagtgatgacacccgatctgagagagcggctggaaaacctgagaaagaagcctgaaaatatcccccagcccatcagcaatacatctagagccaacctgaataagctgctgaccgattacaccgaaatgaagaaggcgatcctgcatgtgtactgggaagagttccagaaggaccctgtgggcctgatgagccgggtggcccagcctgccagcaagaagatcgatcagaacaagctgaaacctgagatggacgagaagggcaacctgaccaccgccggctttgcctgctctcagtgtggccagcccctgttcgtgtacaagctggagcaggtgtctgagaagggcaaggcttacaccaactacttcggacggtgcaatgtggccgagcacgaaaagctgatcctgctggcccagctgaagcccgagaaggatagcgacgaagccgtgacatatagcctgggaaagtttgggcagagggccctggatttctacagcattcatgtgaccaaggagtccacccaccccgtgaagcccctggcccagatcgccggaaacagatacgcctccggacctgtgggaaaggccctgagcgacgcatgtatgggcacaatcgcctccttcctgtctaagtaccaggacatcatcatcgaacaccagaaggtggtgaagggcaaccagaagagactggagagcctgcgggagctggccggcaaggaaaacctggaataccctagcgtgaccctgccacctcagcctcacaccaaggagggcgttgatgcctacaacgaagtgatcgcccgggtgcgaatgtgggtgaacctgaacctgtggcagaagctgaagctaagcagagatgatgccaagcctctgctgagactgaagggattcccttcctttcctctggtcgagagacaggccaacgaagtggactggtgggacatggtgtgtaacgtgaagaagctgatcaacgagaaaaaggaggatggcaaggtgttttggcagaatctggctggctacaagagacaggaagccctgagaccatacctgagcagcgaggaagatcggaagaagggaaagaaattcgctcggtaccagctgggcgacctgctgctgcacctggaaaagaagcacggcgaggactggggaaaggtgtacgacgaggcctgggagcggattgacaagaaagtggaaggcctgagcaagcacatcaagctggaagaggaacggagaagcgaggacgcccagagcaaggccgccctgaccgactggctgcgggctaaggccagcttcgtgatcgagggcctgaaggaggccgacaaggacgagttctgcagatgcgagctgaagctgcagaagtggtacggggacctgcggggaaagcccttcgccatcgaagccgagaacagcatcctggacatcagcggcttcagcaagcagtacaactgtgccttcatctggcagaaggacggcgtgaagaagctgaacctgtacctgatcatcaactacttcaagggcggcaagctgcggttcaagaagatcaaacctgaagccttcgaagccaacagattctacaccgtgatcaacaaaaagagcggcgagatcgtgcccatggaggtgaacttcaacttcgacgaccccaacctgatcatcctgcctctggcctttggcaagagacagggcagagaattcatctggaacgacctgctgtccctggaaaccggcagcctgaagctggccaacggaagagtgatcgagaagacactgtacaacagaagaacccggcaggatgagcctgccctgttcgtggccctgaccttcgagcggcgggaggtcctggactcctccaatatcaaaccaatgaacctgatcggcgtggcaagaggcgaaaacatccccgccgtgatcgccctgaccgaccccgagggctgcccactgagccggtttaaggatagcctgggaaacccaacccacatcctgagaatcggcgagagctataaggagaagcagcggaccatccaggccaagaaggaggtggagcagcggagagccggcggctacagccggaagtacgccagcaaagccaagaatctggcagacgatatggtgagaaacaccgctagagatctgctgtactacgccgtgacccaggatgccatgctgatcttcgccaacctgagccggggcttcggccggcagggcaagcggaccttcatggccgagagacagtacacacggatggaggactggctgaccgccaagctggcctacgagggcctgagcaagacctacctgtccaagacactggcccagtacacctccaagacatgcagcaactgtgggtttaccatcaccagcgccgactacgacagggtgctggagaagctgaagaagacagcaacaggctggatgaccacaattaacggcaaggagctgaaggtggagggccagattacctactacaacagatacaagagacagaacgtagtcaaggacctgtccgtcgagctggatagactgagcgaagaatctgtgaacaacgacatctcctcctggacaaagggcagaagcggagaagctctgagcctcctgaagaaaagattctcccatagacccgtgcaggagaagttcgtgtgcctgaactgcggcttcgagacacacgcagccgagcaagccgccctgaacatcgccagatcctggctgttcctgcggagccaggagtacaagaaataccagacaaacaagacaaccggcaacaccgataagagagccttcgtcgagacctggcagtccttttaccggaagaagcttaaggaggtgtggaaacctgccgtgcggtctggcggatctggcggaggctccagccaggccagcgtgagcttcaaggacgtgaccatcgagttcacccaggaggagtggcagcagatggcccccgtgcagaagaacctgtacagggacgtgatgctggagaactacagcaacctggtgagcgtgggctactgctgcttcaagcccgaggtgatcttcaagctggagcagggcgaggagccctggttcagcgaggaggagttcagcaaccagagccaccccaaggactacaggggcggcggcccaagcagcggcgcccctcctcccagcggcggcagcccagccggctccccaacctctaccgaggagggcacctctgagtccgccacccccgagagcggccctggcacctccaccgagcccagcgagggcagcgcacccggcagccctgccggcagccccacctccacagaggagggaaccagcaccgagcccagcgaaggcagcgccccaggcaccagcaccgagcctagtgagcaggagattaaacggatcaacaagatcagaagaagacttgtgaaagacagcaacaccaagaaggccggcaagacaggccccatgaaaaccctgctggttagagtgatgacacccgatctgagagagcggctggaaaacctgagaaagaagcctgaaaatatcccccagcccatcagcaatacatctagagccaacctgaataagctgctgaccgattacaccgaaatgaagaaggcgatcctgcatgtgtactgggaagagttccagaaggaccctgtgggcctgatgagccgggtggcccagcctgccagcaagaagatcgatcagaacaagctgaaacctgagatggacgagaagggcaacctgaccaccgccggctttgcctgctctcagtgtggccagcccctgttcgtgtacaagctggagcaggtgtctgagaagggcaaggcttacaccaactacttcggacggtgcaatgtggccgagcacgaaaagctgatcctgctggcccagctgaagcccgagaaggatagcgacgaagccgtgacatatagcctgggaaagtttgggcagagggccctggatttctacagcattcatgtgaccaaggagtccacccaccccgtgaagcccctggcccagatcgccggaaacagatacgcctccggacctgtgggaaaggccctgagcgacgcatgtatgggcacaatcgcctccttcctgtctaagtaccaggacatcatcatcgaacaccagaaggtggtgaagggcaaccagaagagactggagagcctgcgggagctggccggcaaggaaaacctggaataccctagcgtgaccctgccacctcagcctcacaccaaggagggcgttgatgcctacaacgaagtgatcgcccgggtgcgaatgtgggtgaacctgaacctgtggcagaagctgaagctaagcagagatgatgccaagcctctgctgagactgaagggattcccttcctttcctctggtcgagagacaggccaacgaagtggactggtgggacatggtgtgtaacgtgaagaagctgatcaacgagaaaaaggaggatggcaaggtgttttggcagaatctggctggctacaagagacaggaagccctgagaccatacctgagcagcgaggaagatcggaagaagggaaagaaattcgctcggtaccagctgggcgacctgctgctgcacctggaaaagaagcacggcgaggactggggaaaggtgtacgacgaggcctgggagcggattgacaagaaagtggaaggcctgagcaagcacatcaagctggaagaggaacggagaagcgaggacgcccagagcaaggccgccctgaccgactggctgcgggctaaggccagcttcgtgatcgagggcctgaaggaggccgacaaggacgagttctgcagatgcgagctgaagctgcagaagtggtacggggacctgcggggaaagcccttcgccatcgaagccgagaacagcatcctggacatcagcggcttcagcaagcagtacaactgtgccttcatctggcagaaggacggcgtgaagaagctgaacctgtacctgatcatcaactacttcaagggcggcaagctgcggttcaagaagatcaaacctgaagccttcgaagccaacagattctacaccgtgatcaacaaaaagagcggcgagatcgtgcccatggaggtgaacttcaacttcgacgaccccaacctgatcatcctgcctctggcctttggcaagagacagggcagagaattcatctggaacgacctgctgtccctggaaaccggcagcctgaagctggccaacggaagagtgatcgagaagacactgtacaacagaagaacccggcaggatgagcctgccctgttcgtggccctgaccttcgagcggcgggaggtcctggactcctccaatatcaaaccaatgaacctgatcggcgtggcaagaggcgaaaacatccccgccgtgatcgccctgaccgaccccgagggctgcccactgagccggtttaaggatagcctgggaaacccaacccacatcctgagaatcggcgagagctataaggagaagcagcggaccatccaggccaagaaggaggtggagcagcggagagccggcggctacagccggaagtacgccagcaaagccaagaatctggcagacgatatggtgagaaacaccgctagagatctgctgtactacgccgtgacccaggatgccatgctgatcttcgccaacctgagccggggcttcggccggcagggcaagcggaccttcatggccgagagacagtacacacggatggaggactggctgaccgccaagctggcctacgagggcctgagcaagacctacctgtccaagacactggcccagtacacctccaagacatgcagcaactgtgggtttaccatcaccagcgccgactacgacagggtgctggagaagctgaagaagacagcaacaggctggatgaccacaattaacggcaaggagctgaaggtggagggccagattacctactacaacagatacaagagacagaacgtagtcaaggacctgtccgtcgagctggatagactgagcgaagaatctgtgaacaacgacatctcctcctggacaaagggcagaagcggagaagctctgagcctcctgaagaaaagattctcccatagacccgtgcaggagaagttcgtgtgcctgaactgcggcttcgagacacacgcagccgagcaagccgccctgaacatcgccagatcctggctgttcctgcggagccaggagtacaagaaataccagacaaacaagacaaccggcaacaccgataagagagccttcgtcgagacctggcagtccttttaccggaagaagcttaaggaggtgtggaaacctgccgtgcggtctggcggatctggcggaggctcctagccaggccagcgtgagcttcaaggacgtgaccatcgagttcacccaggaggagtggcagcagatggcccccgtgcagaagaacctgtacagggacgtgatgctggagaactacagcaacctggtgagcgtgggctactgctgcttcaagcccgaggtgatcttcaagctggagcagggcgaggagccctggttcagcgaggaggagttcagcaaccagagccaccccaaggactacaggggcggatctggctccggcagcggccccaagaaaaagagaaaagtctaagctgccttctgcggggcttgccttctggccatgcccttcttctctcccttgcacctgtacctcttggtctttgaataaagcctgagtaggaaggctagcaaaaaaaaaaaaaaaaaaaaaaaaaaaaaaaaaaaaaaaaaaaaaaaaaaaaaaaaaaaaaaaaaaaaaaaaaaaaaaaa

SEQ ID NO: 16781 - RNA, 9485 nt, synthetic construct
  source 1..9485: mol_type = other RNA
aggaaataagagagaaaagaagagtaagaagaaatataagagccaccatggcccctaagaagaagcgtaaagtgagccggatggaacgcctcgtctacgaggtgcggcagaagtgcagaaacatcgaggacatctgcatctcctgcggatctctgaacgtgaccctggagcacccactgttcatcggcggcatgtgccagaactgtaaaaactgttttctggagtgtgcctatcaatacgacgatgacggctaccagagctactgcaccatctgttgcggcggaagagaggtgctgatgtgtggaaataacaactgctgccggtgcttctgcgtggaatgcgtggacctgctggtgggccccggcgccgcccaggccgctattaaggaagatccttggaactgctacatgtgcggccacaagggcacatacggcctgctgagacggagagaggactggcctagcagactgcagatgttcttcgccaataaccacgaccaggagttcgacccccctaaggtgtaccctcccgtccccgccgagaagagaaagcccatccgggtcctgagcctgttcgatggcatcgccaccggtctgctggtgctgaaggacctgggcatccaggtggataggtacattgcctccgaggtgtgcgaggactccatcaccgtgggaatggtgcgtcatcagggcaagatcatgtacgtgggcgacgtgcggagcgtgacacagaagcatatccaggagtggggccctttcgacctggtgatcggcggcagcccttgcaatgacctgagcatcgtgaacccagcccggaagggcctgtacgagggaaccggcagactgttcttcgagttttacagactgctgcacgacgcccggcctaaggaaggcgacgaccggcccttcttttggctgttcgagaatgtggtggccatgggagtcagcgacaagcgggatattagccggttcctggagagcaaccccgtgatgatcgatgccaaggaagtgagcgccgcccaccgggccagatacttctggggcaatctgcctggcatgaacagacccctggccagcaccgtgaacgacaagctggagctgcaggagtgcctggagcacggccggatcgccaagttcagcaaggtgagaaccatcaccacccgaagcaacagcatcaaacaaggcaaggaccagcactttcctgtgttcatgaacgagaaggaggacatcctgtggtgtaccgagatggagagagtgttcgggttcccagtccactacacagatgtcagcaacatgtctagactggccagacagagactgctgggaagaagctggtccgtccctgtgatcagacacctgttcgcccctctgaaggagtacttcgcctgcgtgagcagcggcaacagcaacgccaacagccggggccccagcttctctagcggcctggtgccactgtccctgagagggagccacatgggccccatggagatctacaaaaccgtgagcgcctggaagcggcagcctgtgcgcgtgctgagcctgtttcggaatatcgataaagtcctgaaaagcctgggattcctggagagcggctctggctccggcggtggcaccctgaagtacgtggaggatgtgacaaacgtggtcagacgggatgtggagaagtggggccccttcgatctggtgtacggcagcacccaacccctgggcagctcttgtgaccggtgccctggctggtacatgtttcagttccaccggatcctgcagtacgccctgccgagacaggagtcccagcggccattcttttggattttcatggacaacttgctgctgaccgaggatgaccaggaaactaccactcggttcctgcagaccgaagccgtgaccctgcaggacgtgagaggccgggactaccagaacgccatgcgggtgtggtccaacatccctggactgaaaagcaagcacgcacctctgacccctaaagaagaggagtacctgcaggcccaggtgcggagcagaagcaagctggacgcccctaaggtggatctgctggtgaagaattgcctcctgcccctgagagagtacttcaagtatttcagccagaatagtctgcccctgggaggcagcggcggcggcgccctggtgacatttgaggacgtcgccgtgcggttcacccaggaggaatgggctctgctggatccttctcagaaaatcctgtaccgggacgtgatgagagagacataccggaatctgacctccgtgggcatcaactgggaatgttgggaccttgaagcctgcttcagaagcctgggaagaaacctgagagtgcaggtggtgaagagaaagtgcgagctgaccaacagcggcccctgcgccgagggcggcccaagcagcggcgcccctcctcccagcggcggcagcccagccggctccccaacctctaccgaggagggcacctctgagtccgccacccccgagagcggccctggcacctccaccgagcccagcgagggcagcgcacccggcagccctgccggcagccccacctccacagaggagggaaccagcaccgagcccagcgaaggcagcgccccaggcaccagcaccgagcctagtgagcaggagattaaacggatcaacaagatcagaagaagacttgtgaaagacagcaacaccaagaaggccggcaagacaggccccatgaaaaccctgctggttagagtgatgacacccgatctgagagagcggctggaaaacctgagaaagaagcctgaaaatatcccccagcccatcagcaatacatctagagccaacctgaataagctgctgaccgattacaccgaaatgaagaaggcgatcctgcatgtgtactgggaagagttccagaaggaccctgtgggcctgatgagccgggtggcccagcctgccagcaagaagatcgatcagaacaagctgaaacctgagatggacgagaagggcaacctgaccaccgccggctttgcctgctctcagtgtggccagcccctgttcgtgtacaagctggagcaggtgtctgagaagggcaaggcttacaccaactacttcggacggtgcaatgtggccgagcacgaaaagctgatcctgctggcccagctgaagcccgagaaggatagcgacgaagccgtgacatatagcctgggaaagtttgggcagagggccctggatttctacagcattcatgtgaccaaggagtccacccaccccgtgaagcccctggcccagatcgccggaaacagatacgcctccggacctgtgggaaaggccctgagcgacgcatgtatgggcacaatcgcctccttcctgtctaagtaccaggacatcatcatcgaacaccagaaggtggtgaagggcaaccagaagagactggagagcctgcgggagctggccggcaaggaaaacctggaataccctagcgtgaccctgccacctcagcctcacaccaaggagggcgttgatgcctacaacgaagtgatcgcccgggtgcgaatgtgggtgaacctgaacctgtggcagaagctgaagctaagcagagatgatgccaagcctctgctgagactgaagggattcccttcctttcctctggtcgagagacaggccaacgaagtggactggtgggacatggtgtgtaacgtgaagaagctgatcaacgagaaaaaggaggatggcaaggtgttttggcagaatctggctggctacaagagacaggaagccctgagaccatacctgagcagcgaggaagatcggaagaagggaaagaaattcgctcggtaccagctgggcgacctgctgctgcacctggaaaagaagcacggcgaggactggggaaaggtgtacgacgaggcctgggagcggattgacaagaaagtggaaggcctgagcaagcacatcaagctggaagaggaacggagaagcgaggacgcccagagcaaggccgccctgaccgactggctgcgggctaaggccagcttcgtgatcgagggcctgaaggaggccgacaaggacgagttctgcagatgcgagctgaagctgcagaagtggtacggggacctgcggggaaagcccttcgccatcgaagccgagaacagcatcctggacatcagcggcttcagcaagcagtacaactgtgccttcatctggcagaaggacggcgtgaagaagctgaacctgtacctgatcatcaactacttcaagggcggcaagctgcggttcaagaagatcaaacctgaagccttcgaagccaacagattctacaccgtgatcaacaaaaagagcggcgagatcgtgcccatggaggtgaacttcaacttcgacgaccccaacctgatcatcctgcctctggcctttggcaagagacagggcagagaattcatctggaacgacctgctgtccctggaaaccggcagcctgaagctggccaacggaagagtgatcgagaagacactgtacaacagaagaacccggcaggatgagcctgccctgttcgtggccctgaccttcgagcggcgggaggtcctggactcctccaatatcaaaccaatgaacctgatcggcgtggcaagaggcgaaaacatccccgccgtgatcgccctgaccgaccccgagggctgcccactgagccggtttaaggatagcctgggaaacccaacccacatcctgagaatcggcgagagctataaggagaagcagcggaccatccaggccaagaaggaggtggagcagcggagagccggcggctacagccggaagtacgccagcaaagccaagaatctggcagacgatatggtgagaaacaccgctagagatctgctgtactacgccgtgacccaggatgccatgctgatcttcgccaacctgagccggggcttcggccggcagggcaagcggaccttcatggccgagagacagtacacacggatggaggactggctgaccgccaagctggcctacgagggcctgagcaagacctacctgtccaagacactggcccagtacacctccaagacatgcagcaactgtgggtttaccatcaccagcgccgactacgacagggtgctggagaagctgaagaagacagcaacaggctggatgaccacaattaacggcaaggagctgaaggtggagggccagattacctactacaacagatacaagagacagaacgtagtcaaggacctgtccgtcgagctggatagactgagcgaagaatctgtgaacaacgacatctcctcctggacaaagggcagaagcggagaagctctgagcctcctgaagaaaagattctcccatagacccgtgcaggagaagttcgtgtgcctgaactgcggcttcgagacacacgcagccgagcaagccgccctgaacatcgccagatcctggctgttcctgcggagccaggagtacaagaaataccagacaaacaagacaaccggcaacaccgataagagagccttcgtcgagacctggcagtccttttaccggaagaagcttaaggaggtgtggaaacctgccgtgcggtctggcggatctggcggaggctccgtgaaggagagcgtgaccttcaaggacgtggccatcgacttcaccctggaggagtggaggctgatggaccccacccagaggaacctgcacaaggacgtgatgctggagaactacaggaacctggtgagcctgggcctggccgtgagcaagcccgacatgatcagccacctggagaacggcaagggcccctggcccaagcccgccaccaagaacgccaccaggaccaaggacatcagcgaggacggcggcccaagcagcggcgcccctcctcccagcggcggcagcccagccggctccccaacctctaccgaggagggcacctctgagtccgccacccccgagagcggccctggcacctccaccgagcccagcgagggcagcgcacccggcagccctgccggcagccccacctccacagaggagggaaccagcaccgagcccagcgaaggcagcgccccaggcaccagcaccgagcctagtgagcaggagattaaacggatcaacaagatcagaagaagacttgtgaaagacagcaacaccaagaaggccggcaagacaggccccatgaaaaccctgctggttagagtgatgacacccgatctgagagagcggctggaaaacctgagaaagaagcctgaaaatatcccccagcccatcagcaatacatctagagccaacctgaataagctgctgaccgattacaccgaaatgaagaaggcgatcctgcatgtgtactgggaagagttccagaaggaccctgtgggcctgatgagccgggtggcccagcctgccagcaagaagatcgatcagaacaagctgaaacctgagatggacgagaagggcaacctgaccaccgccggctttgcctgctctcagtgtggccagcccctgttcgtgtacaagctggagcaggtgtctgagaagggcaaggcttacaccaactacttcggacggtgcaatgtggccgagcacgaaaagctgatcctgctggcccagctgaagcccgagaaggatagcgacgaagccgtgacatatagcctgggaaagtttgggcagagggccctggatttctacagcattcatgtgaccaaggagtccacccaccccgtgaagcccctggcccagatcgccggaaacagatacgcctccggacctgtgggaaaggccctgagcgacgcatgtatgggcacaatcgcctccttcctgtctaagtaccaggacatcatcatcgaacaccagaaggtggtgaagggcaaccagaagagactggagagcctgcgggagctggccggcaaggaaaacctggaataccctagcgtgaccctgccacctcagcctcacaccaaggagggcgttgatgcctacaacgaagtgatcgcccgggtgcgaatgtgggtgaacctgaacctgtggcagaagctgaagctaagcagagatgatgccaagcctctgctgagactgaagggattcccttcctttcctctggtcgagagacaggccaacgaagtggactggtgggacatggtgtgtaacgtgaagaagctgatcaacgagaaaaaggaggatggcaaggtgttttggcagaatctggctggctacaagagacaggaagccctgagaccatacctgagcagcgaggaagatcggaagaagggaaagaaattcgctcggtaccagctgggcgacctgctgctgcacctggaaaagaagcacggcgaggactggggaaaggtgtacgacgaggcctgggagcggattgacaagaaagtggaaggcctgagcaagcacatcaagctggaagaggaacggagaagcgaggacgcccagagcaaggccgccctgaccgactggctgcgggctaaggccagcttcgtgatcgagggcctgaaggaggccgacaaggacgagttctgcagatgcgagctgaagctgcagaagtggtacggggacctgcggggaaagcccttcgccatcgaagccgagaacagcatcctggacatcagcggcttcagcaagcagtacaactgtgccttcatctggcagaaggacggcgtgaagaagctgaacctgtacctgatcatcaactacttcaagggcggcaagctgcggttcaagaagatcaaacctgaagccttcgaagccaacagattctacaccgtgatcaacaaaaagagcggcgagatcgtgcccatggaggtgaacttcaacttcgacgaccccaacctgatcatcctgcctctggcctttggcaagagacagggcagagaattcatctggaacgacctgctgtccctggaaaccggcagcctgaagctggccaacggaagagtgatcgagaagacactgtacaacagaagaacccggcaggatgagcctgccctgttcgtggccctgaccttcgagcggcgggaggtcctggactcctccaatatcaaaccaatgaacctgatcggcgtggcaagaggcgaaaacatccccgccgtgatcgccctgaccgaccccgagggctgcccactgagccggtttaaggatagcctgggaaacccaacccacatcctgagaatcggcgagagctataaggagaagcagcggaccatccaggccaagaaggaggtggagcagcggagagccggcggctacagccggaagtacgccagcaaagccaagaatctggcagacgatatggtgagaaacaccgctagagatctgctgtactacgccgtgacccaggatgccatgctgatcttcgccaacctgagccggggcttcggccggcagggcaagcggaccttcatggccgagagacagtacacacggatggaggactggctgaccgccaagctggcctacgagggcctgagcaagacctacctgtccaagacactggcccagtacacctccaagacatgcagcaactgtgggtttaccatcaccagcgccgactacgacagggtgctggagaagctgaagaagacagcaacaggctggatgaccacaattaacggcaaggagctgaaggtggagggccagattacctactacaacagatacaagagacagaacgtagtcaaggacctgtccgtcgagctggatagactgagcgaagaatctgtgaacaacgacatctcctcctggacaaagggcagaagcggagaagctctgagcctcctgaagaaaagattctcccatagacccgtgcaggagaagttcgtgtgcctgaactgcggcttcgagacacacgcagccgagcaagccgccctgaacatcgccagatcctggctgttcctgcggagccaggagtacaagaaataccagacaaacaagacaaccggcaacaccgataagagagccttcgtcgagacctggcagtccttttaccggaagaagcttaaggaggtgtggaaacctgccgtgcggtctggcggatctggcggaggctcctgtgaaggagagcgtgaccttcaaggacgtggccatcgacttcaccctggaggagtggaggctgatggaccccacccagaggaacctgcacaaggacgtgatgctggagaactacaggaacctggtgagcctgggcctggccgtgagcaagcccgacatgatcagccacctggagaacggcaagggcccctggcccaagcccgccaccaagaacgccaccaggaccaaggacatcagcgaggacggatctggctccggcagcggccccaagaaaaagagaaaagtctaagctgccttctgcggggcttgccttctggccatgcccttcttctctcccttgcacctgtacctcttggtctttgaataaagcctgagtaggaaggctagcaaaaaaaaaaaaaaaaaaaaaaaaaaaaaaaaaaaaaaaaaaaaaaaaaaaaaaaaaaaaaaaaaaaaaaaaaaaaaaaa

SEQ ID NO: 16782 - RNA, 9485 nt, synthetic construct
  source 1..9485: mol_type = other RNA
aggaaataagagagaaaagaagagtaagaagaaatataagagccaccatggcccctaagaagaagcgtaaagtgagccggatggaacgcctcgtctacgaggtgcggcagaagtgcagaaacatcgaggacatctgcatctcctgcggatctctgaacgtgaccctggagcacccactgttcatcggcggcatgtgccagaactgtaaaaactgttttctggagtgtgcctatcaatacgacgatgacggctaccagagctactgcaccatctgttgcggcggaagagaggtgctgatgtgtggaaataacaactgctgccggtgcttctgcgtggaatgcgtggacctgctggtgggccccggcgccgcccaggccgctattaaggaagatccttggaactgctacatgtgcggccacaagggcacatacggcctgctgagacggagagaggactggcctagcagactgcagatgttcttcgccaataaccacgaccaggagttcgacccccctaaggtgtaccctcccgtccccgccgagaagagaaagcccatccgggtcctgagcctgttcgatggcatcgccaccggtctgctggtgctgaaggacctgggcatccaggtggataggtacattgcctccgaggtgtgcgaggactccatcaccgtgggaatggtgcgtcatcagggcaagatcatgtacgtgggcgacgtgcggagcgtgacacagaagcatatccaggagtggggccctttcgacctggtgatcggcggcagcccttgcaatgacctgagcatcgtgaacccagcccggaagggcctgtacgagggaaccggcagactgttcttcgagttttacagactgctgcacgacgcccggcctaaggaaggcgacgaccggcccttcttttggctgttcgagaatgtggtggccatgggagtcagcgacaagcgggatattagccggttcctggagagcaaccccgtgatgatcgatgccaaggaagtgagcgccgcccaccgggccagatacttctggggcaatctgcctggcatgaacagacccctggccagcaccgtgaacgacaagctggagctgcaggagtgcctggagcacggccggatcgccaagttcagcaaggtgagaaccatcaccacccgaagcaacagcatcaaacaaggcaaggaccagcactttcctgtgttcatgaacgagaaggaggacatcctgtggtgtaccgagatggagagagtgttcgggttcccagtccactacacagatgtcagcaacatgtctagactggccagacagagactgctgggaagaagctggtccgtccctgtgatcagacacctgttcgcccctctgaaggagtacttcgcctgcgtgagcagcggcaacagcaacgccaacagccggggccccagcttctctagcggcctggtgccactgtccctgagagggagccacatgggccccatggagatctacaaaaccgtgagcgcctggaagcggcagcctgtgcgcgtgctgagcctgtttcggaatatcgataaagtcctgaaaagcctgggattcctggagagcggctctggctccggcggtggcaccctgaagtacgtggaggatgtgacaaacgtggtcagacgggatgtggagaagtggggccccttcgatctggtgtacggcagcacccaacccctgggcagctcttgtgaccggtgccctggctggtacatgtttcagttccaccggatcctgcagtacgccctgccgagacaggagtcccagcggccattcttttggattttcatggacaacttgctgctgaccgaggatgaccaggaaactaccactcggttcctgcagaccgaagccgtgaccctgcaggacgtgagaggccgggactaccagaacgccatgcgggtgtggtccaacatccctggactgaaaagcaagcacgcacctctgacccctaaagaagaggagtacctgcaggcccaggtgcggagcagaagcaagctggacgcccctaaggtggatctgctggtgaagaattgcctcctgcccctgagagagtacttcaagtatttcagccagaatagtctgcccctgggaggcagcggcggcggcgccctggtgacatttgaggacgtcgccgtgcggttcacccaggaggaatgggctctgctggatccttctcagaaaatcctgtaccgggacgtgatgagagagacataccggaatctgacctccgtgggcatcaactgggaatgttgggaccttgaagcctgcttcagaagcctgggaagaaacctgagagtgcaggtggtgaagagaaagtgcgagctgaccaacagcggcccctgcgccgagggcggcccaagcagcggcgcccctcctcccagcggcggcagcccagccggctccccaacctctaccgaggagggcacctctgagtccgccacccccgagagcggccctggcacctccaccgagcccagcgagggcagcgcacccggcagccctgccggcagccccacctccacagaggagggaaccagcaccgagcccagcgaaggcagcgccccaggcaccagcaccgagcctagtgagcaggagattaaacggatcaacaagatcagaagaagacttgtgaaagacagcaacaccaagaaggccggcaagacaggccccatgaaaaccctgctggttagagtgatgacacccgatctgagagagcggctggaaaacctgagaaagaagcctgaaaatatcccccagcccatcagcaatacatctagagccaacctgaataagctgctgaccgattacaccgaaatgaagaaggcgatcctgcatgtgtactgggaagagttccagaaggaccctgtgggcctgatgagccgggtggcccagcctgccagcaagaagatcgatcagaacaagctgaaacctgagatggacgagaagggcaacctgaccaccgccggctttgcctgctctcagtgtggccagcccctgttcgtgtacaagctggagcaggtgtctgagaagggcaaggcttacaccaactacttcggacggtgcaatgtggccgagcacgaaaagctgatcctgctggcccagctgaagcccgagaaggatagcgacgaagccgtgacatatagcctgggaaagtttgggcagagggccctggatttctacagcattcatgtgaccaaggagtccacccaccccgtgaagcccctggcccagatcgccggaaacagatacgcctccggacctgtgggaaaggccctgagcgacgcatgtatgggcacaatcgcctccttcctgtctaagtaccaggacatcatcatcgaacaccagaaggtggtgaagggcaaccagaagagactggagagcctgcgggagctggccggcaaggaaaacctggaataccctagcgtgaccctgccacctcagcctcacaccaaggagggcgttgatgcctacaacgaagtgatcgcccgggtgcgaatgtgggtgaacctgaacctgtggcagaagctgaagctaagcagagatgatgccaagcctctgctgagactgaagggattcccttcctttcctctggtcgagagacaggccaacgaagtggactggtgggacatggtgtgtaacgtgaagaagctgatcaacgagaaaaaggaggatggcaaggtgttttggcagaatctggctggctacaagagacaggaagccctgagaccatacctgagcagcgaggaagatcggaagaagggaaagaaattcgctcggtaccagctgggcgacctgctgctgcacctggaaaagaagcacggcgaggactggggaaaggtgtacgacgaggcctgggagcggattgacaagaaagtggaaggcctgagcaagcacatcaagctggaagaggaacggagaagcgaggacgcccagagcaaggccgccctgaccgactggctgcgggctaaggccagcttcgtgatcgagggcctgaaggaggccgacaaggacgagttctgcagatgcgagctgaagctgcagaagtggtacggggacctgcggggaaagcccttcgccatcgaagccgagaacagcatcctggacatcagcggcttcagcaagcagtacaactgtgccttcatctggcagaaggacggcgtgaagaagctgaacctgtacctgatcatcaactacttcaagggcggcaagctgcggttcaagaagatcaaacctgaagccttcgaagccaacagattctacaccgtgatcaacaaaaagagcggcgagatcgtgcccatggaggtgaacttcaacttcgacgaccccaacctgatcatcctgcctctggcctttggcaagagacagggcagagaattcatctggaacgacctgctgtccctggaaaccggcagcctgaagctggccaacggaagagtgatcgagaagacactgtacaacagaagaacccggcaggatgagcctgccctgttcgtggccctgaccttcgagcggcgggaggtcctggactcctccaatatcaaaccaatgaacctgatcggcgtggcaagaggcgaaaacatccccgccgtgatcgccctgaccgaccccgagggctgcccactgagccggtttaaggatagcctgggaaacccaacccacatcctgagaatcggcgagagctataaggagaagcagcggaccatccaggccaagaaggaggtggagcagcggagagccggcggctacagccggaagtacgccagcaaagccaagaatctggcagacgatatggtgagaaacaccgctagagatctgctgtactacgccgtgacccaggatgccatgctgatcttcgccaacctgagccggggcttcggccggcagggcaagcggaccttcatggccgagagacagtacacacggatggaggactggctgaccgccaagctggcctacgagggcctgagcaagacctacctgtccaagacactggcccagtacacctccaagacatgcagcaactgtgggtttaccatcaccagcgccgactacgacagggtgctggagaagctgaagaagacagcaacaggctggatgaccacaattaacggcaaggagctgaaggtggagggccagattacctactacaacagatacaagagacagaacgtagtcaaggacctgtccgtcgagctggatagactgagcgaagaatctgtgaacaacgacatctcctcctggacaaagggcagaagcggagaagctctgagcctcctgaagaaaagattctcccatagacccgtgcaggagaagttcgtgtgcctgaactgcggcttcgagacacacgcagccgagcaagccgccctgaacatcgccagatcctggctgttcctgcggagccaggagtacaagaaataccagacaaacaagacaaccggcaacaccgataagagagccttcgtcgagacctggcagtccttttaccggaagaagcttaaggaggtgtggaaacctgccgtgcggtctggcggatctggcggaggctccgcccaggagatggtgaccttccaggacgtggccgtggacttcaccagggaggagtggtgcctgctgagccccccccagaaggagctgtacaaggaggtgatgctggagaacgccaggaacctgctgagcgtgggcctgcccgccctgcccgaggacgtgatcagctacctggagcagagggaggccccctggatgctggagagggagggccccaggagctgctgccccggcgagatcctgctgggcggcccaagcagcggcgcccctcctcccagcggcggcagcccagccggctccccaacctctaccgaggagggcacctctgagtccgccacccccgagagcggccctggcacctccaccgagcccagcgagggcagcgcacccggcagccctgccggcagccccacctccacagaggagggaaccagcaccgagcccagcgaaggcagcgccccaggcaccagcaccgagcctagtgagcaggagattaaacggatcaacaagatcagaagaagacttgtgaaagacagcaacaccaagaaggccggcaagacaggccccatgaaaaccctgctggttagagtgatgacacccgatctgagagagcggctggaaaacctgagaaagaagcctgaaaatatcccccagcccatcagcaatacatctagagccaacctgaataagctgctgaccgattacaccgaaatgaagaaggcgatcctgcatgtgtactgggaagagttccagaaggaccctgtgggcctgatgagccgggtggcccagcctgccagcaagaagatcgatcagaacaagctgaaacctgagatggacgagaagggcaacctgaccaccgccggctttgcctgctctcagtgtggccagcccctgttcgtgtacaagctggagcaggtgtctgagaagggcaaggcttacaccaactacttcggacggtgcaatgtggccgagcacgaaaagctgatcctgctggcccagctgaagcccgagaaggatagcgacgaagccgtgacatatagcctgggaaagtttgggcagagggccctggatttctacagcattcatgtgaccaaggagtccacccaccccgtgaagcccctggcccagatcgccggaaacagatacgcctccggacctgtgggaaaggccctgagcgacgcatgtatgggcacaatcgcctccttcctgtctaagtaccaggacatcatcatcgaacaccagaaggtggtgaagggcaaccagaagagactggagagcctgcgggagctggccggcaaggaaaacctggaataccctagcgtgaccctgccacctcagcctcacaccaaggagggcgttgatgcctacaacgaagtgatcgcccgggtgcgaatgtgggtgaacctgaacctgtggcagaagctgaagctaagcagagatgatgccaagcctctgctgagactgaagggattcccttcctttcctctggtcgagagacaggccaacgaagtggactggtgggacatggtgtgtaacgtgaagaagctgatcaacgagaaaaaggaggatggcaaggtgttttggcagaatctggctggctacaagagacaggaagccctgagaccatacctgagcagcgaggaagatcggaagaagggaaagaaattcgctcggtaccagctgggcgacctgctgctgcacctggaaaagaagcacggcgaggactggggaaaggtgtacgacgaggcctgggagcggattgacaagaaagtggaaggcctgagcaagcacatcaagctggaagaggaacggagaagcgaggacgcccagagcaaggccgccctgaccgactggctgcgggctaaggccagcttcgtgatcgagggcctgaaggaggccgacaaggacgagttctgcagatgcgagctgaagctgcagaagtggtacggggacctgcggggaaagcccttcgccatcgaagccgagaacagcatcctggacatcagcggcttcagcaagcagtacaactgtgccttcatctggcagaaggacggcgtgaagaagctgaacctgtacctgatcatcaactacttcaagggcggcaagctgcggttcaagaagatcaaacctgaagccttcgaagccaacagattctacaccgtgatcaacaaaaagagcggcgagatcgtgcccatggaggtgaacttcaacttcgacgaccccaacctgatcatcctgcctctggcctttggcaagagacagggcagagaattcatctggaacgacctgctgtccctggaaaccggcagcctgaagctggccaacggaagagtgatcgagaagacactgtacaacagaagaacccggcaggatgagcctgccctgttcgtggccctgaccttcgagcggcgggaggtcctggactcctccaatatcaaaccaatgaacctgatcggcgtggcaagaggcgaaaacatccccgccgtgatcgccctgaccgaccccgagggctgcccactgagccggtttaaggatagcctgggaaacccaacccacatcctgagaatcggcgagagctataaggagaagcagcggaccatccaggccaagaaggaggtggagcagcggagagccggcggctacagccggaagtacgccagcaaagccaagaatctggcagacgatatggtgagaaacaccgctagagatctgctgtactacgccgtgacccaggatgccatgctgatcttcgccaacctgagccggggcttcggccggcagggcaagcggaccttcatggccgagagacagtacacacggatggaggactggctgaccgccaagctggcctacgagggcctgagcaagacctacctgtccaagacactggcccagtacacctccaagacatgcagcaactgtgggtttaccatcaccagcgccgactacgacagggtgctggagaagctgaagaagacagcaacaggctggatgaccacaattaacggcaaggagctgaaggtggagggccagattacctactacaacagatacaagagacagaacgtagtcaaggacctgtccgtcgagctggatagactgagcgaagaatctgtgaacaacgacatctcctcctggacaaagggcagaagcggagaagctctgagcctcctgaagaaaagattctcccatagacccgtgcaggagaagttcgtgtgcctgaactgcggcttcgagacacacgcagccgagcaagccgccctgaacatcgccagatcctggctgttcctgcggagccaggagtacaagaaataccagacaaacaagacaaccggcaacaccgataagagagccttcgtcgagacctggcagtccttttaccggaagaagcttaaggaggtgtggaaacctgccgtgcggtctggcggatctggcggaggctcctgcccaggagatggtgaccttccaggacgtggccgtggacttcaccagggaggagtggtgcctgctgagccccccccagaaggagctgtacaaggaggtgatgctggagaacgccaggaacctgctgagcgtgggcctgcccgccctgcccgaggacgtgatcagctacctggagcagagggaggccccctggatgctggagagggagggccccaggagctgctgccccggcgagatcctgctgggatctggctccggcagcggccccaagaaaaagagaaaagtctaagctgccttctgcggggcttgccttctggccatgcccttcttctctcccttgcacctgtacctcttggtctttgaataaagcctgagtaggaaggctagcaaaaaaaaaaaaaaaaaaaaaaaaaaaaaaaaaaaaaaaaaaaaaaaaaaaaaaaaaaaaaaaaaaaaaaaaaaaaaaaa

SEQ ID NO: 16783 - RNA, 9485 nt, synthetic construct
  source 1..9485: mol_type = other RNA
aggaaataagagagaaaagaagagtaagaagaaatataagagccaccatggcccctaagaagaagcgtaaagtgagccggatggaacgcctcgtctacgaggtgcggcagaagtgcagaaacatcgaggacatctgcatctcctgcggatctctgaacgtgaccctggagcacccactgttcatcggcggcatgtgccagaactgtaaaaactgttttctggagtgtgcctatcaatacgacgatgacggctaccagagctactgcaccatctgttgcggcggaagagaggtgctgatgtgtggaaataacaactgctgccggtgcttctgcgtggaatgcgtggacctgctggtgggccccggcgccgcccaggccgctattaaggaagatccttggaactgctacatgtgcggccacaagggcacatacggcctgctgagacggagagaggactggcctagcagactgcagatgttcttcgccaataaccacgaccaggagttcgacccccctaaggtgtaccctcccgtccccgccgagaagagaaagcccatccgggtcctgagcctgttcgatggcatcgccaccggtctgctggtgctgaaggacctgggcatccaggtggataggtacattgcctccgaggtgtgcgaggactccatcaccgtgggaatggtgcgtcatcagggcaagatcatgtacgtgggcgacgtgcggagcgtgacacagaagcatatccaggagtggggccctttcgacctggtgatcggcggcagcccttgcaatgacctgagcatcgtgaacccagcccggaagggcctgtacgagggaaccggcagactgttcttcgagttttacagactgctgcacgacgcccggcctaaggaaggcgacgaccggcccttcttttggctgttcgagaatgtggtggccatgggagtcagcgacaagcgggatattagccggttcctggagagcaaccccgtgatgatcgatgccaaggaagtgagcgccgcccaccgggccagatacttctggggcaatctgcctggcatgaacagacccctggccagcaccgtgaacgacaagctggagctgcaggagtgcctggagcacggccggatcgccaagttcagcaaggtgagaaccatcaccacccgaagcaacagcatcaaacaaggcaaggaccagcactttcctgtgttcatgaacgagaaggaggacatcctgtggtgtaccgagatggagagagtgttcgggttcccagtccactacacagatgtcagcaacatgtctagactggccagacagagactgctgggaagaagctggtccgtccctgtgatcagacacctgttcgcccctctgaaggagtacttcgcctgcgtgagcagcggcaacagcaacgccaacagccggggccccagcttctctagcggcctggtgccactgtccctgagagggagccacatgggccccatggagatctacaaaaccgtgagcgcctggaagcggcagcctgtgcgcgtgctgagcctgtttcggaatatcgataaagtcctgaaaagcctgggattcctggagagcggctctggctccggcggtggcaccctgaagtacgtggaggatgtgacaaacgtggtcagacgggatgtggagaagtggggccccttcgatctggtgtacggcagcacccaacccctgggcagctcttgtgaccggtgccctggctggtacatgtttcagttccaccggatcctgcagtacgccctgccgagacaggagtcccagcggccattcttttggattttcatggacaacttgctgctgaccgaggatgaccaggaaactaccactcggttcctgcagaccgaagccgtgaccctgcaggacgtgagaggccgggactaccagaacgccatgcgggtgtggtccaacatccctggactgaaaagcaagcacgcacctctgacccctaaagaagaggagtacctgcaggcccaggtgcggagcagaagcaagctggacgcccctaaggtggatctgctggtgaagaattgcctcctgcccctgagagagtacttcaagtatttcagccagaatagtctgcccctgggaggcagcggcggcggcgccctggtgacatttgaggacgtcgccgtgcggttcacccaggaggaatgggctctgctggatccttctcagaaaatcctgtaccgggacgtgatgagagagacataccggaatctgacctccgtgggcatcaactgggaatgttgggaccttgaagcctgcttcagaagcctgggaagaaacctgagagtgcaggtggtgaagagaaagtgcgagctgaccaacagcggcccctgcgccgagggcggcccaagcagcggcgcccctcctcccagcggcggcagcccagccggctccccaacctctaccgaggagggcacctctgagtccgccacccccgagagcggccctggcacctccaccgagcccagcgagggcagcgcacccggcagccctgccggcagccccacctccacagaggagggaaccagcaccgagcccagcgaaggcagcgccccaggcaccagcaccgagcctagtgagcaggagattaaacggatcaacaagatcagaagaagacttgtgaaagacagcaacaccaagaaggccggcaagacaggccccatgaaaaccctgctggttagagtgatgacacccgatctgagagagcggctggaaaacctgagaaagaagcctgaaaatatcccccagcccatcagcaatacatctagagccaacctgaataagctgctgaccgattacaccgaaatgaagaaggcgatcctgcatgtgtactgggaagagttccagaaggaccctgtgggcctgatgagccgggtggcccagcctgccagcaagaagatcgatcagaacaagctgaaacctgagatggacgagaagggcaacctgaccaccgccggctttgcctgctctcagtgtggccagcccctgttcgtgtacaagctggagcaggtgtctgagaagggcaaggcttacaccaactacttcggacggtgcaatgtggccgagcacgaaaagctgatcctgctggcccagctgaagcccgagaaggatagcgacgaagccgtgacatatagcctgggaaagtttgggcagagggccctggatttctacagcattcatgtgaccaaggagtccacccaccccgtgaagcccctggcccagatcgccggaaacagatacgcctccggacctgtgggaaaggccctgagcgacgcatgtatgggcacaatcgcctccttcctgtctaagtaccaggacatcatcatcgaacaccagaaggtggtgaagggcaaccagaagagactggagagcctgcgggagctggccggcaaggaaaacctggaataccctagcgtgaccctgccacctcagcctcacaccaaggagggcgttgatgcctacaacgaagtgatcgcccgggtgcgaatgtgggtgaacctgaacctgtggcagaagctgaagctaagcagagatgatgccaagcctctgctgagactgaagggattcccttcctttcctctggtcgagagacaggccaacgaagtggactggtgggacatggtgtgtaacgtgaagaagctgatcaacgagaaaaaggaggatggcaaggtgttttggcagaatctggctggctacaagagacaggaagccctgagaccatacctgagcagcgaggaagatcggaagaagggaaagaaattcgctcggtaccagctgggcgacctgctgctgcacctggaaaagaagcacggcgaggactggggaaaggtgtacgacgaggcctgggagcggattgacaagaaagtggaaggcctgagcaagcacatcaagctggaagaggaacggagaagcgaggacgcccagagcaaggccgccctgaccgactggctgcgggctaaggccagcttcgtgatcgagggcctgaaggaggccgacaaggacgagttctgcagatgcgagctgaagctgcagaagtggtacggggacctgcggggaaagcccttcgccatcgaagccgagaacagcatcctggacatcagcggcttcagcaagcagtacaactgtgccttcatctggcagaaggacggcgtgaagaagctgaacctgtacctgatcatcaactacttcaagggcggcaagctgcggttcaagaagatcaaacctgaagccttcgaagccaacagattctacaccgtgatcaacaaaaagagcggcgagatcgtgcccatggaggtgaacttcaacttcgacgaccccaacctgatcatcctgcctctggcctttggcaagagacagggcagagaattcatctggaacgacctgctgtccctggaaaccggcagcctgaagctggccaacggaagagtgatcgagaagacactgtacaacagaagaacccggcaggatgagcctgccctgttcgtggccctgaccttcgagcggcgggaggtcctggactcctccaatatcaaaccaatgaacctgatcggcgtggcaagaggcgaaaacatccccgccgtgatcgccctgaccgaccccgagggctgcccactgagccggtttaaggatagcctgggaaacccaacccacatcctgagaatcggcgagagctataaggagaagcagcggaccatccaggccaagaaggaggtggagcagcggagagccggcggctacagccggaagtacgccagcaaagccaagaatctggcagacgatatggtgagaaacaccgctagagatctgctgtactacgccgtgacccaggatgccatgctgatcttcgccaacctgagccggggcttcggccggcagggcaagcggaccttcatggccgagagacagtacacacggatggaggactggctgaccgccaagctggcctacgagggcctgagcaagacctacctgtccaagacactggcccagtacacctccaagacatgcagcaactgtgggtttaccatcaccagcgccgactacgacagggtgctggagaagctgaagaagacagcaacaggctggatgaccacaattaacggcaaggagctgaaggtggagggccagattacctactacaacagatacaagagacagaacgtagtcaaggacctgtccgtcgagctggatagactgagcgaagaatctgtgaacaacgacatctcctcctggacaaagggcagaagcggagaagctctgagcctcctgaagaaaagattctcccatagacccgtgcaggagaagttcgtgtgcctgaactgcggcttcgagacacacgcagccgagcaagccgccctgaacatcgccagatcctggctgttcctgcggagccaggagtacaagaaataccagacaaacaagacaaccggcaacaccgataagagagccttcgtcgagacctggcagtccttttaccggaagaagcttaaggaggtgtggaaacctgccgtgcggtctggcggatctggcggaggctccgtgagcttcgaggacgtggccgtgtacttcacccaggaggagtggaccctgctggacagcgcccagagggacctgtacagggacgtgatgctggagacctgcgagaacctggccagcatcggcaacctgctgaaccacagcgtgatgtactggctggagggcgaggagaacctgggcaccgtgcaggagggcgacccccaggagtggaggctgaagaccaagggcagcaccctgaggcccgacggcggcccaagcagcggcgcccctcctcccagcggcggcagcccagccggctccccaacctctaccgaggagggcacctctgagtccgccacccccgagagcggccctggcacctccaccgagcccagcgagggcagcgcacccggcagccctgccggcagccccacctccacagaggagggaaccagcaccgagcccagcgaaggcagcgccccaggcaccagcaccgagcctagtgagcaggagattaaacggatcaacaagatcagaagaagacttgtgaaagacagcaacaccaagaaggccggcaagacaggccccatgaaaaccctgctggttagagtgatgacacccgatctgagagagcggctggaaaacctgagaaagaagcctgaaaatatcccccagcccatcagcaatacatctagagccaacctgaataagctgctgaccgattacaccgaaatgaagaaggcgatcctgcatgtgtactgggaagagttccagaaggaccctgtgggcctgatgagccgggtggcccagcctgccagcaagaagatcgatcagaacaagctgaaacctgagatggacgagaagggcaacctgaccaccgccggctttgcctgctctcagtgtggccagcccctgttcgtgtacaagctggagcaggtgtctgagaagggcaaggcttacaccaactacttcggacggtgcaatgtggccgagcacgaaaagctgatcctgctggcccagctgaagcccgagaaggatagcgacgaagccgtgacatatagcctgggaaagtttgggcagagggccctggatttctacagcattcatgtgaccaaggagtccacccaccccgtgaagcccctggcccagatcgccggaaacagatacgcctccggacctgtgggaaaggccctgagcgacgcatgtatgggcacaatcgcctccttcctgtctaagtaccaggacatcatcatcgaacaccagaaggtggtgaagggcaaccagaagagactggagagcctgcgggagctggccggcaaggaaaacctggaataccctagcgtgaccctgccacctcagcctcacaccaaggagggcgttgatgcctacaacgaagtgatcgcccgggtgcgaatgtgggtgaacctgaacctgtggcagaagctgaagctaagcagagatgatgccaagcctctgctgagactgaagggattcccttcctttcctctggtcgagagacaggccaacgaagtggactggtgggacatggtgtgtaacgtgaagaagctgatcaacgagaaaaaggaggatggcaaggtgttttggcagaatctggctggctacaagagacaggaagccctgagaccatacctgagcagcgaggaagatcggaagaagggaaagaaattcgctcggtaccagctgggcgacctgctgctgcacctggaaaagaagcacggcgaggactggggaaaggtgtacgacgaggcctgggagcggattgacaagaaagtggaaggcctgagcaagcacatcaagctggaagaggaacggagaagcgaggacgcccagagcaaggccgccctgaccgactggctgcgggctaaggccagcttcgtgatcgagggcctgaaggaggccgacaaggacgagttctgcagatgcgagctgaagctgcagaagtggtacggggacctgcggggaaagcccttcgccatcgaagccgagaacagcatcctggacatcagcggcttcagcaagcagtacaactgtgccttcatctggcagaaggacggcgtgaagaagctgaacctgtacctgatcatcaactacttcaagggcggcaagctgcggttcaagaagatcaaacctgaagccttcgaagccaacagattctacaccgtgatcaacaaaaagagcggcgagatcgtgcccatggaggtgaacttcaacttcgacgaccccaacctgatcatcctgcctctggcctttggcaagagacagggcagagaattcatctggaacgacctgctgtccctggaaaccggcagcctgaagctggccaacggaagagtgatcgagaagacactgtacaacagaagaacccggcaggatgagcctgccctgttcgtggccctgaccttcgagcggcgggaggtcctggactcctccaatatcaaaccaatgaacctgatcggcgtggcaagaggcgaaaacatccccgccgtgatcgccctgaccgaccccgagggctgcccactgagccggtttaaggatagcctgggaaacccaacccacatcctgagaatcggcgagagctataaggagaagcagcggaccatccaggccaagaaggaggtggagcagcggagagccggcggctacagccggaagtacgccagcaaagccaagaatctggcagacgatatggtgagaaacaccgctagagatctgctgtactacgccgtgacccaggatgccatgctgatcttcgccaacctgagccggggcttcggccggcagggcaagcggaccttcatggccgagagacagtacacacggatggaggactggctgaccgccaagctggcctacgagggcctgagcaagacctacctgtccaagacactggcccagtacacctccaagacatgcagcaactgtgggtttaccatcaccagcgccgactacgacagggtgctggagaagctgaagaagacagcaacaggctggatgaccacaattaacggcaaggagctgaaggtggagggccagattacctactacaacagatacaagagacagaacgtagtcaaggacctgtccgtcgagctggatagactgagcgaagaatctgtgaacaacgacatctcctcctggacaaagggcagaagcggagaagctctgagcctcctgaagaaaagattctcccatagacccgtgcaggagaagttcgtgtgcctgaactgcggcttcgagacacacgcagccgagcaagccgccctgaacatcgccagatcctggctgttcctgcggagccaggagtacaagaaataccagacaaacaagacaaccggcaacaccgataagagagccttcgtcgagacctggcagtccttttaccggaagaagcttaaggaggtgtggaaacctgccgtgcggtctggcggatctggcggaggctcctgtgagcttcgaggacgtggccgtgtacttcacccaggaggagtggaccctgctggacagcgcccagagggacctgtacagggacgtgatgctggagacctgcgagaacctggccagcatcggcaacctgctgaaccacagcgtgatgtactggctggagggcgaggagaacctgggcaccgtgcaggagggcgacccccaggagtggaggctgaagaccaagggcagcaccctgaggcccgacggatctggctccggcagcggccccaagaaaaagagaaaagtctaagctgccttctgcggggcttgccttctggccatgcccttcttctctcccttgcacctgtacctcttggtctttgaataaagcctgagtaggaaggctagcaaaaaaaaaaaaaaaaaaaaaaaaaaaaaaaaaaaaaaaaaaaaaaaaaaaaaaaaaaaaaaaaaaaaaaaaaaaaaaaa

SEQ ID NO: 16784 - RNA, 9485 nt, synthetic construct
  source 1..9485: mol_type = other RNA
aggaaataagagagaaaagaagagtaagaagaaatataagagccaccatggcccctaagaagaagcgtaaagtgagccggatggaacgcctcgtctacgaggtgcggcagaagtgcagaaacatcgaggacatctgcatctcctgcggatctctgaacgtgaccctggagcacccactgttcatcggcggcatgtgccagaactgtaaaaactgttttctggagtgtgcctatcaatacgacgatgacggctaccagagctactgcaccatctgttgcggcggaagagaggtgctgatgtgtggaaataacaactgctgccggtgcttctgcgtggaatgcgtggacctgctggtgggccccggcgccgcccaggccgctattaaggaagatccttggaactgctacatgtgcggccacaagggcacatacggcctgctgagacggagagaggactggcctagcagactgcagatgttcttcgccaataaccacgaccaggagttcgacccccctaaggtgtaccctcccgtccccgccgagaagagaaagcccatccgggtcctgagcctgttcgatggcatcgccaccggtctgctggtgctgaaggacctgggcatccaggtggataggtacattgcctccgaggtgtgcgaggactccatcaccgtgggaatggtgcgtcatcagggcaagatcatgtacgtgggcgacgtgcggagcgtgacacagaagcatatccaggagtggggccctttcgacctggtgatcggcggcagcccttgcaatgacctgagcatcgtgaacccagcccggaagggcctgtacgagggaaccggcagactgttcttcgagttttacagactgctgcacgacgcccggcctaaggaaggcgacgaccggcccttcttttggctgttcgagaatgtggtggccatgggagtcagcgacaagcgggatattagccggttcctggagagcaaccccgtgatgatcgatgccaaggaagtgagcgccgcccaccgggccagatacttctggggcaatctgcctggcatgaacagacccctggccagcaccgtgaacgacaagctggagctgcaggagtgcctggagcacggccggatcgccaagttcagcaaggtgagaaccatcaccacccgaagcaacagcatcaaacaaggcaaggaccagcactttcctgtgttcatgaacgagaaggaggacatcctgtggtgtaccgagatggagagagtgttcgggttcccagtccactacacagatgtcagcaacatgtctagactggccagacagagactgctgggaagaagctggtccgtccctgtgatcagacacctgttcgcccctctgaaggagtacttcgcctgcgtgagcagcggcaacagcaacgccaacagccggggccccagcttctctagcggcctggtgccactgtccctgagagggagccacatgggccccatggagatctacaaaaccgtgagcgcctggaagcggcagcctgtgcgcgtgctgagcctgtttcggaatatcgataaagtcctgaaaagcctgggattcctggagagcggctctggctccggcggtggcaccctgaagtacgtggaggatgtgacaaacgtggtcagacgggatgtggagaagtggggccccttcgatctggtgtacggcagcacccaacccctgggcagctcttgtgaccggtgccctggctggtacatgtttcagttccaccggatcctgcagtacgccctgccgagacaggagtcccagcggccattcttttggattttcatggacaacttgctgctgaccgaggatgaccaggaaactaccactcggttcctgcagaccgaagccgtgaccctgcaggacgtgagaggccgggactaccagaacgccatgcgggtgtggtccaacatccctggactgaaaagcaagcacgcacctctgacccctaaagaagaggagtacctgcaggcccaggtgcggagcagaagcaagctggacgcccctaaggtggatctgctggtgaagaattgcctcctgcccctgagagagtacttcaagtatttcagccagaatagtctgcccctgggaggcagcggcggcggcgccctggtgacatttgaggacgtcgccgtgcggttcacccaggaggaatgggctctgctggatccttctcagaaaatcctgtaccgggacgtgatgagagagacataccggaatctgacctccgtgggcatcaactgggaatgttgggaccttgaagcctgcttcagaagcctgggaagaaacctgagagtgcaggtggtgaagagaaagtgcgagctgaccaacagcggcccctgcgccgagggcggcccaagcagcggcgcccctcctcccagcggcggcagcccagccggctccccaacctctaccgaggagggcacctctgagtccgccacccccgagagcggccctggcacctccaccgagcccagcgagggcagcgcacccggcagccctgccggcagccccacctccacagaggagggaaccagcaccgagcccagcgaaggcagcgccccaggcaccagcaccgagcctagtgagcaggagattaaacggatcaacaagatcagaagaagacttgtgaaagacagcaacaccaagaaggccggcaagacaggccccatgaaaaccctgctggttagagtgatgacacccgatctgagagagcggctggaaaacctgagaaagaagcctgaaaatatcccccagcccatcagcaatacatctagagccaacctgaataagctgctgaccgattacaccgaaatgaagaaggcgatcctgcatgtgtactgggaagagttccagaaggaccctgtgggcctgatgagccgggtggcccagcctgccagcaagaagatcgatcagaacaagctgaaacctgagatggacgagaagggcaacctgaccaccgccggctttgcctgctctcagtgtggccagcccctgttcgtgtacaagctggagcaggtgtctgagaagggcaaggcttacaccaactacttcggacggtgcaatgtggccgagcacgaaaagctgatcctgctggcccagctgaagcccgagaaggatagcgacgaagccgtgacatatagcctgggaaagtttgggcagagggccctggatttctacagcattcatgtgaccaaggagtccacccaccccgtgaagcccctggcccagatcgccggaaacagatacgcctccggacctgtgggaaaggccctgagcgacgcatgtatgggcacaatcgcctccttcctgtctaagtaccaggacatcatcatcgaacaccagaaggtggtgaagggcaaccagaagagactggagagcctgcgggagctggccggcaaggaaaacctggaataccctagcgtgaccctgccacctcagcctcacaccaaggagggcgttgatgcctacaacgaagtgatcgcccgggtgcgaatgtgggtgaacctgaacctgtggcagaagctgaagctaagcagagatgatgccaagcctctgctgagactgaagggattcccttcctttcctctggtcgagagacaggccaacgaagtggactggtgggacatggtgtgtaacgtgaagaagctgatcaacgagaaaaaggaggatggcaaggtgttttggcagaatctggctggctacaagagacaggaagccctgagaccatacctgagcagcgaggaagatcggaagaagggaaagaaattcgctcggtaccagctgggcgacctgctgctgcacctggaaaagaagcacggcgaggactggggaaaggtgtacgacgaggcctgggagcggattgacaagaaagtggaaggcctgagcaagcacatcaagctggaagaggaacggagaagcgaggacgcccagagcaaggccgccctgaccgactggctgcgggctaaggccagcttcgtgatcgagggcctgaaggaggccgacaaggacgagttctgcagatgcgagctgaagctgcagaagtggtacggggacctgcggggaaagcccttcgccatcgaagccgagaacagcatcctggacatcagcggcttcagcaagcagtacaactgtgccttcatctggcagaaggacggcgtgaagaagctgaacctgtacctgatcatcaactacttcaagggcggcaagctgcggttcaagaagatcaaacctgaagccttcgaagccaacagattctacaccgtgatcaacaaaaagagcggcgagatcgtgcccatggaggtgaacttcaacttcgacgaccccaacctgatcatcctgcctctggcctttggcaagagacagggcagagaattcatctggaacgacctgctgtccctggaaaccggcagcctgaagctggccaacggaagagtgatcgagaagacactgtacaacagaagaacccggcaggatgagcctgccctgttcgtggccctgaccttcgagcggcgggaggtcctggactcctccaatatcaaaccaatgaacctgatcggcgtggcaagaggcgaaaacatccccgccgtgatcgccctgaccgaccccgagggctgcccactgagccggtttaaggatagcctgggaaacccaacccacatcctgagaatcggcgagagctataaggagaagcagcggaccatccaggccaagaaggaggtggagcagcggagagccggcggctacagccggaagtacgccagcaaagccaagaatctggcagacgatatggtgagaaacaccgctagagatctgctgtactacgccgtgacccaggatgccatgctgatcttcgccaacctgagccggggcttcggccggcagggcaagcggaccttcatggccgagagacagtacacacggatggaggactggctgaccgccaagctggcctacgagggcctgagcaagacctacctgtccaagacactggcccagtacacctccaagacatgcagcaactgtgggtttaccatcaccagcgccgactacgacagggtgctggagaagctgaagaagacagcaacaggctggatgaccacaattaacggcaaggagctgaaggtggagggccagattacctactacaacagatacaagagacagaacgtagtcaaggacctgtccgtcgagctggatagactgagcgaagaatctgtgaacaacgacatctcctcctggacaaagggcagaagcggagaagctctgagcctcctgaagaaaagattctcccatagacccgtgcaggagaagttcgtgtgcctgaactgcggcttcgagacacacgcagccgagcaagccgccctgaacatcgccagatcctggctgttcctgcggagccaggagtacaagaaataccagacaaacaagacaaccggcaacaccgataagagagccttcgtcgagacctggcagtccttttaccggaagaagcttaaggaggtgtggaaacctgccgtgcggtctggcggatctggcggaggctccgcctgggcccccctgagcttcgaggacgtggccgtgggcttcagctgggaggagtggcagctgctggcccccagccagaaggacctgtacagggacgtgatgctggagaactacaggaacctggtgagcgtgggctaccaggccagcaagcccgacagcgtgttccagctggagcagggcgagcccccctggatcgtggagggcgccgcccagagccagacctgccaggaggagatctgggagggcggcccaagcagcggcgcccctcctcccagcggcggcagcccagccggctccccaacctctaccgaggagggcacctctgagtccgccacccccgagagcggccctggcacctccaccgagcccagcgagggcagcgcacccggcagccctgccggcagccccacctccacagaggagggaaccagcaccgagcccagcgaaggcagcgccccaggcaccagcaccgagcctagtgagcaggagattaaacggatcaacaagatcagaagaagacttgtgaaagacagcaacaccaagaaggccggcaagacaggccccatgaaaaccctgctggttagagtgatgacacccgatctgagagagcggctggaaaacctgagaaagaagcctgaaaatatcccccagcccatcagcaatacatctagagccaacctgaataagctgctgaccgattacaccgaaatgaagaaggcgatcctgcatgtgtactgggaagagttccagaaggaccctgtgggcctgatgagccgggtggcccagcctgccagcaagaagatcgatcagaacaagctgaaacctgagatggacgagaagggcaacctgaccaccgccggctttgcctgctctcagtgtggccagcccctgttcgtgtacaagctggagcaggtgtctgagaagggcaaggcttacaccaactacttcggacggtgcaatgtggccgagcacgaaaagctgatcctgctggcccagctgaagcccgagaaggatagcgacgaagccgtgacatatagcctgggaaagtttgggcagagggccctggatttctacagcattcatgtgaccaaggagtccacccaccccgtgaagcccctggcccagatcgccggaaacagatacgcctccggacctgtgggaaaggccctgagcgacgcatgtatgggcacaatcgcctccttcctgtctaagtaccaggacatcatcatcgaacaccagaaggtggtgaagggcaaccagaagagactggagagcctgcgggagctggccggcaaggaaaacctggaataccctagcgtgaccctgccacctcagcctcacaccaaggagggcgttgatgcctacaacgaagtgatcgcccgggtgcgaatgtgggtgaacctgaacctgtggcagaagctgaagctaagcagagatgatgccaagcctctgctgagactgaagggattcccttcctttcctctggtcgagagacaggccaacgaagtggactggtgggacatggtgtgtaacgtgaagaagctgatcaacgagaaaaaggaggatggcaaggtgttttggcagaatctggctggctacaagagacaggaagccctgagaccatacctgagcagcgaggaagatcggaagaagggaaagaaattcgctcggtaccagctgggcgacctgctgctgcacctggaaaagaagcacggcgaggactggggaaaggtgtacgacgaggcctgggagcggattgacaagaaagtggaaggcctgagcaagcacatcaagctggaagaggaacggagaagcgaggacgcccagagcaaggccgccctgaccgactggctgcgggctaaggccagcttcgtgatcgagggcctgaaggaggccgacaaggacgagttctgcagatgcgagctgaagctgcagaagtggtacggggacctgcggggaaagcccttcgccatcgaagccgagaacagcatcctggacatcagcggcttcagcaagcagtacaactgtgccttcatctggcagaaggacggcgtgaagaagctgaacctgtacctgatcatcaactacttcaagggcggcaagctgcggttcaagaagatcaaacctgaagccttcgaagccaacagattctacaccgtgatcaacaaaaagagcggcgagatcgtgcccatggaggtgaacttcaacttcgacgaccccaacctgatcatcctgcctctggcctttggcaagagacagggcagagaattcatctggaacgacctgctgtccctggaaaccggcagcctgaagctggccaacggaagagtgatcgagaagacactgtacaacagaagaacccggcaggatgagcctgccctgttcgtggccctgaccttcgagcggcgggaggtcctggactcctccaatatcaaaccaatgaacctgatcggcgtggcaagaggcgaaaacatccccgccgtgatcgccctgaccgaccccgagggctgcccactgagccggtttaaggatagcctgggaaacccaacccacatcctgagaatcggcgagagctataaggagaagcagcggaccatccaggccaagaaggaggtggagcagcggagagccggcggctacagccggaagtacgccagcaaagccaagaatctggcagacgatatggtgagaaacaccgctagagatctgctgtactacgccgtgacccaggatgccatgctgatcttcgccaacctgagccggggcttcggccggcagggcaagcggaccttcatggccgagagacagtacacacggatggaggactggctgaccgccaagctggcctacgagggcctgagcaagacctacctgtccaagacactggcccagtacacctccaagacatgcagcaactgtgggtttaccatcaccagcgccgactacgacagggtgctggagaagctgaagaagacagcaacaggctggatgaccacaattaacggcaaggagctgaaggtggagggccagattacctactacaacagatacaagagacagaacgtagtcaaggacctgtccgtcgagctggatagactgagcgaagaatctgtgaacaacgacatctcctcctggacaaagggcagaagcggagaagctctgagcctcctgaagaaaagattctcccatagacccgtgcaggagaagttcgtgtgcctgaactgcggcttcgagacacacgcagccgagcaagccgccctgaacatcgccagatcctggctgttcctgcggagccaggagtacaagaaataccagacaaacaagacaaccggcaacaccgataagagagccttcgtcgagacctggcagtccttttaccggaagaagcttaaggaggtgtggaaacctgccgtgcggtctggcggatctggcggaggctcctgcctgggcccccctgagcttcgaggacgtggccgtgggcttcagctgggaggagtggcagctgctggcccccagccagaaggacctgtacagggacgtgatgctggagaactacaggaacctggtgagcgtgggctaccaggccagcaagcccgacagcgtgttccagctggagcagggcgagcccccctggatcgtggagggcgccgcccagagccagacctgccaggaggagatctgggagggatctggctccggcagcggccccaagaaaaagagaaaagtctaagctgccttctgcggggcttgccttctggccatgcccttcttctctcccttgcacctgtacctcttggtctttgaataaagcctgagtaggaaggctagcaaaaaaaaaaaaaaaaaaaaaaaaaaaaaaaaaaaaaaaaaaaaaaaaaaaaaaaaaaaaaaaaaaaaaaaaaaaaaaaa

SEQ ID NO: 16785 - RNA, 9485 nt, synthetic construct
  source 1..9485: mol_type = other RNA
aggaaataagagagaaaagaagagtaagaagaaatataagagccaccatggcccctaagaagaagcgtaaagtgagccggatggaacgcctcgtctacgaggtgcggcagaagtgcagaaacatcgaggacatctgcatctcctgcggatctctgaacgtgaccctggagcacccactgttcatcggcggcatgtgccagaactgtaaaaactgttttctggagtgtgcctatcaatacgacgatgacggctaccagagctactgcaccatctgttgcggcggaagagaggtgctgatgtgtggaaataacaactgctgccggtgcttctgcgtggaatgcgtggacctgctggtgggccccggcgccgcccaggccgctattaaggaagatccttggaactgctacatgtgcggccacaagggcacatacggcctgctgagacggagagaggactggcctagcagactgcagatgttcttcgccaataaccacgaccaggagttcgacccccctaaggtgtaccctcccgtccccgccgagaagagaaagcccatccgggtcctgagcctgttcgatggcatcgccaccggtctgctggtgctgaaggacctgggcatccaggtggataggtacattgcctccgaggtgtgcgaggactccatcaccgtgggaatggtgcgtcatcagggcaagatcatgtacgtgggcgacgtgcggagcgtgacacagaagcatatccaggagtggggccctttcgacctggtgatcggcggcagcccttgcaatgacctgagcatcgtgaacccagcccggaagggcctgtacgagggaaccggcagactgttcttcgagttttacagactgctgcacgacgcccggcctaaggaaggcgacgaccggcccttcttttggctgttcgagaatgtggtggccatgggagtcagcgacaagcgggatattagccggttcctggagagcaaccccgtgatgatcgatgccaaggaagtgagcgccgcccaccgggccagatacttctggggcaatctgcctggcatgaacagacccctggccagcaccgtgaacgacaagctggagctgcaggagtgcctggagcacggccggatcgccaagttcagcaaggtgagaaccatcaccacccgaagcaacagcatcaaacaaggcaaggaccagcactttcctgtgttcatgaacgagaaggaggacatcctgtggtgtaccgagatggagagagtgttcgggttcccagtccactacacagatgtcagcaacatgtctagactggccagacagagactgctgggaagaagctggtccgtccctgtgatcagacacctgttcgcccctctgaaggagtacttcgcctgcgtgagcagcggcaacagcaacgccaacagccggggccccagcttctctagcggcctggtgccactgtccctgagagggagccacatgggccccatggagatctacaaaaccgtgagcgcctggaagcggcagcctgtgcgcgtgctgagcctgtttcggaatatcgataaagtcctgaaaagcctgggattcctggagagcggctctggctccggcggtggcaccctgaagtacgtggaggatgtgacaaacgtggtcagacgggatgtggagaagtggggccccttcgatctggtgtacggcagcacccaacccctgggcagctcttgtgaccggtgccctggctggtacatgtttcagttccaccggatcctgcagtacgccctgccgagacaggagtcccagcggccattcttttggattttcatggacaacttgctgctgaccgaggatgaccaggaaactaccactcggttcctgcagaccgaagccgtgaccctgcaggacgtgagaggccgggactaccagaacgccatgcgggtgtggtccaacatccctggactgaaaagcaagcacgcacctctgacccctaaagaagaggagtacctgcaggcccaggtgcggagcagaagcaagctggacgcccctaaggtggatctgctggtgaagaattgcctcctgcccctgagagagtacttcaagtatttcagccagaatagtctgcccctgggaggcagcggcggcggcgccctggtgacatttgaggacgtcgccgtgcggttcacccaggaggaatgggctctgctggatccttctcagaaaatcctgtaccgggacgtgatgagagagacataccggaatctgacctccgtgggcatcaactgggaatgttgggaccttgaagcctgcttcagaagcctgggaagaaacctgagagtgcaggtggtgaagagaaagtgcgagctgaccaacagcggcccctgcgccgagggcggcccaagcagcggcgcccctcctcccagcggcggcagcccagccggctccccaacctctaccgaggagggcacctctgagtccgccacccccgagagcggccctggcacctccaccgagcccagcgagggcagcgcacccggcagccctgccggcagccccacctccacagaggagggaaccagcaccgagcccagcgaaggcagcgccccaggcaccagcaccgagcctagtgagcaggagattaaacggatcaacaagatcagaagaagacttgtgaaagacagcaacaccaagaaggccggcaagacaggccccatgaaaaccctgctggttagagtgatgacacccgatctgagagagcggctggaaaacctgagaaagaagcctgaaaatatcccccagcccatcagcaatacatctagagccaacctgaataagctgctgaccgattacaccgaaatgaagaaggcgatcctgcatgtgtactgggaagagttccagaaggaccctgtgggcctgatgagccgggtggcccagcctgccagcaagaagatcgatcagaacaagctgaaacctgagatggacgagaagggcaacctgaccaccgccggctttgcctgctctcagtgtggccagcccctgttcgtgtacaagctggagcaggtgtctgagaagggcaaggcttacaccaactacttcggacggtgcaatgtggccgagcacgaaaagctgatcctgctggcccagctgaagcccgagaaggatagcgacgaagccgtgacatatagcctgggaaagtttgggcagagggccctggatttctacagcattcatgtgaccaaggagtccacccaccccgtgaagcccctggcccagatcgccggaaacagatacgcctccggacctgtgggaaaggccctgagcgacgcatgtatgggcacaatcgcctccttcctgtctaagtaccaggacatcatcatcgaacaccagaaggtggtgaagggcaaccagaagagactggagagcctgcgggagctggccggcaaggaaaacctggaataccctagcgtgaccctgccacctcagcctcacaccaaggagggcgttgatgcctacaacgaagtgatcgcccgggtgcgaatgtgggtgaacctgaacctgtggcagaagctgaagctaagcagagatgatgccaagcctctgctgagactgaagggattcccttcctttcctctggtcgagagacaggccaacgaagtggactggtgggacatggtgtgtaacgtgaagaagctgatcaacgagaaaaaggaggatggcaaggtgttttggcagaatctggctggctacaagagacaggaagccctgagaccatacctgagcagcgaggaagatcggaagaagggaaagaaattcgctcggtaccagctgggcgacctgctgctgcacctggaaaagaagcacggcgaggactggggaaaggtgtacgacgaggcctgggagcggattgacaagaaagtggaaggcctgagcaagcacatcaagctggaagaggaacggagaagcgaggacgcccagagcaaggccgccctgaccgactggctgcgggctaaggccagcttcgtgatcgagggcctgaaggaggccgacaaggacgagttctgcagatgcgagctgaagctgcagaagtggtacggggacctgcggggaaagcccttcgccatcgaagccgagaacagcatcctggacatcagcggcttcagcaagcagtacaactgtgccttcatctggcagaaggacggcgtgaagaagctgaacctgtacctgatcatcaactacttcaagggcggcaagctgcggttcaagaagatcaaacctgaagccttcgaagccaacagattctacaccgtgatcaacaaaaagagcggcgagatcgtgcccatggaggtgaacttcaacttcgacgaccccaacctgatcatcctgcctctggcctttggcaagagacagggcagagaattcatctggaacgacctgctgtccctggaaaccggcagcctgaagctggccaacggaagagtgatcgagaagacactgtacaacagaagaacccggcaggatgagcctgccctgttcgtggccctgaccttcgagcggcgggaggtcctggactcctccaatatcaaaccaatgaacctgatcggcgtggcaagaggcgaaaacatccccgccgtgatcgccctgaccgaccccgagggctgcccactgagccggtttaaggatagcctgggaaacccaacccacatcctgagaatcggcgagagctataaggagaagcagcggaccatccaggccaagaaggaggtggagcagcggagagccggcggctacagccggaagtacgccagcaaagccaagaatctggcagacgatatggtgagaaacaccgctagagatctgctgtactacgccgtgacccaggatgccatgctgatcttcgccaacctgagccggggcttcggccggcagggcaagcggaccttcatggccgagagacagtacacacggatggaggactggctgaccgccaagctggcctacgagggcctgagcaagacctacctgtccaagacactggcccagtacacctccaagacatgcagcaactgtgggtttaccatcaccagcgccgactacgacagggtgctggagaagctgaagaagacagcaacaggctggatgaccacaattaacggcaaggagctgaaggtggagggccagattacctactacaacagatacaagagacagaacgtagtcaaggacctgtccgtcgagctggatagactgagcgaagaatctgtgaacaacgacatctcctcctggacaaagggcagaagcggagaagctctgagcctcctgaagaaaagattctcccatagacccgtgcaggagaagttcgtgtgcctgaactgcggcttcgagacacacgcagccgagcaagccgccctgaacatcgccagatcctggctgttcctgcggagccaggagtacaagaaataccagacaaacaagacaaccggcaacaccgataagagagccttcgtcgagacctggcagtccttttaccggaagaagcttaaggaggtgtggaaacctgccgtgcggtctggcggatctggcggaggctccatgctgatgatgttcagggacgtggccgtggacttcagccaggaggagtgggagtgcctggacctggagcagaggggcctgtacagggacgtgatgctggagaactacagcaacatggtgagcctgggcctgtgcatctaccagcccgaggccttcagcctgctggagaagggcaaggagccctggaagatcctgagggacgagaccaggggcccctgccccgacatgcagagcaggtgccagggcggcccaagcagcggcgcccctcctcccagcggcggcagcccagccggctccccaacctctaccgaggagggcacctctgagtccgccacccccgagagcggccctggcacctccaccgagcccagcgagggcagcgcacccggcagccctgccggcagccccacctccacagaggagggaaccagcaccgagcccagcgaaggcagcgccccaggcaccagcaccgagcctagtgagcaggagattaaacggatcaacaagatcagaagaagacttgtgaaagacagcaacaccaagaaggccggcaagacaggccccatgaaaaccctgctggttagagtgatgacacccgatctgagagagcggctggaaaacctgagaaagaagcctgaaaatatcccccagcccatcagcaatacatctagagccaacctgaataagctgctgaccgattacaccgaaatgaagaaggcgatcctgcatgtgtactgggaagagttccagaaggaccctgtgggcctgatgagccgggtggcccagcctgccagcaagaagatcgatcagaacaagctgaaacctgagatggacgagaagggcaacctgaccaccgccggctttgcctgctctcagtgtggccagcccctgttcgtgtacaagctggagcaggtgtctgagaagggcaaggcttacaccaactacttcggacggtgcaatgtggccgagcacgaaaagctgatcctgctggcccagctgaagcccgagaaggatagcgacgaagccgtgacatatagcctgggaaagtttgggcagagggccctggatttctacagcattcatgtgaccaaggagtccacccaccccgtgaagcccctggcccagatcgccggaaacagatacgcctccggacctgtgggaaaggccctgagcgacgcatgtatgggcacaatcgcctccttcctgtctaagtaccaggacatcatcatcgaacaccagaaggtggtgaagggcaaccagaagagactggagagcctgcgggagctggccggcaaggaaaacctggaataccctagcgtgaccctgccacctcagcctcacaccaaggagggcgttgatgcctacaacgaagtgatcgcccgggtgcgaatgtgggtgaacctgaacctgtggcagaagctgaagctaagcagagatgatgccaagcctctgctgagactgaagggattcccttcctttcctctggtcgagagacaggccaacgaagtggactggtgggacatggtgtgtaacgtgaagaagctgatcaacgagaaaaaggaggatggcaaggtgttttggcagaatctggctggctacaagagacaggaagccctgagaccatacctgagcagcgaggaagatcggaagaagggaaagaaattcgctcggtaccagctgggcgacctgctgctgcacctggaaaagaagcacggcgaggactggggaaaggtgtacgacgaggcctgggagcggattgacaagaaagtggaaggcctgagcaagcacatcaagctggaagaggaacggagaagcgaggacgcccagagcaaggccgccctgaccgactggctgcgggctaaggccagcttcgtgatcgagggcctgaaggaggccgacaaggacgagttctgcagatgcgagctgaagctgcagaagtggtacggggacctgcggggaaagcccttcgccatcgaagccgagaacagcatcctggacatcagcggcttcagcaagcagtacaactgtgccttcatctggcagaaggacggcgtgaagaagctgaacctgtacctgatcatcaactacttcaagggcggcaagctgcggttcaagaagatcaaacctgaagccttcgaagccaacagattctacaccgtgatcaacaaaaagagcggcgagatcgtgcccatggaggtgaacttcaacttcgacgaccccaacctgatcatcctgcctctggcctttggcaagagacagggcagagaattcatctggaacgacctgctgtccctggaaaccggcagcctgaagctggccaacggaagagtgatcgagaagacactgtacaacagaagaacccggcaggatgagcctgccctgttcgtggccctgaccttcgagcggcgggaggtcctggactcctccaatatcaaaccaatgaacctgatcggcgtggcaagaggcgaaaacatccccgccgtgatcgccctgaccgaccccgagggctgcccactgagccggtttaaggatagcctgggaaacccaacccacatcctgagaatcggcgagagctataaggagaagcagcggaccatccaggccaagaaggaggtggagcagcggagagccggcggctacagccggaagtacgccagcaaagccaagaatctggcagacgatatggtgagaaacaccgctagagatctgctgtactacgccgtgacccaggatgccatgctgatcttcgccaacctgagccggggcttcggccggcagggcaagcggaccttcatggccgagagacagtacacacggatggaggactggctgaccgccaagctggcctacgagggcctgagcaagacctacctgtccaagacactggcccagtacacctccaagacatgcagcaactgtgggtttaccatcaccagcgccgactacgacagggtgctggagaagctgaagaagacagcaacaggctggatgaccacaattaacggcaaggagctgaaggtggagggccagattacctactacaacagatacaagagacagaacgtagtcaaggacctgtccgtcgagctggatagactgagcgaagaatctgtgaacaacgacatctcctcctggacaaagggcagaagcggagaagctctgagcctcctgaagaaaagattctcccatagacccgtgcaggagaagttcgtgtgcctgaactgcggcttcgagacacacgcagccgagcaagccgccctgaacatcgccagatcctggctgttcctgcggagccaggagtacaagaaataccagacaaacaagacaaccggcaacaccgataagagagccttcgtcgagacctggcagtccttttaccggaagaagcttaaggaggtgtggaaacctgccgtgcggtctggcggatctggcggaggctcctatgctgatgatgttcagggacgtggccgtggacttcagccaggaggagtgggagtgcctggacctggagcagaggggcctgtacagggacgtgatgctggagaactacagcaacatggtgagcctgggcctgtgcatctaccagcccgaggccttcagcctgctggagaagggcaaggagccctggaagatcctgagggacgagaccaggggcccctgccccgacatgcagagcaggtgccagggatctggctccggcagcggccccaagaaaaagagaaaagtctaagctgccttctgcggggcttgccttctggccatgcccttcttctctcccttgcacctgtacctcttggtctttgaataaagcctgagtaggaaggctagcaaaaaaaaaaaaaaaaaaaaaaaaaaaaaaaaaaaaaaaaaaaaaaaaaaaaaaaaaaaaaaaaaaaaaaaaaaaaaaaa

SEQ ID NO: 16786 - RNA, 9485 nt, synthetic construct
  source 1..9485: mol_type = other RNA
aggaaataagagagaaaagaagagtaagaagaaatataagagccaccatggcccctaagaagaagcgtaaagtgagccggatggaacgcctcgtctacgaggtgcggcagaagtgcagaaacatcgaggacatctgcatctcctgcggatctctgaacgtgaccctggagcacccactgttcatcggcggcatgtgccagaactgtaaaaactgttttctggagtgtgcctatcaatacgacgatgacggctaccagagctactgcaccatctgttgcggcggaagagaggtgctgatgtgtggaaataacaactgctgccggtgcttctgcgtggaatgcgtggacctgctggtgggccccggcgccgcccaggccgctattaaggaagatccttggaactgctacatgtgcggccacaagggcacatacggcctgctgagacggagagaggactggcctagcagactgcagatgttcttcgccaataaccacgaccaggagttcgacccccctaaggtgtaccctcccgtccccgccgagaagagaaagcccatccgggtcctgagcctgttcgatggcatcgccaccggtctgctggtgctgaaggacctgggcatccaggtggataggtacattgcctccgaggtgtgcgaggactccatcaccgtgggaatggtgcgtcatcagggcaagatcatgtacgtgggcgacgtgcggagcgtgacacagaagcatatccaggagtggggccctttcgacctggtgatcggcggcagcccttgcaatgacctgagcatcgtgaacccagcccggaagggcctgtacgagggaaccggcagactgttcttcgagttttacagactgctgcacgacgcccggcctaaggaaggcgacgaccggcccttcttttggctgttcgagaatgtggtggccatgggagtcagcgacaagcgggatattagccggttcctggagagcaaccccgtgatgatcgatgccaaggaagtgagcgccgcccaccgggccagatacttctggggcaatctgcctggcatgaacagacccctggccagcaccgtgaacgacaagctggagctgcaggagtgcctggagcacggccggatcgccaagttcagcaaggtgagaaccatcaccacccgaagcaacagcatcaaacaaggcaaggaccagcactttcctgtgttcatgaacgagaaggaggacatcctgtggtgtaccgagatggagagagtgttcgggttcccagtccactacacagatgtcagcaacatgtctagactggccagacagagactgctgggaagaagctggtccgtccctgtgatcagacacctgttcgcccctctgaaggagtacttcgcctgcgtgagcagcggcaacagcaacgccaacagccggggccccagcttctctagcggcctggtgccactgtccctgagagggagccacatgggccccatggagatctacaaaaccgtgagcgcctggaagcggcagcctgtgcgcgtgctgagcctgtttcggaatatcgataaagtcctgaaaagcctgggattcctggagagcggctctggctccggcggtggcaccctgaagtacgtggaggatgtgacaaacgtggtcagacgggatgtggagaagtggggccccttcgatctggtgtacggcagcacccaacccctgggcagctcttgtgaccggtgccctggctggtacatgtttcagttccaccggatcctgcagtacgccctgccgagacaggagtcccagcggccattcttttggattttcatggacaacttgctgctgaccgaggatgaccaggaaactaccactcggttcctgcagaccgaagccgtgaccctgcaggacgtgagaggccgggactaccagaacgccatgcgggtgtggtccaacatccctggactgaaaagcaagcacgcacctctgacccctaaagaagaggagtacctgcaggcccaggtgcggagcagaagcaagctggacgcccctaaggtggatctgctggtgaagaattgcctcctgcccctgagagagtacttcaagtatttcagccagaatagtctgcccctgggaggcagcggcggcggcgccctggtgacatttgaggacgtcgccgtgcggttcacccaggaggaatgggctctgctggatccttctcagaaaatcctgtaccgggacgtgatgagagagacataccggaatctgacctccgtgggcatcaactgggaatgttgggaccttgaagcctgcttcagaagcctgggaagaaacctgagagtgcaggtggtgaagagaaagtgcgagctgaccaacagcggcccctgcgccgagggcggcccaagcagcggcgcccctcctcccagcggcggcagcccagccggctccccaacctctaccgaggagggcacctctgagtccgccacccccgagagcggccctggcacctccaccgagcccagcgagggcagcgcacccggcagccctgccggcagccccacctccacagaggagggaaccagcaccgagcccagcgaaggcagcgccccaggcaccagcaccgagcctagtgagcaggagattaaacggatcaacaagatcagaagaagacttgtgaaagacagcaacaccaagaaggccggcaagacaggccccatgaaaaccctgctggttagagtgatgacacccgatctgagagagcggctggaaaacctgagaaagaagcctgaaaatatcccccagcccatcagcaatacatctagagccaacctgaataagctgctgaccgattacaccgaaatgaagaaggcgatcctgcatgtgtactgggaagagttccagaaggaccctgtgggcctgatgagccgggtggcccagcctgccagcaagaagatcgatcagaacaagctgaaacctgagatggacgagaagggcaacctgaccaccgccggctttgcctgctctcagtgtggccagcccctgttcgtgtacaagctggagcaggtgtctgagaagggcaaggcttacaccaactacttcggacggtgcaatgtggccgagcacgaaaagctgatcctgctggcccagctgaagcccgagaaggatagcgacgaagccgtgacatatagcctgggaaagtttgggcagagggccctggatttctacagcattcatgtgaccaaggagtccacccaccccgtgaagcccctggcccagatcgccggaaacagatacgcctccggacctgtgggaaaggccctgagcgacgcatgtatgggcacaatcgcctccttcctgtctaagtaccaggacatcatcatcgaacaccagaaggtggtgaagggcaaccagaagagactggagagcctgcgggagctggccggcaaggaaaacctggaataccctagcgtgaccctgccacctcagcctcacaccaaggagggcgttgatgcctacaacgaagtgatcgcccgggtgcgaatgtgggtgaacctgaacctgtggcagaagctgaagctaagcagagatgatgccaagcctctgctgagactgaagggattcccttcctttcctctggtcgagagacaggccaacgaagtggactggtgggacatggtgtgtaacgtgaagaagctgatcaacgagaaaaaggaggatggcaaggtgttttggcagaatctggctggctacaagagacaggaagccctgagaccatacctgagcagcgaggaagatcggaagaagggaaagaaattcgctcggtaccagctgggcgacctgctgctgcacctggaaaagaagcacggcgaggactggggaaaggtgtacgacgaggcctgggagcggattgacaagaaagtggaaggcctgagcaagcacatcaagctggaagaggaacggagaagcgaggacgcccagagcaaggccgccctgaccgactggctgcgggctaaggccagcttcgtgatcgagggcctgaaggaggccgacaaggacgagttctgcagatgcgagctgaagctgcagaagtggtacggggacctgcggggaaagcccttcgccatcgaagccgagaacagcatcctggacatcagcggcttcagcaagcagtacaactgtgccttcatctggcagaaggacggcgtgaagaagctgaacctgtacctgatcatcaactacttcaagggcggcaagctgcggttcaagaagatcaaacctgaagccttcgaagccaacagattctacaccgtgatcaacaaaaagagcggcgagatcgtgcccatggaggtgaacttcaacttcgacgaccccaacctgatcatcctgcctctggcctttggcaagagacagggcagagaattcatctggaacgacctgctgtccctggaaaccggcagcctgaagctggccaacggaagagtgatcgagaagacactgtacaacagaagaacccggcaggatgagcctgccctgttcgtggccctgaccttcgagcggcgggaggtcctggactcctccaatatcaaaccaatgaacctgatcggcgtggcaagaggcgaaaacatccccgccgtgatcgccctgaccgaccccgagggctgcccactgagccggtttaaggatagcctgggaaacccaacccacatcctgagaatcggcgagagctataaggagaagcagcggaccatccaggccaagaaggaggtggagcagcggagagccggcggctacagccggaagtacgccagcaaagccaagaatctggcagacgatatggtgagaaacaccgctagagatctgctgtactacgccgtgacccaggatgccatgctgatcttcgccaacctgagccggggcttcggccggcagggcaagcggaccttcatggccgagagacagtacacacggatggaggactggctgaccgccaagctggcctacgagggcctgagcaagacctacctgtccaagacactggcccagtacacctccaagacatgcagcaactgtgggtttaccatcaccagcgccgactacgacagggtgctggagaagctgaagaagacagcaacaggctggatgaccacaattaacggcaaggagctgaaggtggagggccagattacctactacaacagatacaagagacagaacgtagtcaaggacctgtccgtcgagctggatagactgagcgaagaatctgtgaacaacgacatctcctcctggacaaagggcagaagcggagaagctctgagcctcctgaagaaaagattctcccatagacccgtgcaggagaagttcgtgtgcctgaactgcggcttcgagacacacgcagccgagcaagccgccctgaacatcgccagatcctggctgttcctgcggagccaggagtacaagaaataccagacaaacaagacaaccggcaacaccgataagagagccttcgtcgagacctggcagtccttttaccggaagaagcttaaggaggtgtggaaacctgccgtgcggtctggcggatctggcggaggctccgagcccggcgccgtgaccttcggcgacgtggccgtgtacttcagcagggaggagtggggctgcctgaggcccgcccagagggccctgtacagggacgtgaccagggagacctacagccacctgggcgccctgggcgtgggcggcagcaagcccgccctgatcagctggatggaggaggaggccgagctgtggggccccgccgcccaggaccccgaggtggccaagtgccccaccgaggccgacggcggcccaagcagcggcgcccctcctcccagcggcggcagcccagccggctccccaacctctaccgaggagggcacctctgagtccgccacccccgagagcggccctggcacctccaccgagcccagcgagggcagcgcacccggcagccctgccggcagccccacctccacagaggagggaaccagcaccgagcccagcgaaggcagcgccccaggcaccagcaccgagcctagtgagcaggagattaaacggatcaacaagatcagaagaagacttgtgaaagacagcaacaccaagaaggccggcaagacaggccccatgaaaaccctgctggttagagtgatgacacccgatctgagagagcggctggaaaacctgagaaagaagcctgaaaatatcccccagcccatcagcaatacatctagagccaacctgaataagctgctgaccgattacaccgaaatgaagaaggcgatcctgcatgtgtactgggaagagttccagaaggaccctgtgggcctgatgagccgggtggcccagcctgccagcaagaagatcgatcagaacaagctgaaacctgagatggacgagaagggcaacctgaccaccgccggctttgcctgctctcagtgtggccagcccctgttcgtgtacaagctggagcaggtgtctgagaagggcaaggcttacaccaactacttcggacggtgcaatgtggccgagcacgaaaagctgatcctgctggcccagctgaagcccgagaaggatagcgacgaagccgtgacatatagcctgggaaagtttgggcagagggccctggatttctacagcattcatgtgaccaaggagtccacccaccccgtgaagcccctggcccagatcgccggaaacagatacgcctccggacctgtgggaaaggccctgagcgacgcatgtatgggcacaatcgcctccttcctgtctaagtaccaggacatcatcatcgaacaccagaaggtggtgaagggcaaccagaagagactggagagcctgcgggagctggccggcaaggaaaacctggaataccctagcgtgaccctgccacctcagcctcacaccaaggagggcgttgatgcctacaacgaagtgatcgcccgggtgcgaatgtgggtgaacctgaacctgtggcagaagctgaagctaagcagagatgatgccaagcctctgctgagactgaagggattcccttcctttcctctggtcgagagacaggccaacgaagtggactggtgggacatggtgtgtaacgtgaagaagctgatcaacgagaaaaaggaggatggcaaggtgttttggcagaatctggctggctacaagagacaggaagccctgagaccatacctgagcagcgaggaagatcggaagaagggaaagaaattcgctcggtaccagctgggcgacctgctgctgcacctggaaaagaagcacggcgaggactggggaaaggtgtacgacgaggcctgggagcggattgacaagaaagtggaaggcctgagcaagcacatcaagctggaagaggaacggagaagcgaggacgcccagagcaaggccgccctgaccgactggctgcgggctaaggccagcttcgtgatcgagggcctgaaggaggccgacaaggacgagttctgcagatgcgagctgaagctgcagaagtggtacggggacctgcggggaaagcccttcgccatcgaagccgagaacagcatcctggacatcagcggcttcagcaagcagtacaactgtgccttcatctggcagaaggacggcgtgaagaagctgaacctgtacctgatcatcaactacttcaagggcggcaagctgcggttcaagaagatcaaacctgaagccttcgaagccaacagattctacaccgtgatcaacaaaaagagcggcgagatcgtgcccatggaggtgaacttcaacttcgacgaccccaacctgatcatcctgcctctggcctttggcaagagacagggcagagaattcatctggaacgacctgctgtccctggaaaccggcagcctgaagctggccaacggaagagtgatcgagaagacactgtacaacagaagaacccggcaggatgagcctgccctgttcgtggccctgaccttcgagcggcgggaggtcctggactcctccaatatcaaaccaatgaacctgatcggcgtggcaagaggcgaaaacatccccgccgtgatcgccctgaccgaccccgagggctgcccactgagccggtttaaggatagcctgggaaacccaacccacatcctgagaatcggcgagagctataaggagaagcagcggaccatccaggccaagaaggaggtggagcagcggagagccggcggctacagccggaagtacgccagcaaagccaagaatctggcagacgatatggtgagaaacaccgctagagatctgctgtactacgccgtgacccaggatgccatgctgatcttcgccaacctgagccggggcttcggccggcagggcaagcggaccttcatggccgagagacagtacacacggatggaggactggctgaccgccaagctggcctacgagggcctgagcaagacctacctgtccaagacactggcccagtacacctccaagacatgcagcaactgtgggtttaccatcaccagcgccgactacgacagggtgctggagaagctgaagaagacagcaacaggctggatgaccacaattaacggcaaggagctgaaggtggagggccagattacctactacaacagatacaagagacagaacgtagtcaaggacctgtccgtcgagctggatagactgagcgaagaatctgtgaacaacgacatctcctcctggacaaagggcagaagcggagaagctctgagcctcctgaagaaaagattctcccatagacccgtgcaggagaagttcgtgtgcctgaactgcggcttcgagacacacgcagccgagcaagccgccctgaacatcgccagatcctggctgttcctgcggagccaggagtacaagaaataccagacaaacaagacaaccggcaacaccgataagagagccttcgtcgagacctggcagtccttttaccggaagaagcttaaggaggtgtggaaacctgccgtgcggtctggcggatctggcggaggctcctgagcccggcgccgtgaccttcggcgacgtggccgtgtacttcagcagggaggagtggggctgcctgaggcccgcccagagggccctgtacagggacgtgaccagggagacctacagccacctgggcgccctgggcgtgggcggcagcaagcccgccctgatcagctggatggaggaggaggccgagctgtggggccccgccgcccaggaccccgaggtggccaagtgccccaccgaggccgacggatctggctccggcagcggccccaagaaaaagagaaaagtctaagctgccttctgcggggcttgccttctggccatgcccttcttctctcccttgcacctgtacctcttggtctttgaataaagcctgagtaggaaggctagcaaaaaaaaaaaaaaaaaaaaaaaaaaaaaaaaaaaaaaaaaaaaaaaaaaaaaaaaaaaaaaaaaaaaaaaaaaaaaaaa

SEQ ID NO: 16787 - RNA, 9485 nt, synthetic construct
  source 1..9485: mol_type = other RNA
aggaaataagagagaaaagaagagtaagaagaaatataagagccaccatggcccctaagaagaagcgtaaagtgagccggatggaacgcctcgtctacgaggtgcggcagaagtgcagaaacatcgaggacatctgcatctcctgcggatctctgaacgtgaccctggagcacccactgttcatcggcggcatgtgccagaactgtaaaaactgttttctggagtgtgcctatcaatacgacgatgacggctaccagagctactgcaccatctgttgcggcggaagagaggtgctgatgtgtggaaataacaactgctgccggtgcttctgcgtggaatgcgtggacctgctggtgggccccggcgccgcccaggccgctattaaggaagatccttggaactgctacatgtgcggccacaagggcacatacggcctgctgagacggagagaggactggcctagcagactgcagatgttcttcgccaataaccacgaccaggagttcgacccccctaaggtgtaccctcccgtccccgccgagaagagaaagcccatccgggtcctgagcctgttcgatggcatcgccaccggtctgctggtgctgaaggacctgggcatccaggtggataggtacattgcctccgaggtgtgcgaggactccatcaccgtgggaatggtgcgtcatcagggcaagatcatgtacgtgggcgacgtgcggagcgtgacacagaagcatatccaggagtggggccctttcgacctggtgatcggcggcagcccttgcaatgacctgagcatcgtgaacccagcccggaagggcctgtacgagggaaccggcagactgttcttcgagttttacagactgctgcacgacgcccggcctaaggaaggcgacgaccggcccttcttttggctgttcgagaatgtggtggccatgggagtcagcgacaagcgggatattagccggttcctggagagcaaccccgtgatgatcgatgccaaggaagtgagcgccgcccaccgggccagatacttctggggcaatctgcctggcatgaacagacccctggccagcaccgtgaacgacaagctggagctgcaggagtgcctggagcacggccggatcgccaagttcagcaaggtgagaaccatcaccacccgaagcaacagcatcaaacaaggcaaggaccagcactttcctgtgttcatgaacgagaaggaggacatcctgtggtgtaccgagatggagagagtgttcgggttcccagtccactacacagatgtcagcaacatgtctagactggccagacagagactgctgggaagaagctggtccgtccctgtgatcagacacctgttcgcccctctgaaggagtacttcgcctgcgtgagcagcggcaacagcaacgccaacagccggggccccagcttctctagcggcctggtgccactgtccctgagagggagccacatgggccccatggagatctacaaaaccgtgagcgcctggaagcggcagcctgtgcgcgtgctgagcctgtttcggaatatcgataaagtcctgaaaagcctgggattcctggagagcggctctggctccggcggtggcaccctgaagtacgtggaggatgtgacaaacgtggtcagacgggatgtggagaagtggggccccttcgatctggtgtacggcagcacccaacccctgggcagctcttgtgaccggtgccctggctggtacatgtttcagttccaccggatcctgcagtacgccctgccgagacaggagtcccagcggccattcttttggattttcatggacaacttgctgctgaccgaggatgaccaggaaactaccactcggttcctgcagaccgaagccgtgaccctgcaggacgtgagaggccgggactaccagaacgccatgcgggtgtggtccaacatccctggactgaaaagcaagcacgcacctctgacccctaaagaagaggagtacctgcaggcccaggtgcggagcagaagcaagctggacgcccctaaggtggatctgctggtgaagaattgcctcctgcccctgagagagtacttcaagtatttcagccagaatagtctgcccctgggaggcagcggcggcggcgccctggtgacatttgaggacgtcgccgtgcggttcacccaggaggaatgggctctgctggatccttctcagaaaatcctgtaccgggacgtgatgagagagacataccggaatctgacctccgtgggcatcaactgggaatgttgggaccttgaagcctgcttcagaagcctgggaagaaacctgagagtgcaggtggtgaagagaaagtgcgagctgaccaacagcggcccctgcgccgagggcggcccaagcagcggcgcccctcctcccagcggcggcagcccagccggctccccaacctctaccgaggagggcacctctgagtccgccacccccgagagcggccctggcacctccaccgagcccagcgagggcagcgcacccggcagccctgccggcagccccacctccacagaggagggaaccagcaccgagcccagcgaaggcagcgccccaggcaccagcaccgagcctagtgagcaggagattaaacggatcaacaagatcagaagaagacttgtgaaagacagcaacaccaagaaggccggcaagacaggccccatgaaaaccctgctggttagagtgatgacacccgatctgagagagcggctggaaaacctgagaaagaagcctgaaaatatcccccagcccatcagcaatacatctagagccaacctgaataagctgctgaccgattacaccgaaatgaagaaggcgatcctgcatgtgtactgggaagagttccagaaggaccctgtgggcctgatgagccgggtggcccagcctgccagcaagaagatcgatcagaacaagctgaaacctgagatggacgagaagggcaacctgaccaccgccggctttgcctgctctcagtgtggccagcccctgttcgtgtacaagctggagcaggtgtctgagaagggcaaggcttacaccaactacttcggacggtgcaatgtggccgagcacgaaaagctgatcctgctggcccagctgaagcccgagaaggatagcgacgaagccgtgacatatagcctgggaaagtttgggcagagggccctggatttctacagcattcatgtgaccaaggagtccacccaccccgtgaagcccctggcccagatcgccggaaacagatacgcctccggacctgtgggaaaggccctgagcgacgcatgtatgggcacaatcgcctccttcctgtctaagtaccaggacatcatcatcgaacaccagaaggtggtgaagggcaaccagaagagactggagagcctgcgggagctggccggcaaggaaaacctggaataccctagcgtgaccctgccacctcagcctcacaccaaggagggcgttgatgcctacaacgaagtgatcgcccgggtgcgaatgtgggtgaacctgaacctgtggcagaagctgaagctaagcagagatgatgccaagcctctgctgagactgaagggattcccttcctttcctctggtcgagagacaggccaacgaagtggactggtgggacatggtgtgtaacgtgaagaagctgatcaacgagaaaaaggaggatggcaaggtgttttggcagaatctggctggctacaagagacaggaagccctgagaccatacctgagcagcgaggaagatcggaagaagggaaagaaattcgctcggtaccagctgggcgacctgctgctgcacctggaaaagaagcacggcgaggactggggaaaggtgtacgacgaggcctgggagcggattgacaagaaagtggaaggcctgagcaagcacatcaagctggaagaggaacggagaagcgaggacgcccagagcaaggccgccctgaccgactggctgcgggctaaggccagcttcgtgatcgagggcctgaaggaggccgacaaggacgagttctgcagatgcgagctgaagctgcagaagtggtacggggacctgcggggaaagcccttcgccatcgaagccgagaacagcatcctggacatcagcggcttcagcaagcagtacaactgtgccttcatctggcagaaggacggcgtgaagaagctgaacctgtacctgatcatcaactacttcaagggcggcaagctgcggttcaagaagatcaaacctgaagccttcgaagccaacagattctacaccgtgatcaacaaaaagagcggcgagatcgtgcccatggaggtgaacttcaacttcgacgaccccaacctgatcatcctgcctctggcctttggcaagagacagggcagagaattcatctggaacgacctgctgtccctggaaaccggcagcctgaagctggccaacggaagagtgatcgagaagacactgtacaacagaagaacccggcaggatgagcctgccctgttcgtggccctgaccttcgagcggcgggaggtcctggactcctccaatatcaaaccaatgaacctgatcggcgtggcaagaggcgaaaacatccccgccgtgatcgccctgaccgaccccgagggctgcccactgagccggtttaaggatagcctgggaaacccaacccacatcctgagaatcggcgagagctataaggagaagcagcggaccatccaggccaagaaggaggtggagcagcggagagccggcggctacagccggaagtacgccagcaaagccaagaatctggcagacgatatggtgagaaacaccgctagagatctgctgtactacgccgtgacccaggatgccatgctgatcttcgccaacctgagccggggcttcggccggcagggcaagcggaccttcatggccgagagacagtacacacggatggaggactggctgaccgccaagctggcctacgagggcctgagcaagacctacctgtccaagacactggcccagtacacctccaagacatgcagcaactgtgggtttaccatcaccagcgccgactacgacagggtgctggagaagctgaagaagacagcaacaggctggatgaccacaattaacggcaaggagctgaaggtggagggccagattacctactacaacagatacaagagacagaacgtagtcaaggacctgtccgtcgagctggatagactgagcgaagaatctgtgaacaacgacatctcctcctggacaaagggcagaagcggagaagctctgagcctcctgaagaaaagattctcccatagacccgtgcaggagaagttcgtgtgcctgaactgcggcttcgagacacacgcagccgagcaagccgccctgaacatcgccagatcctggctgttcctgcggagccaggagtacaagaaataccagacaaacaagacaaccggcaacaccgataagagagccttcgtcgagacctggcagtccttttaccggaagaagcttaaggaggtgtggaaacctgccgtgcggtctggcggatctggcggaggctccttccaggacagcgtgaccttcgaggacgtggccgtgaggttcagcagcggcgagtggcagtgcctgaccagggcccagaggcacctgtacgccgacgtgatgctggagaactacggcaacatgatcagcgtgggcttcgccgtgcccaagccccccctgatcagccacctggagcagggcgccgagccctgcgtgcaggacctgcaggacggcggcttcctgagctgcagcttccccgtgagcggcggcccaagcagcggcgcccctcctcccagcggcggcagcccagccggctccccaacctctaccgaggagggcacctctgagtccgccacccccgagagcggccctggcacctccaccgagcccagcgagggcagcgcacccggcagccctgccggcagccccacctccacagaggagggaaccagcaccgagcccagcgaaggcagcgccccaggcaccagcaccgagcctagtgagcaggagattaaacggatcaacaagatcagaagaagacttgtgaaagacagcaacaccaagaaggccggcaagacaggccccatgaaaaccctgctggttagagtgatgacacccgatctgagagagcggctggaaaacctgagaaagaagcctgaaaatatcccccagcccatcagcaatacatctagagccaacctgaataagctgctgaccgattacaccgaaatgaagaaggcgatcctgcatgtgtactgggaagagttccagaaggaccctgtgggcctgatgagccgggtggcccagcctgccagcaagaagatcgatcagaacaagctgaaacctgagatggacgagaagggcaacctgaccaccgccggctttgcctgctctcagtgtggccagcccctgttcgtgtacaagctggagcaggtgtctgagaagggcaaggcttacaccaactacttcggacggtgcaatgtggccgagcacgaaaagctgatcctgctggcccagctgaagcccgagaaggatagcgacgaagccgtgacatatagcctgggaaagtttgggcagagggccctggatttctacagcattcatgtgaccaaggagtccacccaccccgtgaagcccctggcccagatcgccggaaacagatacgcctccggacctgtgggaaaggccctgagcgacgcatgtatgggcacaatcgcctccttcctgtctaagtaccaggacatcatcatcgaacaccagaaggtggtgaagggcaaccagaagagactggagagcctgcgggagctggccggcaaggaaaacctggaataccctagcgtgaccctgccacctcagcctcacaccaaggagggcgttgatgcctacaacgaagtgatcgcccgggtgcgaatgtgggtgaacctgaacctgtggcagaagctgaagctaagcagagatgatgccaagcctctgctgagactgaagggattcccttcctttcctctggtcgagagacaggccaacgaagtggactggtgggacatggtgtgtaacgtgaagaagctgatcaacgagaaaaaggaggatggcaaggtgttttggcagaatctggctggctacaagagacaggaagccctgagaccatacctgagcagcgaggaagatcggaagaagggaaagaaattcgctcggtaccagctgggcgacctgctgctgcacctggaaaagaagcacggcgaggactggggaaaggtgtacgacgaggcctgggagcggattgacaagaaagtggaaggcctgagcaagcacatcaagctggaagaggaacggagaagcgaggacgcccagagcaaggccgccctgaccgactggctgcgggctaaggccagcttcgtgatcgagggcctgaaggaggccgacaaggacgagttctgcagatgcgagctgaagctgcagaagtggtacggggacctgcggggaaagcccttcgccatcgaagccgagaacagcatcctggacatcagcggcttcagcaagcagtacaactgtgccttcatctggcagaaggacggcgtgaagaagctgaacctgtacctgatcatcaactacttcaagggcggcaagctgcggttcaagaagatcaaacctgaagccttcgaagccaacagattctacaccgtgatcaacaaaaagagcggcgagatcgtgcccatggaggtgaacttcaacttcgacgaccccaacctgatcatcctgcctctggcctttggcaagagacagggcagagaattcatctggaacgacctgctgtccctggaaaccggcagcctgaagctggccaacggaagagtgatcgagaagacactgtacaacagaagaacccggcaggatgagcctgccctgttcgtggccctgaccttcgagcggcgggaggtcctggactcctccaatatcaaaccaatgaacctgatcggcgtggcaagaggcgaaaacatccccgccgtgatcgccctgaccgaccccgagggctgcccactgagccggtttaaggatagcctgggaaacccaacccacatcctgagaatcggcgagagctataaggagaagcagcggaccatccaggccaagaaggaggtggagcagcggagagccggcggctacagccggaagtacgccagcaaagccaagaatctggcagacgatatggtgagaaacaccgctagagatctgctgtactacgccgtgacccaggatgccatgctgatcttcgccaacctgagccggggcttcggccggcagggcaagcggaccttcatggccgagagacagtacacacggatggaggactggctgaccgccaagctggcctacgagggcctgagcaagacctacctgtccaagacactggcccagtacacctccaagacatgcagcaactgtgggtttaccatcaccagcgccgactacgacagggtgctggagaagctgaagaagacagcaacaggctggatgaccacaattaacggcaaggagctgaaggtggagggccagattacctactacaacagatacaagagacagaacgtagtcaaggacctgtccgtcgagctggatagactgagcgaagaatctgtgaacaacgacatctcctcctggacaaagggcagaagcggagaagctctgagcctcctgaagaaaagattctcccatagacccgtgcaggagaagttcgtgtgcctgaactgcggcttcgagacacacgcagccgagcaagccgccctgaacatcgccagatcctggctgttcctgcggagccaggagtacaagaaataccagacaaacaagacaaccggcaacaccgataagagagccttcgtcgagacctggcagtccttttaccggaagaagcttaaggaggtgtggaaacctgccgtgcggtctggcggatctggcggaggctcctttccaggacagcgtgaccttcgaggacgtggccgtgaggttcagcagcggcgagtggcagtgcctgaccagggcccagaggcacctgtacgccgacgtgatgctggagaactacggcaacatgatcagcgtgggcttcgccgtgcccaagccccccctgatcagccacctggagcagggcgccgagccctgcgtgcaggacctgcaggacggcggcttcctgagctgcagcttccccgtgagcggatctggctccggcagcggccccaagaaaaagagaaaagtctaagctgccttctgcggggcttgccttctggccatgcccttcttctctcccttgcacctgtacctcttggtctttgaataaagcctgagtaggaaggctagcaaaaaaaaaaaaaaaaaaaaaaaaaaaaaaaaaaaaaaaaaaaaaaaaaaaaaaaaaaaaaaaaaaaaaaaaaaaaaaaa

SEQ ID NO: 16788 - RNA, 9485 nt, synthetic construct
  source 1..9485: mol_type = other RNA
aggaaataagagagaaaagaagagtaagaagaaatataagagccaccatggcccctaagaagaagcgtaaagtgagccggatggaacgcctcgtctacgaggtgcggcagaagtgcagaaacatcgaggacatctgcatctcctgcggatctctgaacgtgaccctggagcacccactgttcatcggcggcatgtgccagaactgtaaaaactgttttctggagtgtgcctatcaatacgacgatgacggctaccagagctactgcaccatctgttgcggcggaagagaggtgctgatgtgtggaaataacaactgctgccggtgcttctgcgtggaatgcgtggacctgctggtgggccccggcgccgcccaggccgctattaaggaagatccttggaactgctacatgtgcggccacaagggcacatacggcctgctgagacggagagaggactggcctagcagactgcagatgttcttcgccaataaccacgaccaggagttcgacccccctaaggtgtaccctcccgtccccgccgagaagagaaagcccatccgggtcctgagcctgttcgatggcatcgccaccggtctgctggtgctgaaggacctgggcatccaggtggataggtacattgcctccgaggtgtgcgaggactccatcaccgtgggaatggtgcgtcatcagggcaagatcatgtacgtgggcgacgtgcggagcgtgacacagaagcatatccaggagtggggccctttcgacctggtgatcggcggcagcccttgcaatgacctgagcatcgtgaacccagcccggaagggcctgtacgagggaaccggcagactgttcttcgagttttacagactgctgcacgacgcccggcctaaggaaggcgacgaccggcccttcttttggctgttcgagaatgtggtggccatgggagtcagcgacaagcgggatattagccggttcctggagagcaaccccgtgatgatcgatgccaaggaagtgagcgccgcccaccgggccagatacttctggggcaatctgcctggcatgaacagacccctggccagcaccgtgaacgacaagctggagctgcaggagtgcctggagcacggccggatcgccaagttcagcaaggtgagaaccatcaccacccgaagcaacagcatcaaacaaggcaaggaccagcactttcctgtgttcatgaacgagaaggaggacatcctgtggtgtaccgagatggagagagtgttcgggttcccagtccactacacagatgtcagcaacatgtctagactggccagacagagactgctgggaagaagctggtccgtccctgtgatcagacacctgttcgcccctctgaaggagtacttcgcctgcgtgagcagcggcaacagcaacgccaacagccggggccccagcttctctagcggcctggtgccactgtccctgagagggagccacatgggccccatggagatctacaaaaccgtgagcgcctggaagcggcagcctgtgcgcgtgctgagcctgtttcggaatatcgataaagtcctgaaaagcctgggattcctggagagcggctctggctccggcggtggcaccctgaagtacgtggaggatgtgacaaacgtggtcagacgggatgtggagaagtggggccccttcgatctggtgtacggcagcacccaacccctgggcagctcttgtgaccggtgccctggctggtacatgtttcagttccaccggatcctgcagtacgccctgccgagacaggagtcccagcggccattcttttggattttcatggacaacttgctgctgaccgaggatgaccaggaaactaccactcggttcctgcagaccgaagccgtgaccctgcaggacgtgagaggccgggactaccagaacgccatgcgggtgtggtccaacatccctggactgaaaagcaagcacgcacctctgacccctaaagaagaggagtacctgcaggcccaggtgcggagcagaagcaagctggacgcccctaaggtggatctgctggtgaagaattgcctcctgcccctgagagagtacttcaagtatttcagccagaatagtctgcccctgggaggcagcggcggcggcgccctggtgacatttgaggacgtcgccgtgcggttcacccaggaggaatgggctctgctggatccttctcagaaaatcctgtaccgggacgtgatgagagagacataccggaatctgacctccgtgggcatcaactgggaatgttgggaccttgaagcctgcttcagaagcctgggaagaaacctgagagtgcaggtggtgaagagaaagtgcgagctgaccaacagcggcccctgcgccgagggcggcccaagcagcggcgcccctcctcccagcggcggcagcccagccggctccccaacctctaccgaggagggcacctctgagtccgccacccccgagagcggccctggcacctccaccgagcccagcgagggcagcgcacccggcagccctgccggcagccccacctccacagaggagggaaccagcaccgagcccagcgaaggcagcgccccaggcaccagcaccgagcctagtgagcaggagattaaacggatcaacaagatcagaagaagacttgtgaaagacagcaacaccaagaaggccggcaagacaggccccatgaaaaccctgctggttagagtgatgacacccgatctgagagagcggctggaaaacctgagaaagaagcctgaaaatatcccccagcccatcagcaatacatctagagccaacctgaataagctgctgaccgattacaccgaaatgaagaaggcgatcctgcatgtgtactgggaagagttccagaaggaccctgtgggcctgatgagccgggtggcccagcctgccagcaagaagatcgatcagaacaagctgaaacctgagatggacgagaagggcaacctgaccaccgccggctttgcctgctctcagtgtggccagcccctgttcgtgtacaagctggagcaggtgtctgagaagggcaaggcttacaccaactacttcggacggtgcaatgtggccgagcacgaaaagctgatcctgctggcccagctgaagcccgagaaggatagcgacgaagccgtgacatatagcctgggaaagtttgggcagagggccctggatttctacagcattcatgtgaccaaggagtccacccaccccgtgaagcccctggcccagatcgccggaaacagatacgcctccggacctgtgggaaaggccctgagcgacgcatgtatgggcacaatcgcctccttcctgtctaagtaccaggacatcatcatcgaacaccagaaggtggtgaagggcaaccagaagagactggagagcctgcgggagctggccggcaaggaaaacctggaataccctagcgtgaccctgccacctcagcctcacaccaaggagggcgttgatgcctacaacgaagtgatcgcccgggtgcgaatgtgggtgaacctgaacctgtggcagaagctgaagctaagcagagatgatgccaagcctctgctgagactgaagggattcccttcctttcctctggtcgagagacaggccaacgaagtggactggtgggacatggtgtgtaacgtgaagaagctgatcaacgagaaaaaggaggatggcaaggtgttttggcagaatctggctggctacaagagacaggaagccctgagaccatacctgagcagcgaggaagatcggaagaagggaaagaaattcgctcggtaccagctgggcgacctgctgctgcacctggaaaagaagcacggcgaggactggggaaaggtgtacgacgaggcctgggagcggattgacaagaaagtggaaggcctgagcaagcacatcaagctggaagaggaacggagaagcgaggacgcccagagcaaggccgccctgaccgactggctgcgggctaaggccagcttcgtgatcgagggcctgaaggaggccgacaaggacgagttctgcagatgcgagctgaagctgcagaagtggtacggggacctgcggggaaagcccttcgccatcgaagccgagaacagcatcctggacatcagcggcttcagcaagcagtacaactgtgccttcatctggcagaaggacggcgtgaagaagctgaacctgtacctgatcatcaactacttcaagggcggcaagctgcggttcaagaagatcaaacctgaagccttcgaagccaacagattctacaccgtgatcaacaaaaagagcggcgagatcgtgcccatggaggtgaacttcaacttcgacgaccccaacctgatcatcctgcctctggcctttggcaagagacagggcagagaattcatctggaacgacctgctgtccctggaaaccggcagcctgaagctggccaacggaagagtgatcgagaagacactgtacaacagaagaacccggcaggatgagcctgccctgttcgtggccctgaccttcgagcggcgggaggtcctggactcctccaatatcaaaccaatgaacctgatcggcgtggcaagaggcgaaaacatccccgccgtgatcgccctgaccgaccccgagggctgcccactgagccggtttaaggatagcctgggaaacccaacccacatcctgagaatcggcgagagctataaggagaagcagcggaccatccaggccaagaaggaggtggagcagcggagagccggcggctacagccggaagtacgccagcaaagccaagaatctggcagacgatatggtgagaaacaccgctagagatctgctgtactacgccgtgacccaggatgccatgctgatcttcgccaacctgagccggggcttcggccggcagggcaagcggaccttcatggccgagagacagtacacacggatggaggactggctgaccgccaagctggcctacgagggcctgagcaagacctacctgtccaagacactggcccagtacacctccaagacatgcagcaactgtgggtttaccatcaccagcgccgactacgacagggtgctggagaagctgaagaagacagcaacaggctggatgaccacaattaacggcaaggagctgaaggtggagggccagattacctactacaacagatacaagagacagaacgtagtcaaggacctgtccgtcgagctggatagactgagcgaagaatctgtgaacaacgacatctcctcctggacaaagggcagaagcggagaagctctgagcctcctgaagaaaagattctcccatagacccgtgcaggagaagttcgtgtgcctgaactgcggcttcgagacacacgcagccgagcaagccgccctgaacatcgccagatcctggctgttcctgcggagccaggagtacaagaaataccagacaaacaagacaaccggcaacaccgataagagagccttcgtcgagacctggcagtccttttaccggaagaagcttaaggaggtgtggaaacctgccgtgcggtctggcggatctggcggaggctccatgaccttcgaggacgtggccgtggagttcacccagtgggagtggggccagctggaccccgcccagcaggacctgtacagggaggtgatgctggagaacttcaagaacctggccagcctgggcctgcccgtgagcaagccctacgtgatcacccagctggaggagggcaaggacccctgcgtgctggacggcgagatcagcaccgagtacctgagccccccccccgactgggagaagaggcccggcggcccaagcagcggcgcccctcctcccagcggcggcagcccagccggctccccaacctctaccgaggagggcacctctgagtccgccacccccgagagcggccctggcacctccaccgagcccagcgagggcagcgcacccggcagccctgccggcagccccacctccacagaggagggaaccagcaccgagcccagcgaaggcagcgccccaggcaccagcaccgagcctagtgagcaggagattaaacggatcaacaagatcagaagaagacttgtgaaagacagcaacaccaagaaggccggcaagacaggccccatgaaaaccctgctggttagagtgatgacacccgatctgagagagcggctggaaaacctgagaaagaagcctgaaaatatcccccagcccatcagcaatacatctagagccaacctgaataagctgctgaccgattacaccgaaatgaagaaggcgatcctgcatgtgtactgggaagagttccagaaggaccctgtgggcctgatgagccgggtggcccagcctgccagcaagaagatcgatcagaacaagctgaaacctgagatggacgagaagggcaacctgaccaccgccggctttgcctgctctcagtgtggccagcccctgttcgtgtacaagctggagcaggtgtctgagaagggcaaggcttacaccaactacttcggacggtgcaatgtggccgagcacgaaaagctgatcctgctggcccagctgaagcccgagaaggatagcgacgaagccgtgacatatagcctgggaaagtttgggcagagggccctggatttctacagcattcatgtgaccaaggagtccacccaccccgtgaagcccctggcccagatcgccggaaacagatacgcctccggacctgtgggaaaggccctgagcgacgcatgtatgggcacaatcgcctccttcctgtctaagtaccaggacatcatcatcgaacaccagaaggtggtgaagggcaaccagaagagactggagagcctgcgggagctggccggcaaggaaaacctggaataccctagcgtgaccctgccacctcagcctcacaccaaggagggcgttgatgcctacaacgaagtgatcgcccgggtgcgaatgtgggtgaacctgaacctgtggcagaagctgaagctaagcagagatgatgccaagcctctgctgagactgaagggattcccttcctttcctctggtcgagagacaggccaacgaagtggactggtgggacatggtgtgtaacgtgaagaagctgatcaacgagaaaaaggaggatggcaaggtgttttggcagaatctggctggctacaagagacaggaagccctgagaccatacctgagcagcgaggaagatcggaagaagggaaagaaattcgctcggtaccagctgggcgacctgctgctgcacctggaaaagaagcacggcgaggactggggaaaggtgtacgacgaggcctgggagcggattgacaagaaagtggaaggcctgagcaagcacatcaagctggaagaggaacggagaagcgaggacgcccagagcaaggccgccctgaccgactggctgcgggctaaggccagcttcgtgatcgagggcctgaaggaggccgacaaggacgagttctgcagatgcgagctgaagctgcagaagtggtacggggacctgcggggaaagcccttcgccatcgaagccgagaacagcatcctggacatcagcggcttcagcaagcagtacaactgtgccttcatctggcagaaggacggcgtgaagaagctgaacctgtacctgatcatcaactacttcaagggcggcaagctgcggttcaagaagatcaaacctgaagccttcgaagccaacagattctacaccgtgatcaacaaaaagagcggcgagatcgtgcccatggaggtgaacttcaacttcgacgaccccaacctgatcatcctgcctctggcctttggcaagagacagggcagagaattcatctggaacgacctgctgtccctggaaaccggcagcctgaagctggccaacggaagagtgatcgagaagacactgtacaacagaagaacccggcaggatgagcctgccctgttcgtggccctgaccttcgagcggcgggaggtcctggactcctccaatatcaaaccaatgaacctgatcggcgtggcaagaggcgaaaacatccccgccgtgatcgccctgaccgaccccgagggctgcccactgagccggtttaaggatagcctgggaaacccaacccacatcctgagaatcggcgagagctataaggagaagcagcggaccatccaggccaagaaggaggtggagcagcggagagccggcggctacagccggaagtacgccagcaaagccaagaatctggcagacgatatggtgagaaacaccgctagagatctgctgtactacgccgtgacccaggatgccatgctgatcttcgccaacctgagccggggcttcggccggcagggcaagcggaccttcatggccgagagacagtacacacggatggaggactggctgaccgccaagctggcctacgagggcctgagcaagacctacctgtccaagacactggcccagtacacctccaagacatgcagcaactgtgggtttaccatcaccagcgccgactacgacagggtgctggagaagctgaagaagacagcaacaggctggatgaccacaattaacggcaaggagctgaaggtggagggccagattacctactacaacagatacaagagacagaacgtagtcaaggacctgtccgtcgagctggatagactgagcgaagaatctgtgaacaacgacatctcctcctggacaaagggcagaagcggagaagctctgagcctcctgaagaaaagattctcccatagacccgtgcaggagaagttcgtgtgcctgaactgcggcttcgagacacacgcagccgagcaagccgccctgaacatcgccagatcctggctgttcctgcggagccaggagtacaagaaataccagacaaacaagacaaccggcaacaccgataagagagccttcgtcgagacctggcagtccttttaccggaagaagcttaaggaggtgtggaaacctgccgtgcggtctggcggatctggcggaggctcctatgaccttcgaggacgtggccgtggagttcacccagtgggagtggggccagctggaccccgcccagcaggacctgtacagggaggtgatgctggagaacttcaagaacctggccagcctgggcctgcccgtgagcaagccctacgtgatcacccagctggaggagggcaaggacccctgcgtgctggacggcgagatcagcaccgagtacctgagccccccccccgactgggagaagaggcccggatctggctccggcagcggccccaagaaaaagagaaaagtctaagctgccttctgcggggcttgccttctggccatgcccttcttctctcccttgcacctgtacctcttggtctttgaataaagcctgagtaggaaggctagcaaaaaaaaaaaaaaaaaaaaaaaaaaaaaaaaaaaaaaaaaaaaaaaaaaaaaaaaaaaaaaaaaaaaaaaaaaaaaaaa

SEQ ID NO: 16789 - RNA, 9485 nt, synthetic construct
  source 1..9485: mol_type = other RNA
aggaaataagagagaaaagaagagtaagaagaaatataagagccaccatggcccctaagaagaagcgtaaagtgagccggatggaacgcctcgtctacgaggtgcggcagaagtgcagaaacatcgaggacatctgcatctcctgcggatctctgaacgtgaccctggagcacccactgttcatcggcggcatgtgccagaactgtaaaaactgttttctggagtgtgcctatcaatacgacgatgacggctaccagagctactgcaccatctgttgcggcggaagagaggtgctgatgtgtggaaataacaactgctgccggtgcttctgcgtggaatgcgtggacctgctggtgggccccggcgccgcccaggccgctattaaggaagatccttggaactgctacatgtgcggccacaagggcacatacggcctgctgagacggagagaggactggcctagcagactgcagatgttcttcgccaataaccacgaccaggagttcgacccccctaaggtgtaccctcccgtccccgccgagaagagaaagcccatccgggtcctgagcctgttcgatggcatcgccaccggtctgctggtgctgaaggacctgggcatccaggtggataggtacattgcctccgaggtgtgcgaggactccatcaccgtgggaatggtgcgtcatcagggcaagatcatgtacgtgggcgacgtgcggagcgtgacacagaagcatatccaggagtggggccctttcgacctggtgatcggcggcagcccttgcaatgacctgagcatcgtgaacccagcccggaagggcctgtacgagggaaccggcagactgttcttcgagttttacagactgctgcacgacgcccggcctaaggaaggcgacgaccggcccttcttttggctgttcgagaatgtggtggccatgggagtcagcgacaagcgggatattagccggttcctggagagcaaccccgtgatgatcgatgccaaggaagtgagcgccgcccaccgggccagatacttctggggcaatctgcctggcatgaacagacccctggccagcaccgtgaacgacaagctggagctgcaggagtgcctggagcacggccggatcgccaagttcagcaaggtgagaaccatcaccacccgaagcaacagcatcaaacaaggcaaggaccagcactttcctgtgttcatgaacgagaaggaggacatcctgtggtgtaccgagatggagagagtgttcgggttcccagtccactacacagatgtcagcaacatgtctagactggccagacagagactgctgggaagaagctggtccgtccctgtgatcagacacctgttcgcccctctgaaggagtacttcgcctgcgtgagcagcggcaacagcaacgccaacagccggggccccagcttctctagcggcctggtgccactgtccctgagagggagccacatgggccccatggagatctacaaaaccgtgagcgcctggaagcggcagcctgtgcgcgtgctgagcctgtttcggaatatcgataaagtcctgaaaagcctgggattcctggagagcggctctggctccggcggtggcaccctgaagtacgtggaggatgtgacaaacgtggtcagacgggatgtggagaagtggggccccttcgatctggtgtacggcagcacccaacccctgggcagctcttgtgaccggtgccctggctggtacatgtttcagttccaccggatcctgcagtacgccctgccgagacaggagtcccagcggccattcttttggattttcatggacaacttgctgctgaccgaggatgaccaggaaactaccactcggttcctgcagaccgaagccgtgaccctgcaggacgtgagaggccgggactaccagaacgccatgcgggtgtggtccaacatccctggactgaaaagcaagcacgcacctctgacccctaaagaagaggagtacctgcaggcccaggtgcggagcagaagcaagctggacgcccctaaggtggatctgctggtgaagaattgcctcctgcccctgagagagtacttcaagtatttcagccagaatagtctgcccctgggaggcagcggcggcggcgccctggtgacatttgaggacgtcgccgtgcggttcacccaggaggaatgggctctgctggatccttctcagaaaatcctgtaccgggacgtgatgagagagacataccggaatctgacctccgtgggcatcaactgggaatgttgggaccttgaagcctgcttcagaagcctgggaagaaacctgagagtgcaggtggtgaagagaaagtgcgagctgaccaacagcggcccctgcgccgagggcggcccaagcagcggcgcccctcctcccagcggcggcagcccagccggctccccaacctctaccgaggagggcacctctgagtccgccacccccgagagcggccctggcacctccaccgagcccagcgagggcagcgcacccggcagccctgccggcagccccacctccacagaggagggaaccagcaccgagcccagcgaaggcagcgccccaggcaccagcaccgagcctagtgagcaggagattaaacggatcaacaagatcagaagaagacttgtgaaagacagcaacaccaagaaggccggcaagacaggccccatgaaaaccctgctggttagagtgatgacacccgatctgagagagcggctggaaaacctgagaaagaagcctgaaaatatcccccagcccatcagcaatacatctagagccaacctgaataagctgctgaccgattacaccgaaatgaagaaggcgatcctgcatgtgtactgggaagagttccagaaggaccctgtgggcctgatgagccgggtggcccagcctgccagcaagaagatcgatcagaacaagctgaaacctgagatggacgagaagggcaacctgaccaccgccggctttgcctgctctcagtgtggccagcccctgttcgtgtacaagctggagcaggtgtctgagaagggcaaggcttacaccaactacttcggacggtgcaatgtggccgagcacgaaaagctgatcctgctggcccagctgaagcccgagaaggatagcgacgaagccgtgacatatagcctgggaaagtttgggcagagggccctggatttctacagcattcatgtgaccaaggagtccacccaccccgtgaagcccctggcccagatcgccggaaacagatacgcctccggacctgtgggaaaggccctgagcgacgcatgtatgggcacaatcgcctccttcctgtctaagtaccaggacatcatcatcgaacaccagaaggtggtgaagggcaaccagaagagactggagagcctgcgggagctggccggcaaggaaaacctggaataccctagcgtgaccctgccacctcagcctcacaccaaggagggcgttgatgcctacaacgaagtgatcgcccgggtgcgaatgtgggtgaacctgaacctgtggcagaagctgaagctaagcagagatgatgccaagcctctgctgagactgaagggattcccttcctttcctctggtcgagagacaggccaacgaagtggactggtgggacatggtgtgtaacgtgaagaagctgatcaacgagaaaaaggaggatggcaaggtgttttggcagaatctggctggctacaagagacaggaagccctgagaccatacctgagcagcgaggaagatcggaagaagggaaagaaattcgctcggtaccagctgggcgacctgctgctgcacctggaaaagaagcacggcgaggactggggaaaggtgtacgacgaggcctgggagcggattgacaagaaagtggaaggcctgagcaagcacatcaagctggaagaggaacggagaagcgaggacgcccagagcaaggccgccctgaccgactggctgcgggctaaggccagcttcgtgatcgagggcctgaaggaggccgacaaggacgagttctgcagatgcgagctgaagctgcagaagtggtacggggacctgcggggaaagcccttcgccatcgaagccgagaacagcatcctggacatcagcggcttcagcaagcagtacaactgtgccttcatctggcagaaggacggcgtgaagaagctgaacctgtacctgatcatcaactacttcaagggcggcaagctgcggttcaagaagatcaaacctgaagccttcgaagccaacagattctacaccgtgatcaacaaaaagagcggcgagatcgtgcccatggaggtgaacttcaacttcgacgaccccaacctgatcatcctgcctctggcctttggcaagagacagggcagagaattcatctggaacgacctgctgtccctggaaaccggcagcctgaagctggccaacggaagagtgatcgagaagacactgtacaacagaagaacccggcaggatgagcctgccctgttcgtggccctgaccttcgagcggcgggaggtcctggactcctccaatatcaaaccaatgaacctgatcggcgtggcaagaggcgaaaacatccccgccgtgatcgccctgaccgaccccgagggctgcccactgagccggtttaaggatagcctgggaaacccaacccacatcctgagaatcggcgagagctataaggagaagcagcggaccatccaggccaagaaggaggtggagcagcggagagccggcggctacagccggaagtacgccagcaaagccaagaatctggcagacgatatggtgagaaacaccgctagagatctgctgtactacgccgtgacccaggatgccatgctgatcttcgccaacctgagccggggcttcggccggcagggcaagcggaccttcatggccgagagacagtacacacggatggaggactggctgaccgccaagctggcctacgagggcctgagcaagacctacctgtccaagacactggcccagtacacctccaagacatgcagcaactgtgggtttaccatcaccagcgccgactacgacagggtgctggagaagctgaagaagacagcaacaggctggatgaccacaattaacggcaaggagctgaaggtggagggccagattacctactacaacagatacaagagacagaacgtagtcaaggacctgtccgtcgagctggatagactgagcgaagaatctgtgaacaacgacatctcctcctggacaaagggcagaagcggagaagctctgagcctcctgaagaaaagattctcccatagacccgtgcaggagaagttcgtgtgcctgaactgcggcttcgagacacacgcagccgagcaagccgccctgaacatcgccagatcctggctgttcctgcggagccaggagtacaagaaataccagacaaacaagacaaccggcaacaccgataagagagccttcgtcgagacctggcagtccttttaccggaagaagcttaaggaggtgtggaaacctgccgtgcggtctggcggatctggcggaggctccatgctgcagaccgcctggccccagaggctgagcaggaacctgtggttccaggagagcgtggccttcgaggacgtggccgtgtacttcacccagaaccagtgggccagcctggaccccgcccagagggccctgtacagggaggtgatgctggagaactacgccaacgtgaccagcctggtggccttccccttccccaagcccgccctgatcagccacctggagaagggcgaggccccctggggcggcggcccaagcagcggcgcccctcctcccagcggcggcagcccagccggctccccaacctctaccgaggagggcacctctgagtccgccacccccgagagcggccctggcacctccaccgagcccagcgagggcagcgcacccggcagccctgccggcagccccacctccacagaggagggaaccagcaccgagcccagcgaaggcagcgccccaggcaccagcaccgagcctagtgagcaggagattaaacggatcaacaagatcagaagaagacttgtgaaagacagcaacaccaagaaggccggcaagacaggccccatgaaaaccctgctggttagagtgatgacacccgatctgagagagcggctggaaaacctgagaaagaagcctgaaaatatcccccagcccatcagcaatacatctagagccaacctgaataagctgctgaccgattacaccgaaatgaagaaggcgatcctgcatgtgtactgggaagagttccagaaggaccctgtgggcctgatgagccgggtggcccagcctgccagcaagaagatcgatcagaacaagctgaaacctgagatggacgagaagggcaacctgaccaccgccggctttgcctgctctcagtgtggccagcccctgttcgtgtacaagctggagcaggtgtctgagaagggcaaggcttacaccaactacttcggacggtgcaatgtggccgagcacgaaaagctgatcctgctggcccagctgaagcccgagaaggatagcgacgaagccgtgacatatagcctgggaaagtttgggcagagggccctggatttctacagcattcatgtgaccaaggagtccacccaccccgtgaagcccctggcccagatcgccggaaacagatacgcctccggacctgtgggaaaggccctgagcgacgcatgtatgggcacaatcgcctccttcctgtctaagtaccaggacatcatcatcgaacaccagaaggtggtgaagggcaaccagaagagactggagagcctgcgggagctggccggcaaggaaaacctggaataccctagcgtgaccctgccacctcagcctcacaccaaggagggcgttgatgcctacaacgaagtgatcgcccgggtgcgaatgtgggtgaacctgaacctgtggcagaagctgaagctaagcagagatgatgccaagcctctgctgagactgaagggattcccttcctttcctctggtcgagagacaggccaacgaagtggactggtgggacatggtgtgtaacgtgaagaagctgatcaacgagaaaaaggaggatggcaaggtgttttggcagaatctggctggctacaagagacaggaagccctgagaccatacctgagcagcgaggaagatcggaagaagggaaagaaattcgctcggtaccagctgggcgacctgctgctgcacctggaaaagaagcacggcgaggactggggaaaggtgtacgacgaggcctgggagcggattgacaagaaagtggaaggcctgagcaagcacatcaagctggaagaggaacggagaagcgaggacgcccagagcaaggccgccctgaccgactggctgcgggctaaggccagcttcgtgatcgagggcctgaaggaggccgacaaggacgagttctgcagatgcgagctgaagctgcagaagtggtacggggacctgcggggaaagcccttcgccatcgaagccgagaacagcatcctggacatcagcggcttcagcaagcagtacaactgtgccttcatctggcagaaggacggcgtgaagaagctgaacctgtacctgatcatcaactacttcaagggcggcaagctgcggttcaagaagatcaaacctgaagccttcgaagccaacagattctacaccgtgatcaacaaaaagagcggcgagatcgtgcccatggaggtgaacttcaacttcgacgaccccaacctgatcatcctgcctctggcctttggcaagagacagggcagagaattcatctggaacgacctgctgtccctggaaaccggcagcctgaagctggccaacggaagagtgatcgagaagacactgtacaacagaagaacccggcaggatgagcctgccctgttcgtggccctgaccttcgagcggcgggaggtcctggactcctccaatatcaaaccaatgaacctgatcggcgtggcaagaggcgaaaacatccccgccgtgatcgccctgaccgaccccgagggctgcccactgagccggtttaaggatagcctgggaaacccaacccacatcctgagaatcggcgagagctataaggagaagcagcggaccatccaggccaagaaggaggtggagcagcggagagccggcggctacagccggaagtacgccagcaaagccaagaatctggcagacgatatggtgagaaacaccgctagagatctgctgtactacgccgtgacccaggatgccatgctgatcttcgccaacctgagccggggcttcggccggcagggcaagcggaccttcatggccgagagacagtacacacggatggaggactggctgaccgccaagctggcctacgagggcctgagcaagacctacctgtccaagacactggcccagtacacctccaagacatgcagcaactgtgggtttaccatcaccagcgccgactacgacagggtgctggagaagctgaagaagacagcaacaggctggatgaccacaattaacggcaaggagctgaaggtggagggccagattacctactacaacagatacaagagacagaacgtagtcaaggacctgtccgtcgagctggatagactgagcgaagaatctgtgaacaacgacatctcctcctggacaaagggcagaagcggagaagctctgagcctcctgaagaaaagattctcccatagacccgtgcaggagaagttcgtgtgcctgaactgcggcttcgagacacacgcagccgagcaagccgccctgaacatcgccagatcctggctgttcctgcggagccaggagtacaagaaataccagacaaacaagacaaccggcaacaccgataagagagccttcgtcgagacctggcagtccttttaccggaagaagcttaaggaggtgtggaaacctgccgtgcggtctggcggatctggcggaggctcctatgctgcagaccgcctggccccagaggctgagcaggaacctgtggttccaggagagcgtggccttcgaggacgtggccgtgtacttcacccagaaccagtgggccagcctggaccccgcccagagggccctgtacagggaggtgatgctggagaactacgccaacgtgaccagcctggtggccttccccttccccaagcccgccctgatcagccacctggagaagggcgaggccccctggggcggatctggctccggcagcggccccaagaaaaagagaaaagtctaagctgccttctgcggggcttgccttctggccatgcccttcttctctcccttgcacctgtacctcttggtctttgaataaagcctgagtaggaaggctagcaaaaaaaaaaaaaaaaaaaaaaaaaaaaaaaaaaaaaaaaaaaaaaaaaaaaaaaaaaaaaaaaaaaaaaaaaaaaaaaa

SEQ ID NO: 16790 - RNA, 9485 nt, synthetic construct
  source 1..9485: mol_type = other RNA
aggaaataagagagaaaagaagagtaagaagaaatataagagccaccatggcccctaagaagaagcgtaaagtgagccggatggaacgcctcgtctacgaggtgcggcagaagtgcagaaacatcgaggacatctgcatctcctgcggatctctgaacgtgaccctggagcacccactgttcatcggcggcatgtgccagaactgtaaaaactgttttctggagtgtgcctatcaatacgacgatgacggctaccagagctactgcaccatctgttgcggcggaagagaggtgctgatgtgtggaaataacaactgctgccggtgcttctgcgtggaatgcgtggacctgctggtgggccccggcgccgcccaggccgctattaaggaagatccttggaactgctacatgtgcggccacaagggcacatacggcctgctgagacggagagaggactggcctagcagactgcagatgttcttcgccaataaccacgaccaggagttcgacccccctaaggtgtaccctcccgtccccgccgagaagagaaagcccatccgggtcctgagcctgttcgatggcatcgccaccggtctgctggtgctgaaggacctgggcatccaggtggataggtacattgcctccgaggtgtgcgaggactccatcaccgtgggaatggtgcgtcatcagggcaagatcatgtacgtgggcgacgtgcggagcgtgacacagaagcatatccaggagtggggccctttcgacctggtgatcggcggcagcccttgcaatgacctgagcatcgtgaacccagcccggaagggcctgtacgagggaaccggcagactgttcttcgagttttacagactgctgcacgacgcccggcctaaggaaggcgacgaccggcccttcttttggctgttcgagaatgtggtggccatgggagtcagcgacaagcgggatattagccggttcctggagagcaaccccgtgatgatcgatgccaaggaagtgagcgccgcccaccgggccagatacttctggggcaatctgcctggcatgaacagacccctggccagcaccgtgaacgacaagctggagctgcaggagtgcctggagcacggccggatcgccaagttcagcaaggtgagaaccatcaccacccgaagcaacagcatcaaacaaggcaaggaccagcactttcctgtgttcatgaacgagaaggaggacatcctgtggtgtaccgagatggagagagtgttcgggttcccagtccactacacagatgtcagcaacatgtctagactggccagacagagactgctgggaagaagctggtccgtccctgtgatcagacacctgttcgcccctctgaaggagtacttcgcctgcgtgagcagcggcaacagcaacgccaacagccggggccccagcttctctagcggcctggtgccactgtccctgagagggagccacatgggccccatggagatctacaaaaccgtgagcgcctggaagcggcagcctgtgcgcgtgctgagcctgtttcggaatatcgataaagtcctgaaaagcctgggattcctggagagcggctctggctccggcggtggcaccctgaagtacgtggaggatgtgacaaacgtggtcagacgggatgtggagaagtggggccccttcgatctggtgtacggcagcacccaacccctgggcagctcttgtgaccggtgccctggctggtacatgtttcagttccaccggatcctgcagtacgccctgccgagacaggagtcccagcggccattcttttggattttcatggacaacttgctgctgaccgaggatgaccaggaaactaccactcggttcctgcagaccgaagccgtgaccctgcaggacgtgagaggccgggactaccagaacgccatgcgggtgtggtccaacatccctggactgaaaagcaagcacgcacctctgacccctaaagaagaggagtacctgcaggcccaggtgcggagcagaagcaagctggacgcccctaaggtggatctgctggtgaagaattgcctcctgcccctgagagagtacttcaagtatttcagccagaatagtctgcccctgggaggcagcggcggcggcgccctggtgacatttgaggacgtcgccgtgcggttcacccaggaggaatgggctctgctggatccttctcagaaaatcctgtaccgggacgtgatgagagagacataccggaatctgacctccgtgggcatcaactgggaatgttgggaccttgaagcctgcttcagaagcctgggaagaaacctgagagtgcaggtggtgaagagaaagtgcgagctgaccaacagcggcccctgcgccgagggcggcccaagcagcggcgcccctcctcccagcggcggcagcccagccggctccccaacctctaccgaggagggcacctctgagtccgccacccccgagagcggccctggcacctccaccgagcccagcgagggcagcgcacccggcagccctgccggcagccccacctccacagaggagggaaccagcaccgagcccagcgaaggcagcgccccaggcaccagcaccgagcctagtgagcaggagattaaacggatcaacaagatcagaagaagacttgtgaaagacagcaacaccaagaaggccggcaagacaggccccatgaaaaccctgctggttagagtgatgacacccgatctgagagagcggctggaaaacctgagaaagaagcctgaaaatatcccccagcccatcagcaatacatctagagccaacctgaataagctgctgaccgattacaccgaaatgaagaaggcgatcctgcatgtgtactgggaagagttccagaaggaccctgtgggcctgatgagccgggtggcccagcctgccagcaagaagatcgatcagaacaagctgaaacctgagatggacgagaagggcaacctgaccaccgccggctttgcctgctctcagtgtggccagcccctgttcgtgtacaagctggagcaggtgtctgagaagggcaaggcttacaccaactacttcggacggtgcaatgtggccgagcacgaaaagctgatcctgctggcccagctgaagcccgagaaggatagcgacgaagccgtgacatatagcctgggaaagtttgggcagagggccctggatttctacagcattcatgtgaccaaggagtccacccaccccgtgaagcccctggcccagatcgccggaaacagatacgcctccggacctgtgggaaaggccctgagcgacgcatgtatgggcacaatcgcctccttcctgtctaagtaccaggacatcatcatcgaacaccagaaggtggtgaagggcaaccagaagagactggagagcctgcgggagctggccggcaaggaaaacctggaataccctagcgtgaccctgccacctcagcctcacaccaaggagggcgttgatgcctacaacgaagtgatcgcccgggtgcgaatgtgggtgaacctgaacctgtggcagaagctgaagctaagcagagatgatgccaagcctctgctgagactgaagggattcccttcctttcctctggtcgagagacaggccaacgaagtggactggtgggacatggtgtgtaacgtgaagaagctgatcaacgagaaaaaggaggatggcaaggtgttttggcagaatctggctggctacaagagacaggaagccctgagaccatacctgagcagcgaggaagatcggaagaagggaaagaaattcgctcggtaccagctgggcgacctgctgctgcacctggaaaagaagcacggcgaggactggggaaaggtgtacgacgaggcctgggagcggattgacaagaaagtggaaggcctgagcaagcacatcaagctggaagaggaacggagaagcgaggacgcccagagcaaggccgccctgaccgactggctgcgggctaaggccagcttcgtgatcgagggcctgaaggaggccgacaaggacgagttctgcagatgcgagctgaagctgcagaagtggtacggggacctgcggggaaagcccttcgccatcgaagccgagaacagcatcctggacatcagcggcttcagcaagcagtacaactgtgccttcatctggcagaaggacggcgtgaagaagctgaacctgtacctgatcatcaactacttcaagggcggcaagctgcggttcaagaagatcaaacctgaagccttcgaagccaacagattctacaccgtgatcaacaaaaagagcggcgagatcgtgcccatggaggtgaacttcaacttcgacgaccccaacctgatcatcctgcctctggcctttggcaagagacagggcagagaattcatctggaacgacctgctgtccctggaaaccggcagcctgaagctggccaacggaagagtgatcgagaagacactgtacaacagaagaacccggcaggatgagcctgccctgttcgtggccctgaccttcgagcggcgggaggtcctggactcctccaatatcaaaccaatgaacctgatcggcgtggcaagaggcgaaaacatccccgccgtgatcgccctgaccgaccccgagggctgcccactgagccggtttaaggatagcctgggaaacccaacccacatcctgagaatcggcgagagctataaggagaagcagcggaccatccaggccaagaaggaggtggagcagcggagagccggcggctacagccggaagtacgccagcaaagccaagaatctggcagacgatatggtgagaaacaccgctagagatctgctgtactacgccgtgacccaggatgccatgctgatcttcgccaacctgagccggggcttcggccggcagggcaagcggaccttcatggccgagagacagtacacacggatggaggactggctgaccgccaagctggcctacgagggcctgagcaagacctacctgtccaagacactggcccagtacacctccaagacatgcagcaactgtgggtttaccatcaccagcgccgactacgacagggtgctggagaagctgaagaagacagcaacaggctggatgaccacaattaacggcaaggagctgaaggtggagggccagattacctactacaacagatacaagagacagaacgtagtcaaggacctgtccgtcgagctggatagactgagcgaagaatctgtgaacaacgacatctcctcctggacaaagggcagaagcggagaagctctgagcctcctgaagaaaagattctcccatagacccgtgcaggagaagttcgtgtgcctgaactgcggcttcgagacacacgcagccgagcaagccgccctgaacatcgccagatcctggctgttcctgcggagccaggagtacaagaaataccagacaaacaagacaaccggcaacaccgataagagagccttcgtcgagacctggcagtccttttaccggaagaagcttaaggaggtgtggaaacctgccgtgcggtctggcggatctggcggaggctccatggagcccctgaagttcagggacgtggccatcgagttcagcctggaggagtggcagtgcctggacagcatccagcagaacctgtacaggaacgtgatgctggagaactacaggaacctggtgttcctgggcatcgccgccagcaagcccgacctgatcatctgcctggagcaggagaaggagccctggagcaggaagaggaggaggatggtggccgagctgcccgtgatctgcagccacttcggcggcccaagcagcggcgcccctcctcccagcggcggcagcccagccggctccccaacctctaccgaggagggcacctctgagtccgccacccccgagagcggccctggcacctccaccgagcccagcgagggcagcgcacccggcagccctgccggcagccccacctccacagaggagggaaccagcaccgagcccagcgaaggcagcgccccaggcaccagcaccgagcctagtgagcaggagattaaacggatcaacaagatcagaagaagacttgtgaaagacagcaacaccaagaaggccggcaagacaggccccatgaaaaccctgctggttagagtgatgacacccgatctgagagagcggctggaaaacctgagaaagaagcctgaaaatatcccccagcccatcagcaatacatctagagccaacctgaataagctgctgaccgattacaccgaaatgaagaaggcgatcctgcatgtgtactgggaagagttccagaaggaccctgtgggcctgatgagccgggtggcccagcctgccagcaagaagatcgatcagaacaagctgaaacctgagatggacgagaagggcaacctgaccaccgccggctttgcctgctctcagtgtggccagcccctgttcgtgtacaagctggagcaggtgtctgagaagggcaaggcttacaccaactacttcggacggtgcaatgtggccgagcacgaaaagctgatcctgctggcccagctgaagcccgagaaggatagcgacgaagccgtgacatatagcctgggaaagtttgggcagagggccctggatttctacagcattcatgtgaccaaggagtccacccaccccgtgaagcccctggcccagatcgccggaaacagatacgcctccggacctgtgggaaaggccctgagcgacgcatgtatgggcacaatcgcctccttcctgtctaagtaccaggacatcatcatcgaacaccagaaggtggtgaagggcaaccagaagagactggagagcctgcgggagctggccggcaaggaaaacctggaataccctagcgtgaccctgccacctcagcctcacaccaaggagggcgttgatgcctacaacgaagtgatcgcccgggtgcgaatgtgggtgaacctgaacctgtggcagaagctgaagctaagcagagatgatgccaagcctctgctgagactgaagggattcccttcctttcctctggtcgagagacaggccaacgaagtggactggtgggacatggtgtgtaacgtgaagaagctgatcaacgagaaaaaggaggatggcaaggtgttttggcagaatctggctggctacaagagacaggaagccctgagaccatacctgagcagcgaggaagatcggaagaagggaaagaaattcgctcggtaccagctgggcgacctgctgctgcacctggaaaagaagcacggcgaggactggggaaaggtgtacgacgaggcctgggagcggattgacaagaaagtggaaggcctgagcaagcacatcaagctggaagaggaacggagaagcgaggacgcccagagcaaggccgccctgaccgactggctgcgggctaaggccagcttcgtgatcgagggcctgaaggaggccgacaaggacgagttctgcagatgcgagctgaagctgcagaagtggtacggggacctgcggggaaagcccttcgccatcgaagccgagaacagcatcctggacatcagcggcttcagcaagcagtacaactgtgccttcatctggcagaaggacggcgtgaagaagctgaacctgtacctgatcatcaactacttcaagggcggcaagctgcggttcaagaagatcaaacctgaagccttcgaagccaacagattctacaccgtgatcaacaaaaagagcggcgagatcgtgcccatggaggtgaacttcaacttcgacgaccccaacctgatcatcctgcctctggcctttggcaagagacagggcagagaattcatctggaacgacctgctgtccctggaaaccggcagcctgaagctggccaacggaagagtgatcgagaagacactgtacaacagaagaacccggcaggatgagcctgccctgttcgtggccctgaccttcgagcggcgggaggtcctggactcctccaatatcaaaccaatgaacctgatcggcgtggcaagaggcgaaaacatccccgccgtgatcgccctgaccgaccccgagggctgcccactgagccggtttaaggatagcctgggaaacccaacccacatcctgagaatcggcgagagctataaggagaagcagcggaccatccaggccaagaaggaggtggagcagcggagagccggcggctacagccggaagtacgccagcaaagccaagaatctggcagacgatatggtgagaaacaccgctagagatctgctgtactacgccgtgacccaggatgccatgctgatcttcgccaacctgagccggggcttcggccggcagggcaagcggaccttcatggccgagagacagtacacacggatggaggactggctgaccgccaagctggcctacgagggcctgagcaagacctacctgtccaagacactggcccagtacacctccaagacatgcagcaactgtgggtttaccatcaccagcgccgactacgacagggtgctggagaagctgaagaagacagcaacaggctggatgaccacaattaacggcaaggagctgaaggtggagggccagattacctactacaacagatacaagagacagaacgtagtcaaggacctgtccgtcgagctggatagactgagcgaagaatctgtgaacaacgacatctcctcctggacaaagggcagaagcggagaagctctgagcctcctgaagaaaagattctcccatagacccgtgcaggagaagttcgtgtgcctgaactgcggcttcgagacacacgcagccgagcaagccgccctgaacatcgccagatcctggctgttcctgcggagccaggagtacaagaaataccagacaaacaagacaaccggcaacaccgataagagagccttcgtcgagacctggcagtccttttaccggaagaagcttaaggaggtgtggaaacctgccgtgcggtctggcggatctggcggaggctcctatggagcccctgaagttcagggacgtggccatcgagttcagcctggaggagtggcagtgcctggacagcatccagcagaacctgtacaggaacgtgatgctggagaactacaggaacctggtgttcctgggcatcgccgccagcaagcccgacctgatcatctgcctggagcaggagaaggagccctggagcaggaagaggaggaggatggtggccgagctgcccgtgatctgcagccacttcggatctggctccggcagcggccccaagaaaaagagaaaagtctaagctgccttctgcggggcttgccttctggccatgcccttcttctctcccttgcacctgtacctcttggtctttgaataaagcctgagtaggaaggctagcaaaaaaaaaaaaaaaaaaaaaaaaaaaaaaaaaaaaaaaaaaaaaaaaaaaaaaaaaaaaaaaaaaaaaaaaaaaaaaaa

SEQ ID NO: 16791 - RNA, 9485 nt, synthetic construct
  source 1..9485: mol_type = other RNA
aggaaataagagagaaaagaagagtaagaagaaatataagagccaccatggcccctaagaagaagcgtaaagtgagccggatggaacgcctcgtctacgaggtgcggcagaagtgcagaaacatcgaggacatctgcatctcctgcggatctctgaacgtgaccctggagcacccactgttcatcggcggcatgtgccagaactgtaaaaactgttttctggagtgtgcctatcaatacgacgatgacggctaccagagctactgcaccatctgttgcggcggaagagaggtgctgatgtgtggaaataacaactgctgccggtgcttctgcgtggaatgcgtggacctgctggtgggccccggcgccgcccaggccgctattaaggaagatccttggaactgctacatgtgcggccacaagggcacatacggcctgctgagacggagagaggactggcctagcagactgcagatgttcttcgccaataaccacgaccaggagttcgacccccctaaggtgtaccctcccgtccccgccgagaagagaaagcccatccgggtcctgagcctgttcgatggcatcgccaccggtctgctggtgctgaaggacctgggcatccaggtggataggtacattgcctccgaggtgtgcgaggactccatcaccgtgggaatggtgcgtcatcagggcaagatcatgtacgtgggcgacgtgcggagcgtgacacagaagcatatccaggagtggggccctttcgacctggtgatcggcggcagcccttgcaatgacctgagcatcgtgaacccagcccggaagggcctgtacgagggaaccggcagactgttcttcgagttttacagactgctgcacgacgcccggcctaaggaaggcgacgaccggcccttcttttggctgttcgagaatgtggtggccatgggagtcagcgacaagcgggatattagccggttcctggagagcaaccccgtgatgatcgatgccaaggaagtgagcgccgcccaccgggccagatacttctggggcaatctgcctggcatgaacagacccctggccagcaccgtgaacgacaagctggagctgcaggagtgcctggagcacggccggatcgccaagttcagcaaggtgagaaccatcaccacccgaagcaacagcatcaaacaaggcaaggaccagcactttcctgtgttcatgaacgagaaggaggacatcctgtggtgtaccgagatggagagagtgttcgggttcccagtccactacacagatgtcagcaacatgtctagactggccagacagagactgctgggaagaagctggtccgtccctgtgatcagacacctgttcgcccctctgaaggagtacttcgcctgcgtgagcagcggcaacagcaacgccaacagccggggccccagcttctctagcggcctggtgccactgtccctgagagggagccacatgggccccatggagatctacaaaaccgtgagcgcctggaagcggcagcctgtgcgcgtgctgagcctgtttcggaatatcgataaagtcctgaaaagcctgggattcctggagagcggctctggctccggcggtggcaccctgaagtacgtggaggatgtgacaaacgtggtcagacgggatgtggagaagtggggccccttcgatctggtgtacggcagcacccaacccctgggcagctcttgtgaccggtgccctggctggtacatgtttcagttccaccggatcctgcagtacgccctgccgagacaggagtcccagcggccattcttttggattttcatggacaacttgctgctgaccgaggatgaccaggaaactaccactcggttcctgcagaccgaagccgtgaccctgcaggacgtgagaggccgggactaccagaacgccatgcgggtgtggtccaacatccctggactgaaaagcaagcacgcacctctgacccctaaagaagaggagtacctgcaggcccaggtgcggagcagaagcaagctggacgcccctaaggtggatctgctggtgaagaattgcctcctgcccctgagagagtacttcaagtatttcagccagaatagtctgcccctgggaggcagcggcggcggcgccctggtgacatttgaggacgtcgccgtgcggttcacccaggaggaatgggctctgctggatccttctcagaaaatcctgtaccgggacgtgatgagagagacataccggaatctgacctccgtgggcatcaactgggaatgttgggaccttgaagcctgcttcagaagcctgggaagaaacctgagagtgcaggtggtgaagagaaagtgcgagctgaccaacagcggcccctgcgccgagggcggcccaagcagcggcgcccctcctcccagcggcggcagcccagccggctccccaacctctaccgaggagggcacctctgagtccgccacccccgagagcggccctggcacctccaccgagcccagcgagggcagcgcacccggcagccctgccggcagccccacctccacagaggagggaaccagcaccgagcccagcgaaggcagcgccccaggcaccagcaccgagcctagtgagcaggagattaaacggatcaacaagatcagaagaagacttgtgaaagacagcaacaccaagaaggccggcaagacaggccccatgaaaaccctgctggttagagtgatgacacccgatctgagagagcggctggaaaacctgagaaagaagcctgaaaatatcccccagcccatcagcaatacatctagagccaacctgaataagctgctgaccgattacaccgaaatgaagaaggcgatcctgcatgtgtactgggaagagttccagaaggaccctgtgggcctgatgagccgggtggcccagcctgccagcaagaagatcgatcagaacaagctgaaacctgagatggacgagaagggcaacctgaccaccgccggctttgcctgctctcagtgtggccagcccctgttcgtgtacaagctggagcaggtgtctgagaagggcaaggcttacaccaactacttcggacggtgcaatgtggccgagcacgaaaagctgatcctgctggcccagctgaagcccgagaaggatagcgacgaagccgtgacatatagcctgggaaagtttgggcagagggccctggatttctacagcattcatgtgaccaaggagtccacccaccccgtgaagcccctggcccagatcgccggaaacagatacgcctccggacctgtgggaaaggccctgagcgacgcatgtatgggcacaatcgcctccttcctgtctaagtaccaggacatcatcatcgaacaccagaaggtggtgaagggcaaccagaagagactggagagcctgcgggagctggccggcaaggaaaacctggaataccctagcgtgaccctgccacctcagcctcacaccaaggagggcgttgatgcctacaacgaagtgatcgcccgggtgcgaatgtgggtgaacctgaacctgtggcagaagctgaagctaagcagagatgatgccaagcctctgctgagactgaagggattcccttcctttcctctggtcgagagacaggccaacgaagtggactggtgggacatggtgtgtaacgtgaagaagctgatcaacgagaaaaaggaggatggcaaggtgttttggcagaatctggctggctacaagagacaggaagccctgagaccatacctgagcagcgaggaagatcggaagaagggaaagaaattcgctcggtaccagctgggcgacctgctgctgcacctggaaaagaagcacggcgaggactggggaaaggtgtacgacgaggcctgggagcggattgacaagaaagtggaaggcctgagcaagcacatcaagctggaagaggaacggagaagcgaggacgcccagagcaaggccgccctgaccgactggctgcgggctaaggccagcttcgtgatcgagggcctgaaggaggccgacaaggacgagttctgcagatgcgagctgaagctgcagaagtggtacggggacctgcggggaaagcccttcgccatcgaagccgagaacagcatcctggacatcagcggcttcagcaagcagtacaactgtgccttcatctggcagaaggacggcgtgaagaagctgaacctgtacctgatcatcaactacttcaagggcggcaagctgcggttcaagaagatcaaacctgaagccttcgaagccaacagattctacaccgtgatcaacaaaaagagcggcgagatcgtgcccatggaggtgaacttcaacttcgacgaccccaacctgatcatcctgcctctggcctttggcaagagacagggcagagaattcatctggaacgacctgctgtccctggaaaccggcagcctgaagctggccaacggaagagtgatcgagaagacactgtacaacagaagaacccggcaggatgagcctgccctgttcgtggccctgaccttcgagcggcgggaggtcctggactcctccaatatcaaaccaatgaacctgatcggcgtggcaagaggcgaaaacatccccgccgtgatcgccctgaccgaccccgagggctgcccactgagccggtttaaggatagcctgggaaacccaacccacatcctgagaatcggcgagagctataaggagaagcagcggaccatccaggccaagaaggaggtggagcagcggagagccggcggctacagccggaagtacgccagcaaagccaagaatctggcagacgatatggtgagaaacaccgctagagatctgctgtactacgccgtgacccaggatgccatgctgatcttcgccaacctgagccggggcttcggccggcagggcaagcggaccttcatggccgagagacagtacacacggatggaggactggctgaccgccaagctggcctacgagggcctgagcaagacctacctgtccaagacactggcccagtacacctccaagacatgcagcaactgtgggtttaccatcaccagcgccgactacgacagggtgctggagaagctgaagaagacagcaacaggctggatgaccacaattaacggcaaggagctgaaggtggagggccagattacctactacaacagatacaagagacagaacgtagtcaaggacctgtccgtcgagctggatagactgagcgaagaatctgtgaacaacgacatctcctcctggacaaagggcagaagcggagaagctctgagcctcctgaagaaaagattctcccatagacccgtgcaggagaagttcgtgtgcctgaactgcggcttcgagacacacgcagccgagcaagccgccctgaacatcgccagatcctggctgttcctgcggagccaggagtacaagaaataccagacaaacaagacaaccggcaacaccgataagagagccttcgtcgagacctggcagtccttttaccggaagaagcttaaggaggtgtggaaacctgccgtgcggtctggcggatctggcggaggctccatggagagcgtgagcttcgaggacgtggccgtgaacttcacccccgaggagtgggccctgctgaacagcagccagaagaggctgcacagggacgtgatgcaggagaacttcaggaacctggccgccatcgccaagaaccaggaggaccccaccctggaggacgactacgagtacctgaggaagatcctgcccttcgccgtgcagaccggctacaggctgtgcgagaaccaggactacgccgagggcggcccaagcagcggcgcccctcctcccagcggcggcagcccagccggctccccaacctctaccgaggagggcacctctgagtccgccacccccgagagcggccctggcacctccaccgagcccagcgagggcagcgcacccggcagccctgccggcagccccacctccacagaggagggaaccagcaccgagcccagcgaaggcagcgccccaggcaccagcaccgagcctagtgagcaggagattaaacggatcaacaagatcagaagaagacttgtgaaagacagcaacaccaagaaggccggcaagacaggccccatgaaaaccctgctggttagagtgatgacacccgatctgagagagcggctggaaaacctgagaaagaagcctgaaaatatcccccagcccatcagcaatacatctagagccaacctgaataagctgctgaccgattacaccgaaatgaagaaggcgatcctgcatgtgtactgggaagagttccagaaggaccctgtgggcctgatgagccgggtggcccagcctgccagcaagaagatcgatcagaacaagctgaaacctgagatggacgagaagggcaacctgaccaccgccggctttgcctgctctcagtgtggccagcccctgttcgtgtacaagctggagcaggtgtctgagaagggcaaggcttacaccaactacttcggacggtgcaatgtggccgagcacgaaaagctgatcctgctggcccagctgaagcccgagaaggatagcgacgaagccgtgacatatagcctgggaaagtttgggcagagggccctggatttctacagcattcatgtgaccaaggagtccacccaccccgtgaagcccctggcccagatcgccggaaacagatacgcctccggacctgtgggaaaggccctgagcgacgcatgtatgggcacaatcgcctccttcctgtctaagtaccaggacatcatcatcgaacaccagaaggtggtgaagggcaaccagaagagactggagagcctgcgggagctggccggcaaggaaaacctggaataccctagcgtgaccctgccacctcagcctcacaccaaggagggcgttgatgcctacaacgaagtgatcgcccgggtgcgaatgtgggtgaacctgaacctgtggcagaagctgaagctaagcagagatgatgccaagcctctgctgagactgaagggattcccttcctttcctctggtcgagagacaggccaacgaagtggactggtgggacatggtgtgtaacgtgaagaagctgatcaacgagaaaaaggaggatggcaaggtgttttggcagaatctggctggctacaagagacaggaagccctgagaccatacctgagcagcgaggaagatcggaagaagggaaagaaattcgctcggtaccagctgggcgacctgctgctgcacctggaaaagaagcacggcgaggactggggaaaggtgtacgacgaggcctgggagcggattgacaagaaagtggaaggcctgagcaagcacatcaagctggaagaggaacggagaagcgaggacgcccagagcaaggccgccctgaccgactggctgcgggctaaggccagcttcgtgatcgagggcctgaaggaggccgacaaggacgagttctgcagatgcgagctgaagctgcagaagtggtacggggacctgcggggaaagcccttcgccatcgaagccgagaacagcatcctggacatcagcggcttcagcaagcagtacaactgtgccttcatctggcagaaggacggcgtgaagaagctgaacctgtacctgatcatcaactacttcaagggcggcaagctgcggttcaagaagatcaaacctgaagccttcgaagccaacagattctacaccgtgatcaacaaaaagagcggcgagatcgtgcccatggaggtgaacttcaacttcgacgaccccaacctgatcatcctgcctctggcctttggcaagagacagggcagagaattcatctggaacgacctgctgtccctggaaaccggcagcctgaagctggccaacggaagagtgatcgagaagacactgtacaacagaagaacccggcaggatgagcctgccctgttcgtggccctgaccttcgagcggcgggaggtcctggactcctccaatatcaaaccaatgaacctgatcggcgtggcaagaggcgaaaacatccccgccgtgatcgccctgaccgaccccgagggctgcccactgagccggtttaaggatagcctgggaaacccaacccacatcctgagaatcggcgagagctataaggagaagcagcggaccatccaggccaagaaggaggtggagcagcggagagccggcggctacagccggaagtacgccagcaaagccaagaatctggcagacgatatggtgagaaacaccgctagagatctgctgtactacgccgtgacccaggatgccatgctgatcttcgccaacctgagccggggcttcggccggcagggcaagcggaccttcatggccgagagacagtacacacggatggaggactggctgaccgccaagctggcctacgagggcctgagcaagacctacctgtccaagacactggcccagtacacctccaagacatgcagcaactgtgggtttaccatcaccagcgccgactacgacagggtgctggagaagctgaagaagacagcaacaggctggatgaccacaattaacggcaaggagctgaaggtggagggccagattacctactacaacagatacaagagacagaacgtagtcaaggacctgtccgtcgagctggatagactgagcgaagaatctgtgaacaacgacatctcctcctggacaaagggcagaagcggagaagctctgagcctcctgaagaaaagattctcccatagacccgtgcaggagaagttcgtgtgcctgaactgcggcttcgagacacacgcagccgagcaagccgccctgaacatcgccagatcctggctgttcctgcggagccaggagtacaagaaataccagacaaacaagacaaccggcaacaccgataagagagccttcgtcgagacctggcagtccttttaccggaagaagcttaaggaggtgtggaaacctgccgtgcggtctggcggatctggcggaggctcctatggagagcgtgagcttcgaggacgtggccgtgaacttcacccccgaggagtgggccctgctgaacagcagccagaagaggctgcacagggacgtgatgcaggagaacttcaggaacctggccgccatcgccaagaaccaggaggaccccaccctggaggacgactacgagtacctgaggaagatcctgcccttcgccgtgcagaccggctacaggctgtgcgagaaccaggactacgccgagggatctggctccggcagcggccccaagaaaaagagaaaagtctaagctgccttctgcggggcttgccttctggccatgcccttcttctctcccttgcacctgtacctcttggtctttgaataaagcctgagtaggaaggctagcaaaaaaaaaaaaaaaaaaaaaaaaaaaaaaaaaaaaaaaaaaaaaaaaaaaaaaaaaaaaaaaaaaaaaaaaaaaaaaaa

SEQ ID NO: 16792 - RNA, 9485 nt, synthetic construct
  source 1..9485: mol_type = other RNA
aggaaataagagagaaaagaagagtaagaagaaatataagagccaccatggcccctaagaagaagcgtaaagtgagccggatggaacgcctcgtctacgaggtgcggcagaagtgcagaaacatcgaggacatctgcatctcctgcggatctctgaacgtgaccctggagcacccactgttcatcggcggcatgtgccagaactgtaaaaactgttttctggagtgtgcctatcaatacgacgatgacggctaccagagctactgcaccatctgttgcggcggaagagaggtgctgatgtgtggaaataacaactgctgccggtgcttctgcgtggaatgcgtggacctgctggtgggccccggcgccgcccaggccgctattaaggaagatccttggaactgctacatgtgcggccacaagggcacatacggcctgctgagacggagagaggactggcctagcagactgcagatgttcttcgccaataaccacgaccaggagttcgacccccctaaggtgtaccctcccgtccccgccgagaagagaaagcccatccgggtcctgagcctgttcgatggcatcgccaccggtctgctggtgctgaaggacctgggcatccaggtggataggtacattgcctccgaggtgtgcgaggactccatcaccgtgggaatggtgcgtcatcagggcaagatcatgtacgtgggcgacgtgcggagcgtgacacagaagcatatccaggagtggggccctttcgacctggtgatcggcggcagcccttgcaatgacctgagcatcgtgaacccagcccggaagggcctgtacgagggaaccggcagactgttcttcgagttttacagactgctgcacgacgcccggcctaaggaaggcgacgaccggcccttcttttggctgttcgagaatgtggtggccatgggagtcagcgacaagcgggatattagccggttcctggagagcaaccccgtgatgatcgatgccaaggaagtgagcgccgcccaccgggccagatacttctggggcaatctgcctggcatgaacagacccctggccagcaccgtgaacgacaagctggagctgcaggagtgcctggagcacggccggatcgccaagttcagcaaggtgagaaccatcaccacccgaagcaacagcatcaaacaaggcaaggaccagcactttcctgtgttcatgaacgagaaggaggacatcctgtggtgtaccgagatggagagagtgttcgggttcccagtccactacacagatgtcagcaacatgtctagactggccagacagagactgctgggaagaagctggtccgtccctgtgatcagacacctgttcgcccctctgaaggagtacttcgcctgcgtgagcagcggcaacagcaacgccaacagccggggccccagcttctctagcggcctggtgccactgtccctgagagggagccacatgggccccatggagatctacaaaaccgtgagcgcctggaagcggcagcctgtgcgcgtgctgagcctgtttcggaatatcgataaagtcctgaaaagcctgggattcctggagagcggctctggctccggcggtggcaccctgaagtacgtggaggatgtgacaaacgtggtcagacgggatgtggagaagtggggccccttcgatctggtgtacggcagcacccaacccctgggcagctcttgtgaccggtgccctggctggtacatgtttcagttccaccggatcctgcagtacgccctgccgagacaggagtcccagcggccattcttttggattttcatggacaacttgctgctgaccgaggatgaccaggaaactaccactcggttcctgcagaccgaagccgtgaccctgcaggacgtgagaggccgggactaccagaacgccatgcgggtgtggtccaacatccctggactgaaaagcaagcacgcacctctgacccctaaagaagaggagtacctgcaggcccaggtgcggagcagaagcaagctggacgcccctaaggtggatctgctggtgaagaattgcctcctgcccctgagagagtacttcaagtatttcagccagaatagtctgcccctgggaggcagcggcggcggcgccctggtgacatttgaggacgtcgccgtgcggttcacccaggaggaatgggctctgctggatccttctcagaaaatcctgtaccgggacgtgatgagagagacataccggaatctgacctccgtgggcatcaactgggaatgttgggaccttgaagcctgcttcagaagcctgggaagaaacctgagagtgcaggtggtgaagagaaagtgcgagctgaccaacagcggcccctgcgccgagggcggcccaagcagcggcgcccctcctcccagcggcggcagcccagccggctccccaacctctaccgaggagggcacctctgagtccgccacccccgagagcggccctggcacctccaccgagcccagcgagggcagcgcacccggcagccctgccggcagccccacctccacagaggagggaaccagcaccgagcccagcgaaggcagcgccccaggcaccagcaccgagcctagtgagcaggagattaaacggatcaacaagatcagaagaagacttgtgaaagacagcaacaccaagaaggccggcaagacaggccccatgaaaaccctgctggttagagtgatgacacccgatctgagagagcggctggaaaacctgagaaagaagcctgaaaatatcccccagcccatcagcaatacatctagagccaacctgaataagctgctgaccgattacaccgaaatgaagaaggcgatcctgcatgtgtactgggaagagttccagaaggaccctgtgggcctgatgagccgggtggcccagcctgccagcaagaagatcgatcagaacaagctgaaacctgagatggacgagaagggcaacctgaccaccgccggctttgcctgctctcagtgtggccagcccctgttcgtgtacaagctggagcaggtgtctgagaagggcaaggcttacaccaactacttcggacggtgcaatgtggccgagcacgaaaagctgatcctgctggcccagctgaagcccgagaaggatagcgacgaagccgtgacatatagcctgggaaagtttgggcagagggccctggatttctacagcattcatgtgaccaaggagtccacccaccccgtgaagcccctggcccagatcgccggaaacagatacgcctccggacctgtgggaaaggccctgagcgacgcatgtatgggcacaatcgcctccttcctgtctaagtaccaggacatcatcatcgaacaccagaaggtggtgaagggcaaccagaagagactggagagcctgcgggagctggccggcaaggaaaacctggaataccctagcgtgaccctgccacctcagcctcacaccaaggagggcgttgatgcctacaacgaagtgatcgcccgggtgcgaatgtgggtgaacctgaacctgtggcagaagctgaagctaagcagagatgatgccaagcctctgctgagactgaagggattcccttcctttcctctggtcgagagacaggccaacgaagtggactggtgggacatggtgtgtaacgtgaagaagctgatcaacgagaaaaaggaggatggcaaggtgttttggcagaatctggctggctacaagagacaggaagccctgagaccatacctgagcagcgaggaagatcggaagaagggaaagaaattcgctcggtaccagctgggcgacctgctgctgcacctggaaaagaagcacggcgaggactggggaaaggtgtacgacgaggcctgggagcggattgacaagaaagtggaaggcctgagcaagcacatcaagctggaagaggaacggagaagcgaggacgcccagagcaaggccgccctgaccgactggctgcgggctaaggccagcttcgtgatcgagggcctgaaggaggccgacaaggacgagttctgcagatgcgagctgaagctgcagaagtggtacggggacctgcggggaaagcccttcgccatcgaagccgagaacagcatcctggacatcagcggcttcagcaagcagtacaactgtgccttcatctggcagaaggacggcgtgaagaagctgaacctgtacctgatcatcaactacttcaagggcggcaagctgcggttcaagaagatcaaacctgaagccttcgaagccaacagattctacaccgtgatcaacaaaaagagcggcgagatcgtgcccatggaggtgaacttcaacttcgacgaccccaacctgatcatcctgcctctggcctttggcaagagacagggcagagaattcatctggaacgacctgctgtccctggaaaccggcagcctgaagctggccaacggaagagtgatcgagaagacactgtacaacagaagaacccggcaggatgagcctgccctgttcgtggccctgaccttcgagcggcgggaggtcctggactcctccaatatcaaaccaatgaacctgatcggcgtggcaagaggcgaaaacatccccgccgtgatcgccctgaccgaccccgagggctgcccactgagccggtttaaggatagcctgggaaacccaacccacatcctgagaatcggcgagagctataaggagaagcagcggaccatccaggccaagaaggaggtggagcagcggagagccggcggctacagccggaagtacgccagcaaagccaagaatctggcagacgatatggtgagaaacaccgctagagatctgctgtactacgccgtgacccaggatgccatgctgatcttcgccaacctgagccggggcttcggccggcagggcaagcggaccttcatggccgagagacagtacacacggatggaggactggctgaccgccaagctggcctacgagggcctgagcaagacctacctgtccaagacactggcccagtacacctccaagacatgcagcaactgtgggtttaccatcaccagcgccgactacgacagggtgctggagaagctgaagaagacagcaacaggctggatgaccacaattaacggcaaggagctgaaggtggagggccagattacctactacaacagatacaagagacagaacgtagtcaaggacctgtccgtcgagctggatagactgagcgaagaatctgtgaacaacgacatctcctcctggacaaagggcagaagcggagaagctctgagcctcctgaagaaaagattctcccatagacccgtgcaggagaagttcgtgtgcctgaactgcggcttcgagacacacgcagccgagcaagccgccctgaacatcgccagatcctggctgttcctgcggagccaggagtacaagaaataccagacaaacaagacaaccggcaacaccgataagagagccttcgtcgagacctggcagtccttttaccggaagaagcttaaggaggtgtggaaacctgccgtgcggtctggcggatctggcggaggctccaccccccagaccctgaagcccagggcccccggcgcctgcagcagggccaggagccccggccccggcatccaggacagcgacgccgtgggcagcgtgaccttcgaggacgtggccgtgtacttcagctgggaggagtgggccctgctggacgaggcccagaggtgcctgtaccacgacgtgatgctggagaacttcgccctgaccagcagcctgggcggccccaccggcggcggcagggtggtgggcggcccaagcagcggcgcccctcctcccagcggcggcagcccagccggctccccaacctctaccgaggagggcacctctgagtccgccacccccgagagcggccctggcacctccaccgagcccagcgagggcagcgcacccggcagccctgccggcagccccacctccacagaggagggaaccagcaccgagcccagcgaaggcagcgccccaggcaccagcaccgagcctagtgagcaggagattaaacggatcaacaagatcagaagaagacttgtgaaagacagcaacaccaagaaggccggcaagacaggccccatgaaaaccctgctggttagagtgatgacacccgatctgagagagcggctggaaaacctgagaaagaagcctgaaaatatcccccagcccatcagcaatacatctagagccaacctgaataagctgctgaccgattacaccgaaatgaagaaggcgatcctgcatgtgtactgggaagagttccagaaggaccctgtgggcctgatgagccgggtggcccagcctgccagcaagaagatcgatcagaacaagctgaaacctgagatggacgagaagggcaacctgaccaccgccggctttgcctgctctcagtgtggccagcccctgttcgtgtacaagctggagcaggtgtctgagaagggcaaggcttacaccaactacttcggacggtgcaatgtggccgagcacgaaaagctgatcctgctggcccagctgaagcccgagaaggatagcgacgaagccgtgacatatagcctgggaaagtttgggcagagggccctggatttctacagcattcatgtgaccaaggagtccacccaccccgtgaagcccctggcccagatcgccggaaacagatacgcctccggacctgtgggaaaggccctgagcgacgcatgtatgggcacaatcgcctccttcctgtctaagtaccaggacatcatcatcgaacaccagaaggtggtgaagggcaaccagaagagactggagagcctgcgggagctggccggcaaggaaaacctggaataccctagcgtgaccctgccacctcagcctcacaccaaggagggcgttgatgcctacaacgaagtgatcgcccgggtgcgaatgtgggtgaacctgaacctgtggcagaagctgaagctaagcagagatgatgccaagcctctgctgagactgaagggattcccttcctttcctctggtcgagagacaggccaacgaagtggactggtgggacatggtgtgtaacgtgaagaagctgatcaacgagaaaaaggaggatggcaaggtgttttggcagaatctggctggctacaagagacaggaagccctgagaccatacctgagcagcgaggaagatcggaagaagggaaagaaattcgctcggtaccagctgggcgacctgctgctgcacctggaaaagaagcacggcgaggactggggaaaggtgtacgacgaggcctgggagcggattgacaagaaagtggaaggcctgagcaagcacatcaagctggaagaggaacggagaagcgaggacgcccagagcaaggccgccctgaccgactggctgcgggctaaggccagcttcgtgatcgagggcctgaaggaggccgacaaggacgagttctgcagatgcgagctgaagctgcagaagtggtacggggacctgcggggaaagcccttcgccatcgaagccgagaacagcatcctggacatcagcggcttcagcaagcagtacaactgtgccttcatctggcagaaggacggcgtgaagaagctgaacctgtacctgatcatcaactacttcaagggcggcaagctgcggttcaagaagatcaaacctgaagccttcgaagccaacagattctacaccgtgatcaacaaaaagagcggcgagatcgtgcccatggaggtgaacttcaacttcgacgaccccaacctgatcatcctgcctctggcctttggcaagagacagggcagagaattcatctggaacgacctgctgtccctggaaaccggcagcctgaagctggccaacggaagagtgatcgagaagacactgtacaacagaagaacccggcaggatgagcctgccctgttcgtggccctgaccttcgagcggcgggaggtcctggactcctccaatatcaaaccaatgaacctgatcggcgtggcaagaggcgaaaacatccccgccgtgatcgccctgaccgaccccgagggctgcccactgagccggtttaaggatagcctgggaaacccaacccacatcctgagaatcggcgagagctataaggagaagcagcggaccatccaggccaagaaggaggtggagcagcggagagccggcggctacagccggaagtacgccagcaaagccaagaatctggcagacgatatggtgagaaacaccgctagagatctgctgtactacgccgtgacccaggatgccatgctgatcttcgccaacctgagccggggcttcggccggcagggcaagcggaccttcatggccgagagacagtacacacggatggaggactggctgaccgccaagctggcctacgagggcctgagcaagacctacctgtccaagacactggcccagtacacctccaagacatgcagcaactgtgggtttaccatcaccagcgccgactacgacagggtgctggagaagctgaagaagacagcaacaggctggatgaccacaattaacggcaaggagctgaaggtggagggccagattacctactacaacagatacaagagacagaacgtagtcaaggacctgtccgtcgagctggatagactgagcgaagaatctgtgaacaacgacatctcctcctggacaaagggcagaagcggagaagctctgagcctcctgaagaaaagattctcccatagacccgtgcaggagaagttcgtgtgcctgaactgcggcttcgagacacacgcagccgagcaagccgccctgaacatcgccagatcctggctgttcctgcggagccaggagtacaagaaataccagacaaacaagacaaccggcaacaccgataagagagccttcgtcgagacctggcagtccttttaccggaagaagcttaaggaggtgtggaaacctgccgtgcggtctggcggatctggcggaggctcctaccccccagaccctgaagcccagggcccccggcgcctgcagcagggccaggagccccggccccggcatccaggacagcgacgccgtgggcagcgtgaccttcgaggacgtggccgtgtacttcagctgggaggagtgggccctgctggacgaggcccagaggtgcctgtaccacgacgtgatgctggagaacttcgccctgaccagcagcctgggcggccccaccggcggcggcagggtggtgggatctggctccggcagcggccccaagaaaaagagaaaagtctaagctgccttctgcggggcttgccttctggccatgcccttcttctctcccttgcacctgtacctcttggtctttgaataaagcctgagtaggaaggctagcaaaaaaaaaaaaaaaaaaaaaaaaaaaaaaaaaaaaaaaaaaaaaaaaaaaaaaaaaaaaaaaaaaaaaaaaaaaaaaaa

SEQ ID NO: 16793 - RNA, 9485 nt, synthetic construct
  source 1..9485: mol_type = other RNA
aggaaataagagagaaaagaagagtaagaagaaatataagagccaccatggcccctaagaagaagcgtaaagtgagccggatggaacgcctcgtctacgaggtgcggcagaagtgcagaaacatcgaggacatctgcatctcctgcggatctctgaacgtgaccctggagcacccactgttcatcggcggcatgtgccagaactgtaaaaactgttttctggagtgtgcctatcaatacgacgatgacggctaccagagctactgcaccatctgttgcggcggaagagaggtgctgatgtgtggaaataacaactgctgccggtgcttctgcgtggaatgcgtggacctgctggtgggccccggcgccgcccaggccgctattaaggaagatccttggaactgctacatgtgcggccacaagggcacatacggcctgctgagacggagagaggactggcctagcagactgcagatgttcttcgccaataaccacgaccaggagttcgacccccctaaggtgtaccctcccgtccccgccgagaagagaaagcccatccgggtcctgagcctgttcgatggcatcgccaccggtctgctggtgctgaaggacctgggcatccaggtggataggtacattgcctccgaggtgtgcgaggactccatcaccgtgggaatggtgcgtcatcagggcaagatcatgtacgtgggcgacgtgcggagcgtgacacagaagcatatccaggagtggggccctttcgacctggtgatcggcggcagcccttgcaatgacctgagcatcgtgaacccagcccggaagggcctgtacgagggaaccggcagactgttcttcgagttttacagactgctgcacgacgcccggcctaaggaaggcgacgaccggcccttcttttggctgttcgagaatgtggtggccatgggagtcagcgacaagcgggatattagccggttcctggagagcaaccccgtgatgatcgatgccaaggaagtgagcgccgcccaccgggccagatacttctggggcaatctgcctggcatgaacagacccctggccagcaccgtgaacgacaagctggagctgcaggagtgcctggagcacggccggatcgccaagttcagcaaggtgagaaccatcaccacccgaagcaacagcatcaaacaaggcaaggaccagcactttcctgtgttcatgaacgagaaggaggacatcctgtggtgtaccgagatggagagagtgttcgggttcccagtccactacacagatgtcagcaacatgtctagactggccagacagagactgctgggaagaagctggtccgtccctgtgatcagacacctgttcgcccctctgaaggagtacttcgcctgcgtgagcagcggcaacagcaacgccaacagccggggccccagcttctctagcggcctggtgccactgtccctgagagggagccacatgggccccatggagatctacaaaaccgtgagcgcctggaagcggcagcctgtgcgcgtgctgagcctgtttcggaatatcgataaagtcctgaaaagcctgggattcctggagagcggctctggctccggcggtggcaccctgaagtacgtggaggatgtgacaaacgtggtcagacgggatgtggagaagtggggccccttcgatctggtgtacggcagcacccaacccctgggcagctcttgtgaccggtgccctggctggtacatgtttcagttccaccggatcctgcagtacgccctgccgagacaggagtcccagcggccattcttttggattttcatggacaacttgctgctgaccgaggatgaccaggaaactaccactcggttcctgcagaccgaagccgtgaccctgcaggacgtgagaggccgggactaccagaacgccatgcgggtgtggtccaacatccctggactgaaaagcaagcacgcacctctgacccctaaagaagaggagtacctgcaggcccaggtgcggagcagaagcaagctggacgcccctaaggtggatctgctggtgaagaattgcctcctgcccctgagagagtacttcaagtatttcagccagaatagtctgcccctgggaggcagcggcggcggcgccctggtgacatttgaggacgtcgccgtgcggttcacccaggaggaatgggctctgctggatccttctcagaaaatcctgtaccgggacgtgatgagagagacataccggaatctgacctccgtgggcatcaactgggaatgttgggaccttgaagcctgcttcagaagcctgggaagaaacctgagagtgcaggtggtgaagagaaagtgcgagctgaccaacagcggcccctgcgccgagggcggcccaagcagcggcgcccctcctcccagcggcggcagcccagccggctccccaacctctaccgaggagggcacctctgagtccgccacccccgagagcggccctggcacctccaccgagcccagcgagggcagcgcacccggcagccctgccggcagccccacctccacagaggagggaaccagcaccgagcccagcgaaggcagcgccccaggcaccagcaccgagcctagtgagcaggagattaaacggatcaacaagatcagaagaagacttgtgaaagacagcaacaccaagaaggccggcaagacaggccccatgaaaaccctgctggttagagtgatgacacccgatctgagagagcggctggaaaacctgagaaagaagcctgaaaatatcccccagcccatcagcaatacatctagagccaacctgaataagctgctgaccgattacaccgaaatgaagaaggcgatcctgcatgtgtactgggaagagttccagaaggaccctgtgggcctgatgagccgggtggcccagcctgccagcaagaagatcgatcagaacaagctgaaacctgagatggacgagaagggcaacctgaccaccgccggctttgcctgctctcagtgtggccagcccctgttcgtgtacaagctggagcaggtgtctgagaagggcaaggcttacaccaactacttcggacggtgcaatgtggccgagcacgaaaagctgatcctgctggcccagctgaagcccgagaaggatagcgacgaagccgtgacatatagcctgggaaagtttgggcagagggccctggatttctacagcattcatgtgaccaaggagtccacccaccccgtgaagcccctggcccagatcgccggaaacagatacgcctccggacctgtgggaaaggccctgagcgacgcatgtatgggcacaatcgcctccttcctgtctaagtaccaggacatcatcatcgaacaccagaaggtggtgaagggcaaccagaagagactggagagcctgcgggagctggccggcaaggaaaacctggaataccctagcgtgaccctgccacctcagcctcacaccaaggagggcgttgatgcctacaacgaagtgatcgcccgggtgcgaatgtgggtgaacctgaacctgtggcagaagctgaagctaagcagagatgatgccaagcctctgctgagactgaagggattcccttcctttcctctggtcgagagacaggccaacgaagtggactggtgggacatggtgtgtaacgtgaagaagctgatcaacgagaaaaaggaggatggcaaggtgttttggcagaatctggctggctacaagagacaggaagccctgagaccatacctgagcagcgaggaagatcggaagaagggaaagaaattcgctcggtaccagctgggcgacctgctgctgcacctggaaaagaagcacggcgaggactggggaaaggtgtacgacgaggcctgggagcggattgacaagaaagtggaaggcctgagcaagcacatcaagctggaagaggaacggagaagcgaggacgcccagagcaaggccgccctgaccgactggctgcgggctaaggccagcttcgtgatcgagggcctgaaggaggccgacaaggacgagttctgcagatgcgagctgaagctgcagaagtggtacggggacctgcggggaaagcccttcgccatcgaagccgagaacagcatcctggacatcagcggcttcagcaagcagtacaactgtgccttcatctggcagaaggacggcgtgaagaagctgaacctgtacctgatcatcaactacttcaagggcggcaagctgcggttcaagaagatcaaacctgaagccttcgaagccaacagattctacaccgtgatcaacaaaaagagcggcgagatcgtgcccatggaggtgaacttcaacttcgacgaccccaacctgatcatcctgcctctggcctttggcaagagacagggcagagaattcatctggaacgacctgctgtccctggaaaccggcagcctgaagctggccaacggaagagtgatcgagaagacactgtacaacagaagaacccggcaggatgagcctgccctgttcgtggccctgaccttcgagcggcgggaggtcctggactcctccaatatcaaaccaatgaacctgatcggcgtggcaagaggcgaaaacatccccgccgtgatcgccctgaccgaccccgagggctgcccactgagccggtttaaggatagcctgggaaacccaacccacatcctgagaatcggcgagagctataaggagaagcagcggaccatccaggccaagaaggaggtggagcagcggagagccggcggctacagccggaagtacgccagcaaagccaagaatctggcagacgatatggtgagaaacaccgctagagatctgctgtactacgccgtgacccaggatgccatgctgatcttcgccaacctgagccggggcttcggccggcagggcaagcggaccttcatggccgagagacagtacacacggatggaggactggctgaccgccaagctggcctacgagggcctgagcaagacctacctgtccaagacactggcccagtacacctccaagacatgcagcaactgtgggtttaccatcaccagcgccgactacgacagggtgctggagaagctgaagaagacagcaacaggctggatgaccacaattaacggcaaggagctgaaggtggagggccagattacctactacaacagatacaagagacagaacgtagtcaaggacctgtccgtcgagctggatagactgagcgaagaatctgtgaacaacgacatctcctcctggacaaagggcagaagcggagaagctctgagcctcctgaagaaaagattctcccatagacccgtgcaggagaagttcgtgtgcctgaactgcggcttcgagacacacgcagccgagcaagccgccctgaacatcgccagatcctggctgttcctgcggagccaggagtacaagaaataccagacaaacaagacaaccggcaacaccgataagagagccttcgtcgagacctggcagtccttttaccggaagaagcttaaggaggtgtggaaacctgccgtgcggtctggcggatctggcggaggctcccagggcagcgtgaccttcagggacgtggccatcgacttcagccaggaggagtgggagtggctgcagcccgcccagagggacctgtacaggcacgtgatgctggagaactacggccacctggtgagcctgggcctgaacatcagcaagccctacgtggtgagcctgctggagcagggcagggacccctggctggagaaggacgtgaggagggacctgttcagcgagagcagcggcgagatcaggggcggcccaagcagcggcgcccctcctcccagcggcggcagcccagccggctccccaacctctaccgaggagggcacctctgagtccgccacccccgagagcggccctggcacctccaccgagcccagcgagggcagcgcacccggcagccctgccggcagccccacctccacagaggagggaaccagcaccgagcccagcgaaggcagcgccccaggcaccagcaccgagcctagtgagcaggagattaaacggatcaacaagatcagaagaagacttgtgaaagacagcaacaccaagaaggccggcaagacaggccccatgaaaaccctgctggttagagtgatgacacccgatctgagagagcggctggaaaacctgagaaagaagcctgaaaatatcccccagcccatcagcaatacatctagagccaacctgaataagctgctgaccgattacaccgaaatgaagaaggcgatcctgcatgtgtactgggaagagttccagaaggaccctgtgggcctgatgagccgggtggcccagcctgccagcaagaagatcgatcagaacaagctgaaacctgagatggacgagaagggcaacctgaccaccgccggctttgcctgctctcagtgtggccagcccctgttcgtgtacaagctggagcaggtgtctgagaagggcaaggcttacaccaactacttcggacggtgcaatgtggccgagcacgaaaagctgatcctgctggcccagctgaagcccgagaaggatagcgacgaagccgtgacatatagcctgggaaagtttgggcagagggccctggatttctacagcattcatgtgaccaaggagtccacccaccccgtgaagcccctggcccagatcgccggaaacagatacgcctccggacctgtgggaaaggccctgagcgacgcatgtatgggcacaatcgcctccttcctgtctaagtaccaggacatcatcatcgaacaccagaaggtggtgaagggcaaccagaagagactggagagcctgcgggagctggccggcaaggaaaacctggaataccctagcgtgaccctgccacctcagcctcacaccaaggagggcgttgatgcctacaacgaagtgatcgcccgggtgcgaatgtgggtgaacctgaacctgtggcagaagctgaagctaagcagagatgatgccaagcctctgctgagactgaagggattcccttcctttcctctggtcgagagacaggccaacgaagtggactggtgggacatggtgtgtaacgtgaagaagctgatcaacgagaaaaaggaggatggcaaggtgttttggcagaatctggctggctacaagagacaggaagccctgagaccatacctgagcagcgaggaagatcggaagaagggaaagaaattcgctcggtaccagctgggcgacctgctgctgcacctggaaaagaagcacggcgaggactggggaaaggtgtacgacgaggcctgggagcggattgacaagaaagtggaaggcctgagcaagcacatcaagctggaagaggaacggagaagcgaggacgcccagagcaaggccgccctgaccgactggctgcgggctaaggccagcttcgtgatcgagggcctgaaggaggccgacaaggacgagttctgcagatgcgagctgaagctgcagaagtggtacggggacctgcggggaaagcccttcgccatcgaagccgagaacagcatcctggacatcagcggcttcagcaagcagtacaactgtgccttcatctggcagaaggacggcgtgaagaagctgaacctgtacctgatcatcaactacttcaagggcggcaagctgcggttcaagaagatcaaacctgaagccttcgaagccaacagattctacaccgtgatcaacaaaaagagcggcgagatcgtgcccatggaggtgaacttcaacttcgacgaccccaacctgatcatcctgcctctggcctttggcaagagacagggcagagaattcatctggaacgacctgctgtccctggaaaccggcagcctgaagctggccaacggaagagtgatcgagaagacactgtacaacagaagaacccggcaggatgagcctgccctgttcgtggccctgaccttcgagcggcgggaggtcctggactcctccaatatcaaaccaatgaacctgatcggcgtggcaagaggcgaaaacatccccgccgtgatcgccctgaccgaccccgagggctgcccactgagccggtttaaggatagcctgggaaacccaacccacatcctgagaatcggcgagagctataaggagaagcagcggaccatccaggccaagaaggaggtggagcagcggagagccggcggctacagccggaagtacgccagcaaagccaagaatctggcagacgatatggtgagaaacaccgctagagatctgctgtactacgccgtgacccaggatgccatgctgatcttcgccaacctgagccggggcttcggccggcagggcaagcggaccttcatggccgagagacagtacacacggatggaggactggctgaccgccaagctggcctacgagggcctgagcaagacctacctgtccaagacactggcccagtacacctccaagacatgcagcaactgtgggtttaccatcaccagcgccgactacgacagggtgctggagaagctgaagaagacagcaacaggctggatgaccacaattaacggcaaggagctgaaggtggagggccagattacctactacaacagatacaagagacagaacgtagtcaaggacctgtccgtcgagctggatagactgagcgaagaatctgtgaacaacgacatctcctcctggacaaagggcagaagcggagaagctctgagcctcctgaagaaaagattctcccatagacccgtgcaggagaagttcgtgtgcctgaactgcggcttcgagacacacgcagccgagcaagccgccctgaacatcgccagatcctggctgttcctgcggagccaggagtacaagaaataccagacaaacaagacaaccggcaacaccgataagagagccttcgtcgagacctggcagtccttttaccggaagaagcttaaggaggtgtggaaacctgccgtgcggtctggcggatctggcggaggctcctcagggcagcgtgaccttcagggacgtggccatcgacttcagccaggaggagtgggagtggctgcagcccgcccagagggacctgtacaggcacgtgatgctggagaactacggccacctggtgagcctgggcctgaacatcagcaagccctacgtggtgagcctgctggagcagggcagggacccctggctggagaaggacgtgaggagggacctgttcagcgagagcagcggcgagatcaggggatctggctccggcagcggccccaagaaaaagagaaaagtctaagctgccttctgcggggcttgccttctggccatgcccttcttctctcccttgcacctgtacctcttggtctttgaataaagcctgagtaggaaggctagcaaaaaaaaaaaaaaaaaaaaaaaaaaaaaaaaaaaaaaaaaaaaaaaaaaaaaaaaaaaaaaaaaaaaaaaaaaaaaaaa

SEQ ID NO: 16794 - RNA, 9485 nt, synthetic construct
  source 1..9485: mol_type = other RNA
aggaaataagagagaaaagaagagtaagaagaaatataagagccaccatggcccctaagaagaagcgtaaagtgagccggatggaacgcctcgtctacgaggtgcggcagaagtgcagaaacatcgaggacatctgcatctcctgcggatctctgaacgtgaccctggagcacccactgttcatcggcggcatgtgccagaactgtaaaaactgttttctggagtgtgcctatcaatacgacgatgacggctaccagagctactgcaccatctgttgcggcggaagagaggtgctgatgtgtggaaataacaactgctgccggtgcttctgcgtggaatgcgtggacctgctggtgggccccggcgccgcccaggccgctattaaggaagatccttggaactgctacatgtgcggccacaagggcacatacggcctgctgagacggagagaggactggcctagcagactgcagatgttcttcgccaataaccacgaccaggagttcgacccccctaaggtgtaccctcccgtccccgccgagaagagaaagcccatccgggtcctgagcctgttcgatggcatcgccaccggtctgctggtgctgaaggacctgggcatccaggtggataggtacattgcctccgaggtgtgcgaggactccatcaccgtgggaatggtgcgtcatcagggcaagatcatgtacgtgggcgacgtgcggagcgtgacacagaagcatatccaggagtggggccctttcgacctggtgatcggcggcagcccttgcaatgacctgagcatcgtgaacccagcccggaagggcctgtacgagggaaccggcagactgttcttcgagttttacagactgctgcacgacgcccggcctaaggaaggcgacgaccggcccttcttttggctgttcgagaatgtggtggccatgggagtcagcgacaagcgggatattagccggttcctggagagcaaccccgtgatgatcgatgccaaggaagtgagcgccgcccaccgggccagatacttctggggcaatctgcctggcatgaacagacccctggccagcaccgtgaacgacaagctggagctgcaggagtgcctggagcacggccggatcgccaagttcagcaaggtgagaaccatcaccacccgaagcaacagcatcaaacaaggcaaggaccagcactttcctgtgttcatgaacgagaaggaggacatcctgtggtgtaccgagatggagagagtgttcgggttcccagtccactacacagatgtcagcaacatgtctagactggccagacagagactgctgggaagaagctggtccgtccctgtgatcagacacctgttcgcccctctgaaggagtacttcgcctgcgtgagcagcggcaacagcaacgccaacagccggggccccagcttctctagcggcctggtgccactgtccctgagagggagccacatgggccccatggagatctacaaaaccgtgagcgcctggaagcggcagcctgtgcgcgtgctgagcctgtttcggaatatcgataaagtcctgaaaagcctgggattcctggagagcggctctggctccggcggtggcaccctgaagtacgtggaggatgtgacaaacgtggtcagacgggatgtggagaagtggggccccttcgatctggtgtacggcagcacccaacccctgggcagctcttgtgaccggtgccctggctggtacatgtttcagttccaccggatcctgcagtacgccctgccgagacaggagtcccagcggccattcttttggattttcatggacaacttgctgctgaccgaggatgaccaggaaactaccactcggttcctgcagaccgaagccgtgaccctgcaggacgtgagaggccgggactaccagaacgccatgcgggtgtggtccaacatccctggactgaaaagcaagcacgcacctctgacccctaaagaagaggagtacctgcaggcccaggtgcggagcagaagcaagctggacgcccctaaggtggatctgctggtgaagaattgcctcctgcccctgagagagtacttcaagtatttcagccagaatagtctgcccctgggaggcagcggcggcggcgccctggtgacatttgaggacgtcgccgtgcggttcacccaggaggaatgggctctgctggatccttctcagaaaatcctgtaccgggacgtgatgagagagacataccggaatctgacctccgtgggcatcaactgggaatgttgggaccttgaagcctgcttcagaagcctgggaagaaacctgagagtgcaggtggtgaagagaaagtgcgagctgaccaacagcggcccctgcgccgagggcggcccaagcagcggcgcccctcctcccagcggcggcagcccagccggctccccaacctctaccgaggagggcacctctgagtccgccacccccgagagcggccctggcacctccaccgagcccagcgagggcagcgcacccggcagccctgccggcagccccacctccacagaggagggaaccagcaccgagcccagcgaaggcagcgccccaggcaccagcaccgagcctagtgagcaggagattaaacggatcaacaagatcagaagaagacttgtgaaagacagcaacaccaagaaggccggcaagacaggccccatgaaaaccctgctggttagagtgatgacacccgatctgagagagcggctggaaaacctgagaaagaagcctgaaaatatcccccagcccatcagcaatacatctagagccaacctgaataagctgctgaccgattacaccgaaatgaagaaggcgatcctgcatgtgtactgggaagagttccagaaggaccctgtgggcctgatgagccgggtggcccagcctgccagcaagaagatcgatcagaacaagctgaaacctgagatggacgagaagggcaacctgaccaccgccggctttgcctgctctcagtgtggccagcccctgttcgtgtacaagctggagcaggtgtctgagaagggcaaggcttacaccaactacttcggacggtgcaatgtggccgagcacgaaaagctgatcctgctggcccagctgaagcccgagaaggatagcgacgaagccgtgacatatagcctgggaaagtttgggcagagggccctggatttctacagcattcatgtgaccaaggagtccacccaccccgtgaagcccctggcccagatcgccggaaacagatacgcctccggacctgtgggaaaggccctgagcgacgcatgtatgggcacaatcgcctccttcctgtctaagtaccaggacatcatcatcgaacaccagaaggtggtgaagggcaaccagaagagactggagagcctgcgggagctggccggcaaggaaaacctggaataccctagcgtgaccctgccacctcagcctcacaccaaggagggcgttgatgcctacaacgaagtgatcgcccgggtgcgaatgtgggtgaacctgaacctgtggcagaagctgaagctaagcagagatgatgccaagcctctgctgagactgaagggattcccttcctttcctctggtcgagagacaggccaacgaagtggactggtgggacatggtgtgtaacgtgaagaagctgatcaacgagaaaaaggaggatggcaaggtgttttggcagaatctggctggctacaagagacaggaagccctgagaccatacctgagcagcgaggaagatcggaagaagggaaagaaattcgctcggtaccagctgggcgacctgctgctgcacctggaaaagaagcacggcgaggactggggaaaggtgtacgacgaggcctgggagcggattgacaagaaagtggaaggcctgagcaagcacatcaagctggaagaggaacggagaagcgaggacgcccagagcaaggccgccctgaccgactggctgcgggctaaggccagcttcgtgatcgagggcctgaaggaggccgacaaggacgagttctgcagatgcgagctgaagctgcagaagtggtacggggacctgcggggaaagcccttcgccatcgaagccgagaacagcatcctggacatcagcggcttcagcaagcagtacaactgtgccttcatctggcagaaggacggcgtgaagaagctgaacctgtacctgatcatcaactacttcaagggcggcaagctgcggttcaagaagatcaaacctgaagccttcgaagccaacagattctacaccgtgatcaacaaaaagagcggcgagatcgtgcccatggaggtgaacttcaacttcgacgaccccaacctgatcatcctgcctctggcctttggcaagagacagggcagagaattcatctggaacgacctgctgtccctggaaaccggcagcctgaagctggccaacggaagagtgatcgagaagacactgtacaacagaagaacccggcaggatgagcctgccctgttcgtggccctgaccttcgagcggcgggaggtcctggactcctccaatatcaaaccaatgaacctgatcggcgtggcaagaggcgaaaacatccccgccgtgatcgccctgaccgaccccgagggctgcccactgagccggtttaaggatagcctgggaaacccaacccacatcctgagaatcggcgagagctataaggagaagcagcggaccatccaggccaagaaggaggtggagcagcggagagccggcggctacagccggaagtacgccagcaaagccaagaatctggcagacgatatggtgagaaacaccgctagagatctgctgtactacgccgtgacccaggatgccatgctgatcttcgccaacctgagccggggcttcggccggcagggcaagcggaccttcatggccgagagacagtacacacggatggaggactggctgaccgccaagctggcctacgagggcctgagcaagacctacctgtccaagacactggcccagtacacctccaagacatgcagcaactgtgggtttaccatcaccagcgccgactacgacagggtgctggagaagctgaagaagacagcaacaggctggatgaccacaattaacggcaaggagctgaaggtggagggccagattacctactacaacagatacaagagacagaacgtagtcaaggacctgtccgtcgagctggatagactgagcgaagaatctgtgaacaacgacatctcctcctggacaaagggcagaagcggagaagctctgagcctcctgaagaaaagattctcccatagacccgtgcaggagaagttcgtgtgcctgaactgcggcttcgagacacacgcagccgagcaagccgccctgaacatcgccagatcctggctgttcctgcggagccaggagtacaagaaataccagacaaacaagacaaccggcaacaccgataagagagccttcgtcgagacctggcagtccttttaccggaagaagcttaaggaggtgtggaaacctgccgtgcggtctggcggatctggcggaggctccatgaccaccctgaaggagaccgtgaccttcaaggacgtggccgtggtgttcaccgaggaggagctgcagctgctggaccccgcccagaagaagctgtaccaggacgtgatgctggagaacttcaggaacctgctgagcgtgggccaccagcccttccacggcgacaccttccacttccccagggaggagaagttctggatggtggagaccgccacccagaaggagggcaacctggacggcgtgggcggcccaagcagcggcgcccctcctcccagcggcggcagcccagccggctccccaacctctaccgaggagggcacctctgagtccgccacccccgagagcggccctggcacctccaccgagcccagcgagggcagcgcacccggcagccctgccggcagccccacctccacagaggagggaaccagcaccgagcccagcgaaggcagcgccccaggcaccagcaccgagcctagtgagcaggagattaaacggatcaacaagatcagaagaagacttgtgaaagacagcaacaccaagaaggccggcaagacaggccccatgaaaaccctgctggttagagtgatgacacccgatctgagagagcggctggaaaacctgagaaagaagcctgaaaatatcccccagcccatcagcaatacatctagagccaacctgaataagctgctgaccgattacaccgaaatgaagaaggcgatcctgcatgtgtactgggaagagttccagaaggaccctgtgggcctgatgagccgggtggcccagcctgccagcaagaagatcgatcagaacaagctgaaacctgagatggacgagaagggcaacctgaccaccgccggctttgcctgctctcagtgtggccagcccctgttcgtgtacaagctggagcaggtgtctgagaagggcaaggcttacaccaactacttcggacggtgcaatgtggccgagcacgaaaagctgatcctgctggcccagctgaagcccgagaaggatagcgacgaagccgtgacatatagcctgggaaagtttgggcagagggccctggatttctacagcattcatgtgaccaaggagtccacccaccccgtgaagcccctggcccagatcgccggaaacagatacgcctccggacctgtgggaaaggccctgagcgacgcatgtatgggcacaatcgcctccttcctgtctaagtaccaggacatcatcatcgaacaccagaaggtggtgaagggcaaccagaagagactggagagcctgcgggagctggccggcaaggaaaacctggaataccctagcgtgaccctgccacctcagcctcacaccaaggagggcgttgatgcctacaacgaagtgatcgcccgggtgcgaatgtgggtgaacctgaacctgtggcagaagctgaagctaagcagagatgatgccaagcctctgctgagactgaagggattcccttcctttcctctggtcgagagacaggccaacgaagtggactggtgggacatggtgtgtaacgtgaagaagctgatcaacgagaaaaaggaggatggcaaggtgttttggcagaatctggctggctacaagagacaggaagccctgagaccatacctgagcagcgaggaagatcggaagaagggaaagaaattcgctcggtaccagctgggcgacctgctgctgcacctggaaaagaagcacggcgaggactggggaaaggtgtacgacgaggcctgggagcggattgacaagaaagtggaaggcctgagcaagcacatcaagctggaagaggaacggagaagcgaggacgcccagagcaaggccgccctgaccgactggctgcgggctaaggccagcttcgtgatcgagggcctgaaggaggccgacaaggacgagttctgcagatgcgagctgaagctgcagaagtggtacggggacctgcggggaaagcccttcgccatcgaagccgagaacagcatcctggacatcagcggcttcagcaagcagtacaactgtgccttcatctggcagaaggacggcgtgaagaagctgaacctgtacctgatcatcaactacttcaagggcggcaagctgcggttcaagaagatcaaacctgaagccttcgaagccaacagattctacaccgtgatcaacaaaaagagcggcgagatcgtgcccatggaggtgaacttcaacttcgacgaccccaacctgatcatcctgcctctggcctttggcaagagacagggcagagaattcatctggaacgacctgctgtccctggaaaccggcagcctgaagctggccaacggaagagtgatcgagaagacactgtacaacagaagaacccggcaggatgagcctgccctgttcgtggccctgaccttcgagcggcgggaggtcctggactcctccaatatcaaaccaatgaacctgatcggcgtggcaagaggcgaaaacatccccgccgtgatcgccctgaccgaccccgagggctgcccactgagccggtttaaggatagcctgggaaacccaacccacatcctgagaatcggcgagagctataaggagaagcagcggaccatccaggccaagaaggaggtggagcagcggagagccggcggctacagccggaagtacgccagcaaagccaagaatctggcagacgatatggtgagaaacaccgctagagatctgctgtactacgccgtgacccaggatgccatgctgatcttcgccaacctgagccggggcttcggccggcagggcaagcggaccttcatggccgagagacagtacacacggatggaggactggctgaccgccaagctggcctacgagggcctgagcaagacctacctgtccaagacactggcccagtacacctccaagacatgcagcaactgtgggtttaccatcaccagcgccgactacgacagggtgctggagaagctgaagaagacagcaacaggctggatgaccacaattaacggcaaggagctgaaggtggagggccagattacctactacaacagatacaagagacagaacgtagtcaaggacctgtccgtcgagctggatagactgagcgaagaatctgtgaacaacgacatctcctcctggacaaagggcagaagcggagaagctctgagcctcctgaagaaaagattctcccatagacccgtgcaggagaagttcgtgtgcctgaactgcggcttcgagacacacgcagccgagcaagccgccctgaacatcgccagatcctggctgttcctgcggagccaggagtacaagaaataccagacaaacaagacaaccggcaacaccgataagagagccttcgtcgagacctggcagtccttttaccggaagaagcttaaggaggtgtggaaacctgccgtgcggtctggcggatctggcggaggctcctatgaccaccctgaaggagaccgtgaccttcaaggacgtggccgtggtgttcaccgaggaggagctgcagctgctggaccccgcccagaagaagctgtaccaggacgtgatgctggagaacttcaggaacctgctgagcgtgggccaccagcccttccacggcgacaccttccacttccccagggaggagaagttctggatggtggagaccgccacccagaaggagggcaacctggacggcgtgggatctggctccggcagcggccccaagaaaaagagaaaagtctaagctgccttctgcggggcttgccttctggccatgcccttcttctctcccttgcacctgtacctcttggtctttgaataaagcctgagtaggaaggctagcaaaaaaaaaaaaaaaaaaaaaaaaaaaaaaaaaaaaaaaaaaaaaaaaaaaaaaaaaaaaaaaaaaaaaaaaaaaaaaaa

SEQ ID NO: 16795 - RNA, 9485 nt, synthetic construct
  source 1..9485: mol_type = other RNA
aggaaataagagagaaaagaagagtaagaagaaatataagagccaccatggcccctaagaagaagcgtaaagtgagccggatggaacgcctcgtctacgaggtgcggcagaagtgcagaaacatcgaggacatctgcatctcctgcggatctctgaacgtgaccctggagcacccactgttcatcggcggcatgtgccagaactgtaaaaactgttttctggagtgtgcctatcaatacgacgatgacggctaccagagctactgcaccatctgttgcggcggaagagaggtgctgatgtgtggaaataacaactgctgccggtgcttctgcgtggaatgcgtggacctgctggtgggccccggcgccgcccaggccgctattaaggaagatccttggaactgctacatgtgcggccacaagggcacatacggcctgctgagacggagagaggactggcctagcagactgcagatgttcttcgccaataaccacgaccaggagttcgacccccctaaggtgtaccctcccgtccccgccgagaagagaaagcccatccgggtcctgagcctgttcgatggcatcgccaccggtctgctggtgctgaaggacctgggcatccaggtggataggtacattgcctccgaggtgtgcgaggactccatcaccgtgggaatggtgcgtcatcagggcaagatcatgtacgtgggcgacgtgcggagcgtgacacagaagcatatccaggagtggggccctttcgacctggtgatcggcggcagcccttgcaatgacctgagcatcgtgaacccagcccggaagggcctgtacgagggaaccggcagactgttcttcgagttttacagactgctgcacgacgcccggcctaaggaaggcgacgaccggcccttcttttggctgttcgagaatgtggtggccatgggagtcagcgacaagcgggatattagccggttcctggagagcaaccccgtgatgatcgatgccaaggaagtgagcgccgcccaccgggccagatacttctggggcaatctgcctggcatgaacagacccctggccagcaccgtgaacgacaagctggagctgcaggagtgcctggagcacggccggatcgccaagttcagcaaggtgagaaccatcaccacccgaagcaacagcatcaaacaaggcaaggaccagcactttcctgtgttcatgaacgagaaggaggacatcctgtggtgtaccgagatggagagagtgttcgggttcccagtccactacacagatgtcagcaacatgtctagactggccagacagagactgctgggaagaagctggtccgtccctgtgatcagacacctgttcgcccctctgaaggagtacttcgcctgcgtgagcagcggcaacagcaacgccaacagccggggccccagcttctctagcggcctggtgccactgtccctgagagggagccacatgggccccatggagatctacaaaaccgtgagcgcctggaagcggcagcctgtgcgcgtgctgagcctgtttcggaatatcgataaagtcctgaaaagcctgggattcctggagagcggctctggctccggcggtggcaccctgaagtacgtggaggatgtgacaaacgtggtcagacgggatgtggagaagtggggccccttcgatctggtgtacggcagcacccaacccctgggcagctcttgtgaccggtgccctggctggtacatgtttcagttccaccggatcctgcagtacgccctgccgagacaggagtcccagcggccattcttttggattttcatggacaacttgctgctgaccgaggatgaccaggaaactaccactcggttcctgcagaccgaagccgtgaccctgcaggacgtgagaggccgggactaccagaacgccatgcgggtgtggtccaacatccctggactgaaaagcaagcacgcacctctgacccctaaagaagaggagtacctgcaggcccaggtgcggagcagaagcaagctggacgcccctaaggtggatctgctggtgaagaattgcctcctgcccctgagagagtacttcaagtatttcagccagaatagtctgcccctgggaggcagcggcggcggcgccctggtgacatttgaggacgtcgccgtgcggttcacccaggaggaatgggctctgctggatccttctcagaaaatcctgtaccgggacgtgatgagagagacataccggaatctgacctccgtgggcatcaactgggaatgttgggaccttgaagcctgcttcagaagcctgggaagaaacctgagagtgcaggtggtgaagagaaagtgcgagctgaccaacagcggcccctgcgccgagggcggcccaagcagcggcgcccctcctcccagcggcggcagcccagccggctccccaacctctaccgaggagggcacctctgagtccgccacccccgagagcggccctggcacctccaccgagcccagcgagggcagcgcacccggcagccctgccggcagccccacctccacagaggagggaaccagcaccgagcccagcgaaggcagcgccccaggcaccagcaccgagcctagtgagcaggagattaaacggatcaacaagatcagaagaagacttgtgaaagacagcaacaccaagaaggccggcaagacaggccccatgaaaaccctgctggttagagtgatgacacccgatctgagagagcggctggaaaacctgagaaagaagcctgaaaatatcccccagcccatcagcaatacatctagagccaacctgaataagctgctgaccgattacaccgaaatgaagaaggcgatcctgcatgtgtactgggaagagttccagaaggaccctgtgggcctgatgagccgggtggcccagcctgccagcaagaagatcgatcagaacaagctgaaacctgagatggacgagaagggcaacctgaccaccgccggctttgcctgctctcagtgtggccagcccctgttcgtgtacaagctggagcaggtgtctgagaagggcaaggcttacaccaactacttcggacggtgcaatgtggccgagcacgaaaagctgatcctgctggcccagctgaagcccgagaaggatagcgacgaagccgtgacatatagcctgggaaagtttgggcagagggccctggatttctacagcattcatgtgaccaaggagtccacccaccccgtgaagcccctggcccagatcgccggaaacagatacgcctccggacctgtgggaaaggccctgagcgacgcatgtatgggcacaatcgcctccttcctgtctaagtaccaggacatcatcatcgaacaccagaaggtggtgaagggcaaccagaagagactggagagcctgcgggagctggccggcaaggaaaacctggaataccctagcgtgaccctgccacctcagcctcacaccaaggagggcgttgatgcctacaacgaagtgatcgcccgggtgcgaatgtgggtgaacctgaacctgtggcagaagctgaagctaagcagagatgatgccaagcctctgctgagactgaagggattcccttcctttcctctggtcgagagacaggccaacgaagtggactggtgggacatggtgtgtaacgtgaagaagctgatcaacgagaaaaaggaggatggcaaggtgttttggcagaatctggctggctacaagagacaggaagccctgagaccatacctgagcagcgaggaagatcggaagaagggaaagaaattcgctcggtaccagctgggcgacctgctgctgcacctggaaaagaagcacggcgaggactggggaaaggtgtacgacgaggcctgggagcggattgacaagaaagtggaaggcctgagcaagcacatcaagctggaagaggaacggagaagcgaggacgcccagagcaaggccgccctgaccgactggctgcgggctaaggccagcttcgtgatcgagggcctgaaggaggccgacaaggacgagttctgcagatgcgagctgaagctgcagaagtggtacggggacctgcggggaaagcccttcgccatcgaagccgagaacagcatcctggacatcagcggcttcagcaagcagtacaactgtgccttcatctggcagaaggacggcgtgaagaagctgaacctgtacctgatcatcaactacttcaagggcggcaagctgcggttcaagaagatcaaacctgaagccttcgaagccaacagattctacaccgtgatcaacaaaaagagcggcgagatcgtgcccatggaggtgaacttcaacttcgacgaccccaacctgatcatcctgcctctggcctttggcaagagacagggcagagaattcatctggaacgacctgctgtccctggaaaccggcagcctgaagctggccaacggaagagtgatcgagaagacactgtacaacagaagaacccggcaggatgagcctgccctgttcgtggccctgaccttcgagcggcgggaggtcctggactcctccaatatcaaaccaatgaacctgatcggcgtggcaagaggcgaaaacatccccgccgtgatcgccctgaccgaccccgagggctgcccactgagccggtttaaggatagcctgggaaacccaacccacatcctgagaatcggcgagagctataaggagaagcagcggaccatccaggccaagaaggaggtggagcagcggagagccggcggctacagccggaagtacgccagcaaagccaagaatctggcagacgatatggtgagaaacaccgctagagatctgctgtactacgccgtgacccaggatgccatgctgatcttcgccaacctgagccggggcttcggccggcagggcaagcggaccttcatggccgagagacagtacacacggatggaggactggctgaccgccaagctggcctacgagggcctgagcaagacctacctgtccaagacactggcccagtacacctccaagacatgcagcaactgtgggtttaccatcaccagcgccgactacgacagggtgctggagaagctgaagaagacagcaacaggctggatgaccacaattaacggcaaggagctgaaggtggagggccagattacctactacaacagatacaagagacagaacgtagtcaaggacctgtccgtcgagctggatagactgagcgaagaatctgtgaacaacgacatctcctcctggacaaagggcagaagcggagaagctctgagcctcctgaagaaaagattctcccatagacccgtgcaggagaagttcgtgtgcctgaactgcggcttcgagacacacgcagccgagcaagccgccctgaacatcgccagatcctggctgttcctgcggagccaggagtacaagaaataccagacaaacaagacaaccggcaacaccgataagagagccttcgtcgagacctggcagtccttttaccggaagaagcttaaggaggtgtggaaacctgccgtgcggtctggcggatctggcggaggctccatgaccttcagcgacgtggccgtggacttcagccagcaggagtgggagtgcctggaccccgtgcagaagaccctgtacagggacgtgatgatggagaactacggcaacctggtgagcctgggccacagcatcagcaagcccgacgtgatcgccctgctggagcagggcaaggagccctgggtggtgaccaaggaggagaccaggaggtgctgcaccgacctggagagcaggtacgagatcatcggcggcccaagcagcggcgcccctcctcccagcggcggcagcccagccggctccccaacctctaccgaggagggcacctctgagtccgccacccccgagagcggccctggcacctccaccgagcccagcgagggcagcgcacccggcagccctgccggcagccccacctccacagaggagggaaccagcaccgagcccagcgaaggcagcgccccaggcaccagcaccgagcctagtgagcaggagattaaacggatcaacaagatcagaagaagacttgtgaaagacagcaacaccaagaaggccggcaagacaggccccatgaaaaccctgctggttagagtgatgacacccgatctgagagagcggctggaaaacctgagaaagaagcctgaaaatatcccccagcccatcagcaatacatctagagccaacctgaataagctgctgaccgattacaccgaaatgaagaaggcgatcctgcatgtgtactgggaagagttccagaaggaccctgtgggcctgatgagccgggtggcccagcctgccagcaagaagatcgatcagaacaagctgaaacctgagatggacgagaagggcaacctgaccaccgccggctttgcctgctctcagtgtggccagcccctgttcgtgtacaagctggagcaggtgtctgagaagggcaaggcttacaccaactacttcggacggtgcaatgtggccgagcacgaaaagctgatcctgctggcccagctgaagcccgagaaggatagcgacgaagccgtgacatatagcctgggaaagtttgggcagagggccctggatttctacagcattcatgtgaccaaggagtccacccaccccgtgaagcccctggcccagatcgccggaaacagatacgcctccggacctgtgggaaaggccctgagcgacgcatgtatgggcacaatcgcctccttcctgtctaagtaccaggacatcatcatcgaacaccagaaggtggtgaagggcaaccagaagagactggagagcctgcgggagctggccggcaaggaaaacctggaataccctagcgtgaccctgccacctcagcctcacaccaaggagggcgttgatgcctacaacgaagtgatcgcccgggtgcgaatgtgggtgaacctgaacctgtggcagaagctgaagctaagcagagatgatgccaagcctctgctgagactgaagggattcccttcctttcctctggtcgagagacaggccaacgaagtggactggtgggacatggtgtgtaacgtgaagaagctgatcaacgagaaaaaggaggatggcaaggtgttttggcagaatctggctggctacaagagacaggaagccctgagaccatacctgagcagcgaggaagatcggaagaagggaaagaaattcgctcggtaccagctgggcgacctgctgctgcacctggaaaagaagcacggcgaggactggggaaaggtgtacgacgaggcctgggagcggattgacaagaaagtggaaggcctgagcaagcacatcaagctggaagaggaacggagaagcgaggacgcccagagcaaggccgccctgaccgactggctgcgggctaaggccagcttcgtgatcgagggcctgaaggaggccgacaaggacgagttctgcagatgcgagctgaagctgcagaagtggtacggggacctgcggggaaagcccttcgccatcgaagccgagaacagcatcctggacatcagcggcttcagcaagcagtacaactgtgccttcatctggcagaaggacggcgtgaagaagctgaacctgtacctgatcatcaactacttcaagggcggcaagctgcggttcaagaagatcaaacctgaagccttcgaagccaacagattctacaccgtgatcaacaaaaagagcggcgagatcgtgcccatggaggtgaacttcaacttcgacgaccccaacctgatcatcctgcctctggcctttggcaagagacagggcagagaattcatctggaacgacctgctgtccctggaaaccggcagcctgaagctggccaacggaagagtgatcgagaagacactgtacaacagaagaacccggcaggatgagcctgccctgttcgtggccctgaccttcgagcggcgggaggtcctggactcctccaatatcaaaccaatgaacctgatcggcgtggcaagaggcgaaaacatccccgccgtgatcgccctgaccgaccccgagggctgcccactgagccggtttaaggatagcctgggaaacccaacccacatcctgagaatcggcgagagctataaggagaagcagcggaccatccaggccaagaaggaggtggagcagcggagagccggcggctacagccggaagtacgccagcaaagccaagaatctggcagacgatatggtgagaaacaccgctagagatctgctgtactacgccgtgacccaggatgccatgctgatcttcgccaacctgagccggggcttcggccggcagggcaagcggaccttcatggccgagagacagtacacacggatggaggactggctgaccgccaagctggcctacgagggcctgagcaagacctacctgtccaagacactggcccagtacacctccaagacatgcagcaactgtgggtttaccatcaccagcgccgactacgacagggtgctggagaagctgaagaagacagcaacaggctggatgaccacaattaacggcaaggagctgaaggtggagggccagattacctactacaacagatacaagagacagaacgtagtcaaggacctgtccgtcgagctggatagactgagcgaagaatctgtgaacaacgacatctcctcctggacaaagggcagaagcggagaagctctgagcctcctgaagaaaagattctcccatagacccgtgcaggagaagttcgtgtgcctgaactgcggcttcgagacacacgcagccgagcaagccgccctgaacatcgccagatcctggctgttcctgcggagccaggagtacaagaaataccagacaaacaagacaaccggcaacaccgataagagagccttcgtcgagacctggcagtccttttaccggaagaagcttaaggaggtgtggaaacctgccgtgcggtctggcggatctggcggaggctcctatgaccttcagcgacgtggccgtggacttcagccagcaggagtgggagtgcctggaccccgtgcagaagaccctgtacagggacgtgatgatggagaactacggcaacctggtgagcctgggccacagcatcagcaagcccgacgtgatcgccctgctggagcagggcaaggagccctgggtggtgaccaaggaggagaccaggaggtgctgcaccgacctggagagcaggtacgagatcatcggatctggctccggcagcggccccaagaaaaagagaaaagtctaagctgccttctgcggggcttgccttctggccatgcccttcttctctcccttgcacctgtacctcttggtctttgaataaagcctgagtaggaaggctagcaaaaaaaaaaaaaaaaaaaaaaaaaaaaaaaaaaaaaaaaaaaaaaaaaaaaaaaaaaaaaaaaaaaaaaaaaaaaaaaa

SEQ ID NO: 16796 - RNA, 9485 nt, synthetic construct
  source 1..9485: mol_type = other RNA
aggaaataagagagaaaagaagagtaagaagaaatataagagccaccatggcccctaagaagaagcgtaaagtgagccggatggaacgcctcgtctacgaggtgcggcagaagtgcagaaacatcgaggacatctgcatctcctgcggatctctgaacgtgaccctggagcacccactgttcatcggcggcatgtgccagaactgtaaaaactgttttctggagtgtgcctatcaatacgacgatgacggctaccagagctactgcaccatctgttgcggcggaagagaggtgctgatgtgtggaaataacaactgctgccggtgcttctgcgtggaatgcgtggacctgctggtgggccccggcgccgcccaggccgctattaaggaagatccttggaactgctacatgtgcggccacaagggcacatacggcctgctgagacggagagaggactggcctagcagactgcagatgttcttcgccaataaccacgaccaggagttcgacccccctaaggtgtaccctcccgtccccgccgagaagagaaagcccatccgggtcctgagcctgttcgatggcatcgccaccggtctgctggtgctgaaggacctgggcatccaggtggataggtacattgcctccgaggtgtgcgaggactccatcaccgtgggaatggtgcgtcatcagggcaagatcatgtacgtgggcgacgtgcggagcgtgacacagaagcatatccaggagtggggccctttcgacctggtgatcggcggcagcccttgcaatgacctgagcatcgtgaacccagcccggaagggcctgtacgagggaaccggcagactgttcttcgagttttacagactgctgcacgacgcccggcctaaggaaggcgacgaccggcccttcttttggctgttcgagaatgtggtggccatgggagtcagcgacaagcgggatattagccggttcctggagagcaaccccgtgatgatcgatgccaaggaagtgagcgccgcccaccgggccagatacttctggggcaatctgcctggcatgaacagacccctggccagcaccgtgaacgacaagctggagctgcaggagtgcctggagcacggccggatcgccaagttcagcaaggtgagaaccatcaccacccgaagcaacagcatcaaacaaggcaaggaccagcactttcctgtgttcatgaacgagaaggaggacatcctgtggtgtaccgagatggagagagtgttcgggttcccagtccactacacagatgtcagcaacatgtctagactggccagacagagactgctgggaagaagctggtccgtccctgtgatcagacacctgttcgcccctctgaaggagtacttcgcctgcgtgagcagcggcaacagcaacgccaacagccggggccccagcttctctagcggcctggtgccactgtccctgagagggagccacatgggccccatggagatctacaaaaccgtgagcgcctggaagcggcagcctgtgcgcgtgctgagcctgtttcggaatatcgataaagtcctgaaaagcctgggattcctggagagcggctctggctccggcggtggcaccctgaagtacgtggaggatgtgacaaacgtggtcagacgggatgtggagaagtggggccccttcgatctggtgtacggcagcacccaacccctgggcagctcttgtgaccggtgccctggctggtacatgtttcagttccaccggatcctgcagtacgccctgccgagacaggagtcccagcggccattcttttggattttcatggacaacttgctgctgaccgaggatgaccaggaaactaccactcggttcctgcagaccgaagccgtgaccctgcaggacgtgagaggccgggactaccagaacgccatgcgggtgtggtccaacatccctggactgaaaagcaagcacgcacctctgacccctaaagaagaggagtacctgcaggcccaggtgcggagcagaagcaagctggacgcccctaaggtggatctgctggtgaagaattgcctcctgcccctgagagagtacttcaagtatttcagccagaatagtctgcccctgggaggcagcggcggcggcgccctggtgacatttgaggacgtcgccgtgcggttcacccaggaggaatgggctctgctggatccttctcagaaaatcctgtaccgggacgtgatgagagagacataccggaatctgacctccgtgggcatcaactgggaatgttgggaccttgaagcctgcttcagaagcctgggaagaaacctgagagtgcaggtggtgaagagaaagtgcgagctgaccaacagcggcccctgcgccgagggcggcccaagcagcggcgcccctcctcccagcggcggcagcccagccggctccccaacctctaccgaggagggcacctctgagtccgccacccccgagagcggccctggcacctccaccgagcccagcgagggcagcgcacccggcagccctgccggcagccccacctccacagaggagggaaccagcaccgagcccagcgaaggcagcgccccaggcaccagcaccgagcctagtgagcaggagattaaacggatcaacaagatcagaagaagacttgtgaaagacagcaacaccaagaaggccggcaagacaggccccatgaaaaccctgctggttagagtgatgacacccgatctgagagagcggctggaaaacctgagaaagaagcctgaaaatatcccccagcccatcagcaatacatctagagccaacctgaataagctgctgaccgattacaccgaaatgaagaaggcgatcctgcatgtgtactgggaagagttccagaaggaccctgtgggcctgatgagccgggtggcccagcctgccagcaagaagatcgatcagaacaagctgaaacctgagatggacgagaagggcaacctgaccaccgccggctttgcctgctctcagtgtggccagcccctgttcgtgtacaagctggagcaggtgtctgagaagggcaaggcttacaccaactacttcggacggtgcaatgtggccgagcacgaaaagctgatcctgctggcccagctgaagcccgagaaggatagcgacgaagccgtgacatatagcctgggaaagtttgggcagagggccctggatttctacagcattcatgtgaccaaggagtccacccaccccgtgaagcccctggcccagatcgccggaaacagatacgcctccggacctgtgggaaaggccctgagcgacgcatgtatgggcacaatcgcctccttcctgtctaagtaccaggacatcatcatcgaacaccagaaggtggtgaagggcaaccagaagagactggagagcctgcgggagctggccggcaaggaaaacctggaataccctagcgtgaccctgccacctcagcctcacaccaaggagggcgttgatgcctacaacgaagtgatcgcccgggtgcgaatgtgggtgaacctgaacctgtggcagaagctgaagctaagcagagatgatgccaagcctctgctgagactgaagggattcccttcctttcctctggtcgagagacaggccaacgaagtggactggtgggacatggtgtgtaacgtgaagaagctgatcaacgagaaaaaggaggatggcaaggtgttttggcagaatctggctggctacaagagacaggaagccctgagaccatacctgagcagcgaggaagatcggaagaagggaaagaaattcgctcggtaccagctgggcgacctgctgctgcacctggaaaagaagcacggcgaggactggggaaaggtgtacgacgaggcctgggagcggattgacaagaaagtggaaggcctgagcaagcacatcaagctggaagaggaacggagaagcgaggacgcccagagcaaggccgccctgaccgactggctgcgggctaaggccagcttcgtgatcgagggcctgaaggaggccgacaaggacgagttctgcagatgcgagctgaagctgcagaagtggtacggggacctgcggggaaagcccttcgccatcgaagccgagaacagcatcctggacatcagcggcttcagcaagcagtacaactgtgccttcatctggcagaaggacggcgtgaagaagctgaacctgtacctgatcatcaactacttcaagggcggcaagctgcggttcaagaagatcaaacctgaagccttcgaagccaacagattctacaccgtgatcaacaaaaagagcggcgagatcgtgcccatggaggtgaacttcaacttcgacgaccccaacctgatcatcctgcctctggcctttggcaagagacagggcagagaattcatctggaacgacctgctgtccctggaaaccggcagcctgaagctggccaacggaagagtgatcgagaagacactgtacaacagaagaacccggcaggatgagcctgccctgttcgtggccctgaccttcgagcggcgggaggtcctggactcctccaatatcaaaccaatgaacctgatcggcgtggcaagaggcgaaaacatccccgccgtgatcgccctgaccgaccccgagggctgcccactgagccggtttaaggatagcctgggaaacccaacccacatcctgagaatcggcgagagctataaggagaagcagcggaccatccaggccaagaaggaggtggagcagcggagagccggcggctacagccggaagtacgccagcaaagccaagaatctggcagacgatatggtgagaaacaccgctagagatctgctgtactacgccgtgacccaggatgccatgctgatcttcgccaacctgagccggggcttcggccggcagggcaagcggaccttcatggccgagagacagtacacacggatggaggactggctgaccgccaagctggcctacgagggcctgagcaagacctacctgtccaagacactggcccagtacacctccaagacatgcagcaactgtgggtttaccatcaccagcgccgactacgacagggtgctggagaagctgaagaagacagcaacaggctggatgaccacaattaacggcaaggagctgaaggtggagggccagattacctactacaacagatacaagagacagaacgtagtcaaggacctgtccgtcgagctggatagactgagcgaagaatctgtgaacaacgacatctcctcctggacaaagggcagaagcggagaagctctgagcctcctgaagaaaagattctcccatagacccgtgcaggagaagttcgtgtgcctgaactgcggcttcgagacacacgcagccgagcaagccgccctgaacatcgccagatcctggctgttcctgcggagccaggagtacaagaaataccagacaaacaagacaaccggcaacaccgataagagagccttcgtcgagacctggcagtccttttaccggaagaagcttaaggaggtgtggaaacctgccgtgcggtctggcggatctggcggaggctccacccaggtgagcctgaccttcgacgacgtggccgtgaagctgacctgggaggagtggcagctgctggaccccgcccagaaggacctgtacagggacgtgatgctggagaactacagcaacctggtgagcgtgggctaccaggtgagcaagcccgacgccctgagcaggctggagaggggcgagcccccctggagcatcgaggacaagatccacaccaggaccttcagcggcgagaggccctacggcggcccaagcagcggcgcccctcctcccagcggcggcagcccagccggctccccaacctctaccgaggagggcacctctgagtccgccacccccgagagcggccctggcacctccaccgagcccagcgagggcagcgcacccggcagccctgccggcagccccacctccacagaggagggaaccagcaccgagcccagcgaaggcagcgccccaggcaccagcaccgagcctagtgagcaggagattaaacggatcaacaagatcagaagaagacttgtgaaagacagcaacaccaagaaggccggcaagacaggccccatgaaaaccctgctggttagagtgatgacacccgatctgagagagcggctggaaaacctgagaaagaagcctgaaaatatcccccagcccatcagcaatacatctagagccaacctgaataagctgctgaccgattacaccgaaatgaagaaggcgatcctgcatgtgtactgggaagagttccagaaggaccctgtgggcctgatgagccgggtggcccagcctgccagcaagaagatcgatcagaacaagctgaaacctgagatggacgagaagggcaacctgaccaccgccggctttgcctgctctcagtgtggccagcccctgttcgtgtacaagctggagcaggtgtctgagaagggcaaggcttacaccaactacttcggacggtgcaatgtggccgagcacgaaaagctgatcctgctggcccagctgaagcccgagaaggatagcgacgaagccgtgacatatagcctgggaaagtttgggcagagggccctggatttctacagcattcatgtgaccaaggagtccacccaccccgtgaagcccctggcccagatcgccggaaacagatacgcctccggacctgtgggaaaggccctgagcgacgcatgtatgggcacaatcgcctccttcctgtctaagtaccaggacatcatcatcgaacaccagaaggtggtgaagggcaaccagaagagactggagagcctgcgggagctggccggcaaggaaaacctggaataccctagcgtgaccctgccacctcagcctcacaccaaggagggcgttgatgcctacaacgaagtgatcgcccgggtgcgaatgtgggtgaacctgaacctgtggcagaagctgaagctaagcagagatgatgccaagcctctgctgagactgaagggattcccttcctttcctctggtcgagagacaggccaacgaagtggactggtgggacatggtgtgtaacgtgaagaagctgatcaacgagaaaaaggaggatggcaaggtgttttggcagaatctggctggctacaagagacaggaagccctgagaccatacctgagcagcgaggaagatcggaagaagggaaagaaattcgctcggtaccagctgggcgacctgctgctgcacctggaaaagaagcacggcgaggactggggaaaggtgtacgacgaggcctgggagcggattgacaagaaagtggaaggcctgagcaagcacatcaagctggaagaggaacggagaagcgaggacgcccagagcaaggccgccctgaccgactggctgcgggctaaggccagcttcgtgatcgagggcctgaaggaggccgacaaggacgagttctgcagatgcgagctgaagctgcagaagtggtacggggacctgcggggaaagcccttcgccatcgaagccgagaacagcatcctggacatcagcggcttcagcaagcagtacaactgtgccttcatctggcagaaggacggcgtgaagaagctgaacctgtacctgatcatcaactacttcaagggcggcaagctgcggttcaagaagatcaaacctgaagccttcgaagccaacagattctacaccgtgatcaacaaaaagagcggcgagatcgtgcccatggaggtgaacttcaacttcgacgaccccaacctgatcatcctgcctctggcctttggcaagagacagggcagagaattcatctggaacgacctgctgtccctggaaaccggcagcctgaagctggccaacggaagagtgatcgagaagacactgtacaacagaagaacccggcaggatgagcctgccctgttcgtggccctgaccttcgagcggcgggaggtcctggactcctccaatatcaaaccaatgaacctgatcggcgtggcaagaggcgaaaacatccccgccgtgatcgccctgaccgaccccgagggctgcccactgagccggtttaaggatagcctgggaaacccaacccacatcctgagaatcggcgagagctataaggagaagcagcggaccatccaggccaagaaggaggtggagcagcggagagccggcggctacagccggaagtacgccagcaaagccaagaatctggcagacgatatggtgagaaacaccgctagagatctgctgtactacgccgtgacccaggatgccatgctgatcttcgccaacctgagccggggcttcggccggcagggcaagcggaccttcatggccgagagacagtacacacggatggaggactggctgaccgccaagctggcctacgagggcctgagcaagacctacctgtccaagacactggcccagtacacctccaagacatgcagcaactgtgggtttaccatcaccagcgccgactacgacagggtgctggagaagctgaagaagacagcaacaggctggatgaccacaattaacggcaaggagctgaaggtggagggccagattacctactacaacagatacaagagacagaacgtagtcaaggacctgtccgtcgagctggatagactgagcgaagaatctgtgaacaacgacatctcctcctggacaaagggcagaagcggagaagctctgagcctcctgaagaaaagattctcccatagacccgtgcaggagaagttcgtgtgcctgaactgcggcttcgagacacacgcagccgagcaagccgccctgaacatcgccagatcctggctgttcctgcggagccaggagtacaagaaataccagacaaacaagacaaccggcaacaccgataagagagccttcgtcgagacctggcagtccttttaccggaagaagcttaaggaggtgtggaaacctgccgtgcggtctggcggatctggcggaggctcctacccaggtgagcctgaccttcgacgacgtggccgtgaagctgacctgggaggagtggcagctgctggaccccgcccagaaggacctgtacagggacgtgatgctggagaactacagcaacctggtgagcgtgggctaccaggtgagcaagcccgacgccctgagcaggctggagaggggcgagcccccctggagcatcgaggacaagatccacaccaggaccttcagcggcgagaggccctacggatctggctccggcagcggccccaagaaaaagagaaaagtctaagctgccttctgcggggcttgccttctggccatgcccttcttctctcccttgcacctgtacctcttggtctttgaataaagcctgagtaggaaggctagcaaaaaaaaaaaaaaaaaaaaaaaaaaaaaaaaaaaaaaaaaaaaaaaaaaaaaaaaaaaaaaaaaaaaaaaaaaaaaaaa

SEQ ID NO: 16797 - RNA, 9485 nt, synthetic construct
  source 1..9485: mol_type = other RNA
aggaaataagagagaaaagaagagtaagaagaaatataagagccaccatggcccctaagaagaagcgtaaagtgagccggatggaacgcctcgtctacgaggtgcggcagaagtgcagaaacatcgaggacatctgcatctcctgcggatctctgaacgtgaccctggagcacccactgttcatcggcggcatgtgccagaactgtaaaaactgttttctggagtgtgcctatcaatacgacgatgacggctaccagagctactgcaccatctgttgcggcggaagagaggtgctgatgtgtggaaataacaactgctgccggtgcttctgcgtggaatgcgtggacctgctggtgggccccggcgccgcccaggccgctattaaggaagatccttggaactgctacatgtgcggccacaagggcacatacggcctgctgagacggagagaggactggcctagcagactgcagatgttcttcgccaataaccacgaccaggagttcgacccccctaaggtgtaccctcccgtccccgccgagaagagaaagcccatccgggtcctgagcctgttcgatggcatcgccaccggtctgctggtgctgaaggacctgggcatccaggtggataggtacattgcctccgaggtgtgcgaggactccatcaccgtgggaatggtgcgtcatcagggcaagatcatgtacgtgggcgacgtgcggagcgtgacacagaagcatatccaggagtggggccctttcgacctggtgatcggcggcagcccttgcaatgacctgagcatcgtgaacccagcccggaagggcctgtacgagggaaccggcagactgttcttcgagttttacagactgctgcacgacgcccggcctaaggaaggcgacgaccggcccttcttttggctgttcgagaatgtggtggccatgggagtcagcgacaagcgggatattagccggttcctggagagcaaccccgtgatgatcgatgccaaggaagtgagcgccgcccaccgggccagatacttctggggcaatctgcctggcatgaacagacccctggccagcaccgtgaacgacaagctggagctgcaggagtgcctggagcacggccggatcgccaagttcagcaaggtgagaaccatcaccacccgaagcaacagcatcaaacaaggcaaggaccagcactttcctgtgttcatgaacgagaaggaggacatcctgtggtgtaccgagatggagagagtgttcgggttcccagtccactacacagatgtcagcaacatgtctagactggccagacagagactgctgggaagaagctggtccgtccctgtgatcagacacctgttcgcccctctgaaggagtacttcgcctgcgtgagcagcggcaacagcaacgccaacagccggggccccagcttctctagcggcctggtgccactgtccctgagagggagccacatgggccccatggagatctacaaaaccgtgagcgcctggaagcggcagcctgtgcgcgtgctgagcctgtttcggaatatcgataaagtcctgaaaagcctgggattcctggagagcggctctggctccggcggtggcaccctgaagtacgtggaggatgtgacaaacgtggtcagacgggatgtggagaagtggggccccttcgatctggtgtacggcagcacccaacccctgggcagctcttgtgaccggtgccctggctggtacatgtttcagttccaccggatcctgcagtacgccctgccgagacaggagtcccagcggccattcttttggattttcatggacaacttgctgctgaccgaggatgaccaggaaactaccactcggttcctgcagaccgaagccgtgaccctgcaggacgtgagaggccgggactaccagaacgccatgcgggtgtggtccaacatccctggactgaaaagcaagcacgcacctctgacccctaaagaagaggagtacctgcaggcccaggtgcggagcagaagcaagctggacgcccctaaggtggatctgctggtgaagaattgcctcctgcccctgagagagtacttcaagtatttcagccagaatagtctgcccctgggaggcagcggcggcggcgccctggtgacatttgaggacgtcgccgtgcggttcacccaggaggaatgggctctgctggatccttctcagaaaatcctgtaccgggacgtgatgagagagacataccggaatctgacctccgtgggcatcaactgggaatgttgggaccttgaagcctgcttcagaagcctgggaagaaacctgagagtgcaggtggtgaagagaaagtgcgagctgaccaacagcggcccctgcgccgagggcggcccaagcagcggcgcccctcctcccagcggcggcagcccagccggctccccaacctctaccgaggagggcacctctgagtccgccacccccgagagcggccctggcacctccaccgagcccagcgagggcagcgcacccggcagccctgccggcagccccacctccacagaggagggaaccagcaccgagcccagcgaaggcagcgccccaggcaccagcaccgagcctagtgagcaggagattaaacggatcaacaagatcagaagaagacttgtgaaagacagcaacaccaagaaggccggcaagacaggccccatgaaaaccctgctggttagagtgatgacacccgatctgagagagcggctggaaaacctgagaaagaagcctgaaaatatcccccagcccatcagcaatacatctagagccaacctgaataagctgctgaccgattacaccgaaatgaagaaggcgatcctgcatgtgtactgggaagagttccagaaggaccctgtgggcctgatgagccgggtggcccagcctgccagcaagaagatcgatcagaacaagctgaaacctgagatggacgagaagggcaacctgaccaccgccggctttgcctgctctcagtgtggccagcccctgttcgtgtacaagctggagcaggtgtctgagaagggcaaggcttacaccaactacttcggacggtgcaatgtggccgagcacgaaaagctgatcctgctggcccagctgaagcccgagaaggatagcgacgaagccgtgacatatagcctgggaaagtttgggcagagggccctggatttctacagcattcatgtgaccaaggagtccacccaccccgtgaagcccctggcccagatcgccggaaacagatacgcctccggacctgtgggaaaggccctgagcgacgcatgtatgggcacaatcgcctccttcctgtctaagtaccaggacatcatcatcgaacaccagaaggtggtgaagggcaaccagaagagactggagagcctgcgggagctggccggcaaggaaaacctggaataccctagcgtgaccctgccacctcagcctcacaccaaggagggcgttgatgcctacaacgaagtgatcgcccgggtgcgaatgtgggtgaacctgaacctgtggcagaagctgaagctaagcagagatgatgccaagcctctgctgagactgaagggattcccttcctttcctctggtcgagagacaggccaacgaagtggactggtgggacatggtgtgtaacgtgaagaagctgatcaacgagaaaaaggaggatggcaaggtgttttggcagaatctggctggctacaagagacaggaagccctgagaccatacctgagcagcgaggaagatcggaagaagggaaagaaattcgctcggtaccagctgggcgacctgctgctgcacctggaaaagaagcacggcgaggactggggaaaggtgtacgacgaggcctgggagcggattgacaagaaagtggaaggcctgagcaagcacatcaagctggaagaggaacggagaagcgaggacgcccagagcaaggccgccctgaccgactggctgcgggctaaggccagcttcgtgatcgagggcctgaaggaggccgacaaggacgagttctgcagatgcgagctgaagctgcagaagtggtacggggacctgcggggaaagcccttcgccatcgaagccgagaacagcatcctggacatcagcggcttcagcaagcagtacaactgtgccttcatctggcagaaggacggcgtgaagaagctgaacctgtacctgatcatcaactacttcaagggcggcaagctgcggttcaagaagatcaaacctgaagccttcgaagccaacagattctacaccgtgatcaacaaaaagagcggcgagatcgtgcccatggaggtgaacttcaacttcgacgaccccaacctgatcatcctgcctctggcctttggcaagagacagggcagagaattcatctggaacgacctgctgtccctggaaaccggcagcctgaagctggccaacggaagagtgatcgagaagacactgtacaacagaagaacccggcaggatgagcctgccctgttcgtggccctgaccttcgagcggcgggaggtcctggactcctccaatatcaaaccaatgaacctgatcggcgtggcaagaggcgaaaacatccccgccgtgatcgccctgaccgaccccgagggctgcccactgagccggtttaaggatagcctgggaaacccaacccacatcctgagaatcggcgagagctataaggagaagcagcggaccatccaggccaagaaggaggtggagcagcggagagccggcggctacagccggaagtacgccagcaaagccaagaatctggcagacgatatggtgagaaacaccgctagagatctgctgtactacgccgtgacccaggatgccatgctgatcttcgccaacctgagccggggcttcggccggcagggcaagcggaccttcatggccgagagacagtacacacggatggaggactggctgaccgccaagctggcctacgagggcctgagcaagacctacctgtccaagacactggcccagtacacctccaagacatgcagcaactgtgggtttaccatcaccagcgccgactacgacagggtgctggagaagctgaagaagacagcaacaggctggatgaccacaattaacggcaaggagctgaaggtggagggccagattacctactacaacagatacaagagacagaacgtagtcaaggacctgtccgtcgagctggatagactgagcgaagaatctgtgaacaacgacatctcctcctggacaaagggcagaagcggagaagctctgagcctcctgaagaaaagattctcccatagacccgtgcaggagaagttcgtgtgcctgaactgcggcttcgagacacacgcagccgagcaagccgccctgaacatcgccagatcctggctgttcctgcggagccaggagtacaagaaataccagacaaacaagacaaccggcaacaccgataagagagccttcgtcgagacctggcagtccttttaccggaagaagcttaaggaggtgtggaaacctgccgtgcggtctggcggatctggcggaggctccatggccgccgccgccctggtgaacaccccccagggccacgtgaccttcgaggacatcgccgtgtacttcagccaggaggagtggggcctgctggacgaggcccagaggtgcctgtaccacgacgtgatgctggagaacttcagcctgatggccagcgtgggctgcctgcacggcatcgaggccgaggaggcccccagcgagcagaccgtgagcgcccagggcgccagccaggccaggacccccggcggcccaagcagcggcgcccctcctcccagcggcggcagcccagccggctccccaacctctaccgaggagggcacctctgagtccgccacccccgagagcggccctggcacctccaccgagcccagcgagggcagcgcacccggcagccctgccggcagccccacctccacagaggagggaaccagcaccgagcccagcgaaggcagcgccccaggcaccagcaccgagcctagtgagcaggagattaaacggatcaacaagatcagaagaagacttgtgaaagacagcaacaccaagaaggccggcaagacaggccccatgaaaaccctgctggttagagtgatgacacccgatctgagagagcggctggaaaacctgagaaagaagcctgaaaatatcccccagcccatcagcaatacatctagagccaacctgaataagctgctgaccgattacaccgaaatgaagaaggcgatcctgcatgtgtactgggaagagttccagaaggaccctgtgggcctgatgagccgggtggcccagcctgccagcaagaagatcgatcagaacaagctgaaacctgagatggacgagaagggcaacctgaccaccgccggctttgcctgctctcagtgtggccagcccctgttcgtgtacaagctggagcaggtgtctgagaagggcaaggcttacaccaactacttcggacggtgcaatgtggccgagcacgaaaagctgatcctgctggcccagctgaagcccgagaaggatagcgacgaagccgtgacatatagcctgggaaagtttgggcagagggccctggatttctacagcattcatgtgaccaaggagtccacccaccccgtgaagcccctggcccagatcgccggaaacagatacgcctccggacctgtgggaaaggccctgagcgacgcatgtatgggcacaatcgcctccttcctgtctaagtaccaggacatcatcatcgaacaccagaaggtggtgaagggcaaccagaagagactggagagcctgcgggagctggccggcaaggaaaacctggaataccctagcgtgaccctgccacctcagcctcacaccaaggagggcgttgatgcctacaacgaagtgatcgcccgggtgcgaatgtgggtgaacctgaacctgtggcagaagctgaagctaagcagagatgatgccaagcctctgctgagactgaagggattcccttcctttcctctggtcgagagacaggccaacgaagtggactggtgggacatggtgtgtaacgtgaagaagctgatcaacgagaaaaaggaggatggcaaggtgttttggcagaatctggctggctacaagagacaggaagccctgagaccatacctgagcagcgaggaagatcggaagaagggaaagaaattcgctcggtaccagctgggcgacctgctgctgcacctggaaaagaagcacggcgaggactggggaaaggtgtacgacgaggcctgggagcggattgacaagaaagtggaaggcctgagcaagcacatcaagctggaagaggaacggagaagcgaggacgcccagagcaaggccgccctgaccgactggctgcgggctaaggccagcttcgtgatcgagggcctgaaggaggccgacaaggacgagttctgcagatgcgagctgaagctgcagaagtggtacggggacctgcggggaaagcccttcgccatcgaagccgagaacagcatcctggacatcagcggcttcagcaagcagtacaactgtgccttcatctggcagaaggacggcgtgaagaagctgaacctgtacctgatcatcaactacttcaagggcggcaagctgcggttcaagaagatcaaacctgaagccttcgaagccaacagattctacaccgtgatcaacaaaaagagcggcgagatcgtgcccatggaggtgaacttcaacttcgacgaccccaacctgatcatcctgcctctggcctttggcaagagacagggcagagaattcatctggaacgacctgctgtccctggaaaccggcagcctgaagctggccaacggaagagtgatcgagaagacactgtacaacagaagaacccggcaggatgagcctgccctgttcgtggccctgaccttcgagcggcgggaggtcctggactcctccaatatcaaaccaatgaacctgatcggcgtggcaagaggcgaaaacatccccgccgtgatcgccctgaccgaccccgagggctgcccactgagccggtttaaggatagcctgggaaacccaacccacatcctgagaatcggcgagagctataaggagaagcagcggaccatccaggccaagaaggaggtggagcagcggagagccggcggctacagccggaagtacgccagcaaagccaagaatctggcagacgatatggtgagaaacaccgctagagatctgctgtactacgccgtgacccaggatgccatgctgatcttcgccaacctgagccggggcttcggccggcagggcaagcggaccttcatggccgagagacagtacacacggatggaggactggctgaccgccaagctggcctacgagggcctgagcaagacctacctgtccaagacactggcccagtacacctccaagacatgcagcaactgtgggtttaccatcaccagcgccgactacgacagggtgctggagaagctgaagaagacagcaacaggctggatgaccacaattaacggcaaggagctgaaggtggagggccagattacctactacaacagatacaagagacagaacgtagtcaaggacctgtccgtcgagctggatagactgagcgaagaatctgtgaacaacgacatctcctcctggacaaagggcagaagcggagaagctctgagcctcctgaagaaaagattctcccatagacccgtgcaggagaagttcgtgtgcctgaactgcggcttcgagacacacgcagccgagcaagccgccctgaacatcgccagatcctggctgttcctgcggagccaggagtacaagaaataccagacaaacaagacaaccggcaacaccgataagagagccttcgtcgagacctggcagtccttttaccggaagaagcttaaggaggtgtggaaacctgccgtgcggtctggcggatctggcggaggctcctatggccgccgccgccctggtgaacaccccccagggccacgtgaccttcgaggacatcgccgtgtacttcagccaggaggagtggggcctgctggacgaggcccagaggtgcctgtaccacgacgtgatgctggagaacttcagcctgatggccagcgtgggctgcctgcacggcatcgaggccgaggaggcccccagcgagcagaccgtgagcgcccagggcgccagccaggccaggacccccggatctggctccggcagcggccccaagaaaaagagaaaagtctaagctgccttctgcggggcttgccttctggccatgcccttcttctctcccttgcacctgtacctcttggtctttgaataaagcctgagtaggaaggctagcaaaaaaaaaaaaaaaaaaaaaaaaaaaaaaaaaaaaaaaaaaaaaaaaaaaaaaaaaaaaaaaaaaaaaaaaaaaaaaaa

SEQ ID NO: 16798 - RNA, 9485 nt, synthetic construct
  source 1..9485: mol_type = other RNA
aggaaataagagagaaaagaagagtaagaagaaatataagagccaccatggcccctaagaagaagcgtaaagtgagccggatggaacgcctcgtctacgaggtgcggcagaagtgcagaaacatcgaggacatctgcatctcctgcggatctctgaacgtgaccctggagcacccactgttcatcggcggcatgtgccagaactgtaaaaactgttttctggagtgtgcctatcaatacgacgatgacggctaccagagctactgcaccatctgttgcggcggaagagaggtgctgatgtgtggaaataacaactgctgccggtgcttctgcgtggaatgcgtggacctgctggtgggccccggcgccgcccaggccgctattaaggaagatccttggaactgctacatgtgcggccacaagggcacatacggcctgctgagacggagagaggactggcctagcagactgcagatgttcttcgccaataaccacgaccaggagttcgacccccctaaggtgtaccctcccgtccccgccgagaagagaaagcccatccgggtcctgagcctgttcgatggcatcgccaccggtctgctggtgctgaaggacctgggcatccaggtggataggtacattgcctccgaggtgtgcgaggactccatcaccgtgggaatggtgcgtcatcagggcaagatcatgtacgtgggcgacgtgcggagcgtgacacagaagcatatccaggagtggggccctttcgacctggtgatcggcggcagcccttgcaatgacctgagcatcgtgaacccagcccggaagggcctgtacgagggaaccggcagactgttcttcgagttttacagactgctgcacgacgcccggcctaaggaaggcgacgaccggcccttcttttggctgttcgagaatgtggtggccatgggagtcagcgacaagcgggatattagccggttcctggagagcaaccccgtgatgatcgatgccaaggaagtgagcgccgcccaccgggccagatacttctggggcaatctgcctggcatgaacagacccctggccagcaccgtgaacgacaagctggagctgcaggagtgcctggagcacggccggatcgccaagttcagcaaggtgagaaccatcaccacccgaagcaacagcatcaaacaaggcaaggaccagcactttcctgtgttcatgaacgagaaggaggacatcctgtggtgtaccgagatggagagagtgttcgggttcccagtccactacacagatgtcagcaacatgtctagactggccagacagagactgctgggaagaagctggtccgtccctgtgatcagacacctgttcgcccctctgaaggagtacttcgcctgcgtgagcagcggcaacagcaacgccaacagccggggccccagcttctctagcggcctggtgccactgtccctgagagggagccacatgggccccatggagatctacaaaaccgtgagcgcctggaagcggcagcctgtgcgcgtgctgagcctgtttcggaatatcgataaagtcctgaaaagcctgggattcctggagagcggctctggctccggcggtggcaccctgaagtacgtggaggatgtgacaaacgtggtcagacgggatgtggagaagtggggccccttcgatctggtgtacggcagcacccaacccctgggcagctcttgtgaccggtgccctggctggtacatgtttcagttccaccggatcctgcagtacgccctgccgagacaggagtcccagcggccattcttttggattttcatggacaacttgctgctgaccgaggatgaccaggaaactaccactcggttcctgcagaccgaagccgtgaccctgcaggacgtgagaggccgggactaccagaacgccatgcgggtgtggtccaacatccctggactgaaaagcaagcacgcacctctgacccctaaagaagaggagtacctgcaggcccaggtgcggagcagaagcaagctggacgcccctaaggtggatctgctggtgaagaattgcctcctgcccctgagagagtacttcaagtatttcagccagaatagtctgcccctgggaggcagcggcggcggcgccctggtgacatttgaggacgtcgccgtgcggttcacccaggaggaatgggctctgctggatccttctcagaaaatcctgtaccgggacgtgatgagagagacataccggaatctgacctccgtgggcatcaactgggaatgttgggaccttgaagcctgcttcagaagcctgggaagaaacctgagagtgcaggtggtgaagagaaagtgcgagctgaccaacagcggcccctgcgccgagggcggcccaagcagcggcgcccctcctcccagcggcggcagcccagccggctccccaacctctaccgaggagggcacctctgagtccgccacccccgagagcggccctggcacctccaccgagcccagcgagggcagcgcacccggcagccctgccggcagccccacctccacagaggagggaaccagcaccgagcccagcgaaggcagcgccccaggcaccagcaccgagcctagtgagcaggagattaaacggatcaacaagatcagaagaagacttgtgaaagacagcaacaccaagaaggccggcaagacaggccccatgaaaaccctgctggttagagtgatgacacccgatctgagagagcggctggaaaacctgagaaagaagcctgaaaatatcccccagcccatcagcaatacatctagagccaacctgaataagctgctgaccgattacaccgaaatgaagaaggcgatcctgcatgtgtactgggaagagttccagaaggaccctgtgggcctgatgagccgggtggcccagcctgccagcaagaagatcgatcagaacaagctgaaacctgagatggacgagaagggcaacctgaccaccgccggctttgcctgctctcagtgtggccagcccctgttcgtgtacaagctggagcaggtgtctgagaagggcaaggcttacaccaactacttcggacggtgcaatgtggccgagcacgaaaagctgatcctgctggcccagctgaagcccgagaaggatagcgacgaagccgtgacatatagcctgggaaagtttgggcagagggccctggatttctacagcattcatgtgaccaaggagtccacccaccccgtgaagcccctggcccagatcgccggaaacagatacgcctccggacctgtgggaaaggccctgagcgacgcatgtatgggcacaatcgcctccttcctgtctaagtaccaggacatcatcatcgaacaccagaaggtggtgaagggcaaccagaagagactggagagcctgcgggagctggccggcaaggaaaacctggaataccctagcgtgaccctgccacctcagcctcacaccaaggagggcgttgatgcctacaacgaagtgatcgcccgggtgcgaatgtgggtgaacctgaacctgtggcagaagctgaagctaagcagagatgatgccaagcctctgctgagactgaagggattcccttcctttcctctggtcgagagacaggccaacgaagtggactggtgggacatggtgtgtaacgtgaagaagctgatcaacgagaaaaaggaggatggcaaggtgttttggcagaatctggctggctacaagagacaggaagccctgagaccatacctgagcagcgaggaagatcggaagaagggaaagaaattcgctcggtaccagctgggcgacctgctgctgcacctggaaaagaagcacggcgaggactggggaaaggtgtacgacgaggcctgggagcggattgacaagaaagtggaaggcctgagcaagcacatcaagctggaagaggaacggagaagcgaggacgcccagagcaaggccgccctgaccgactggctgcgggctaaggccagcttcgtgatcgagggcctgaaggaggccgacaaggacgagttctgcagatgcgagctgaagctgcagaagtggtacggggacctgcggggaaagcccttcgccatcgaagccgagaacagcatcctggacatcagcggcttcagcaagcagtacaactgtgccttcatctggcagaaggacggcgtgaagaagctgaacctgtacctgatcatcaactacttcaagggcggcaagctgcggttcaagaagatcaaacctgaagccttcgaagccaacagattctacaccgtgatcaacaaaaagagcggcgagatcgtgcccatggaggtgaacttcaacttcgacgaccccaacctgatcatcctgcctctggcctttggcaagagacagggcagagaattcatctggaacgacctgctgtccctggaaaccggcagcctgaagctggccaacggaagagtgatcgagaagacactgtacaacagaagaacccggcaggatgagcctgccctgttcgtggccctgaccttcgagcggcgggaggtcctggactcctccaatatcaaaccaatgaacctgatcggcgtggcaagaggcgaaaacatccccgccgtgatcgccctgaccgaccccgagggctgcccactgagccggtttaaggatagcctgggaaacccaacccacatcctgagaatcggcgagagctataaggagaagcagcggaccatccaggccaagaaggaggtggagcagcggagagccggcggctacagccggaagtacgccagcaaagccaagaatctggcagacgatatggtgagaaacaccgctagagatctgctgtactacgccgtgacccaggatgccatgctgatcttcgccaacctgagccggggcttcggccggcagggcaagcggaccttcatggccgagagacagtacacacggatggaggactggctgaccgccaagctggcctacgagggcctgagcaagacctacctgtccaagacactggcccagtacacctccaagacatgcagcaactgtgggtttaccatcaccagcgccgactacgacagggtgctggagaagctgaagaagacagcaacaggctggatgaccacaattaacggcaaggagctgaaggtggagggccagattacctactacaacagatacaagagacagaacgtagtcaaggacctgtccgtcgagctggatagactgagcgaagaatctgtgaacaacgacatctcctcctggacaaagggcagaagcggagaagctctgagcctcctgaagaaaagattctcccatagacccgtgcaggagaagttcgtgtgcctgaactgcggcttcgagacacacgcagccgagcaagccgccctgaacatcgccagatcctggctgttcctgcggagccaggagtacaagaaataccagacaaacaagacaaccggcaacaccgataagagagccttcgtcgagacctggcagtccttttaccggaagaagcttaaggaggtgtggaaacctgccgtgcggtctggcggatctggcggaggctccatggagctgctgaccttcaaggacgtggccatcgagttcagccccgaggagtggaagtgcctggacaccagccagcagaacctgtacagggacgtgatgctggagaactacaggaacctggtgagcctgggcgtgaccatcagcaaccccgacctggtgacctgcctggagcagaggaaggagccctacaacctgaagatccacgagaccgccgccaggccccccggccactacaggaagaggggcggcccaagcagcggcgcccctcctcccagcggcggcagcccagccggctccccaacctctaccgaggagggcacctctgagtccgccacccccgagagcggccctggcacctccaccgagcccagcgagggcagcgcacccggcagccctgccggcagccccacctccacagaggagggaaccagcaccgagcccagcgaaggcagcgccccaggcaccagcaccgagcctagtgagcaggagattaaacggatcaacaagatcagaagaagacttgtgaaagacagcaacaccaagaaggccggcaagacaggccccatgaaaaccctgctggttagagtgatgacacccgatctgagagagcggctggaaaacctgagaaagaagcctgaaaatatcccccagcccatcagcaatacatctagagccaacctgaataagctgctgaccgattacaccgaaatgaagaaggcgatcctgcatgtgtactgggaagagttccagaaggaccctgtgggcctgatgagccgggtggcccagcctgccagcaagaagatcgatcagaacaagctgaaacctgagatggacgagaagggcaacctgaccaccgccggctttgcctgctctcagtgtggccagcccctgttcgtgtacaagctggagcaggtgtctgagaagggcaaggcttacaccaactacttcggacggtgcaatgtggccgagcacgaaaagctgatcctgctggcccagctgaagcccgagaaggatagcgacgaagccgtgacatatagcctgggaaagtttgggcagagggccctggatttctacagcattcatgtgaccaaggagtccacccaccccgtgaagcccctggcccagatcgccggaaacagatacgcctccggacctgtgggaaaggccctgagcgacgcatgtatgggcacaatcgcctccttcctgtctaagtaccaggacatcatcatcgaacaccagaaggtggtgaagggcaaccagaagagactggagagcctgcgggagctggccggcaaggaaaacctggaataccctagcgtgaccctgccacctcagcctcacaccaaggagggcgttgatgcctacaacgaagtgatcgcccgggtgcgaatgtgggtgaacctgaacctgtggcagaagctgaagctaagcagagatgatgccaagcctctgctgagactgaagggattcccttcctttcctctggtcgagagacaggccaacgaagtggactggtgggacatggtgtgtaacgtgaagaagctgatcaacgagaaaaaggaggatggcaaggtgttttggcagaatctggctggctacaagagacaggaagccctgagaccatacctgagcagcgaggaagatcggaagaagggaaagaaattcgctcggtaccagctgggcgacctgctgctgcacctggaaaagaagcacggcgaggactggggaaaggtgtacgacgaggcctgggagcggattgacaagaaagtggaaggcctgagcaagcacatcaagctggaagaggaacggagaagcgaggacgcccagagcaaggccgccctgaccgactggctgcgggctaaggccagcttcgtgatcgagggcctgaaggaggccgacaaggacgagttctgcagatgcgagctgaagctgcagaagtggtacggggacctgcggggaaagcccttcgccatcgaagccgagaacagcatcctggacatcagcggcttcagcaagcagtacaactgtgccttcatctggcagaaggacggcgtgaagaagctgaacctgtacctgatcatcaactacttcaagggcggcaagctgcggttcaagaagatcaaacctgaagccttcgaagccaacagattctacaccgtgatcaacaaaaagagcggcgagatcgtgcccatggaggtgaacttcaacttcgacgaccccaacctgatcatcctgcctctggcctttggcaagagacagggcagagaattcatctggaacgacctgctgtccctggaaaccggcagcctgaagctggccaacggaagagtgatcgagaagacactgtacaacagaagaacccggcaggatgagcctgccctgttcgtggccctgaccttcgagcggcgggaggtcctggactcctccaatatcaaaccaatgaacctgatcggcgtggcaagaggcgaaaacatccccgccgtgatcgccctgaccgaccccgagggctgcccactgagccggtttaaggatagcctgggaaacccaacccacatcctgagaatcggcgagagctataaggagaagcagcggaccatccaggccaagaaggaggtggagcagcggagagccggcggctacagccggaagtacgccagcaaagccaagaatctggcagacgatatggtgagaaacaccgctagagatctgctgtactacgccgtgacccaggatgccatgctgatcttcgccaacctgagccggggcttcggccggcagggcaagcggaccttcatggccgagagacagtacacacggatggaggactggctgaccgccaagctggcctacgagggcctgagcaagacctacctgtccaagacactggcccagtacacctccaagacatgcagcaactgtgggtttaccatcaccagcgccgactacgacagggtgctggagaagctgaagaagacagcaacaggctggatgaccacaattaacggcaaggagctgaaggtggagggccagattacctactacaacagatacaagagacagaacgtagtcaaggacctgtccgtcgagctggatagactgagcgaagaatctgtgaacaacgacatctcctcctggacaaagggcagaagcggagaagctctgagcctcctgaagaaaagattctcccatagacccgtgcaggagaagttcgtgtgcctgaactgcggcttcgagacacacgcagccgagcaagccgccctgaacatcgccagatcctggctgttcctgcggagccaggagtacaagaaataccagacaaacaagacaaccggcaacaccgataagagagccttcgtcgagacctggcagtccttttaccggaagaagcttaaggaggtgtggaaacctgccgtgcggtctggcggatctggcggaggctcctatggagctgctgaccttcaaggacgtggccatcgagttcagccccgaggagtggaagtgcctggacaccagccagcagaacctgtacagggacgtgatgctggagaactacaggaacctggtgagcctgggcgtgaccatcagcaaccccgacctggtgacctgcctggagcagaggaaggagccctacaacctgaagatccacgagaccgccgccaggccccccggccactacaggaagaggggatctggctccggcagcggccccaagaaaaagagaaaagtctaagctgccttctgcggggcttgccttctggccatgcccttcttctctcccttgcacctgtacctcttggtctttgaataaagcctgagtaggaaggctagcaaaaaaaaaaaaaaaaaaaaaaaaaaaaaaaaaaaaaaaaaaaaaaaaaaaaaaaaaaaaaaaaaaaaaaaaaaaaaaaa

SEQ ID NO: 16799 - RNA, 9485 nt, synthetic construct
  source 1..9485: mol_type = other RNA
aggaaataagagagaaaagaagagtaagaagaaatataagagccaccatggcccctaagaagaagcgtaaagtgagccggatggaacgcctcgtctacgaggtgcggcagaagtgcagaaacatcgaggacatctgcatctcctgcggatctctgaacgtgaccctggagcacccactgttcatcggcggcatgtgccagaactgtaaaaactgttttctggagtgtgcctatcaatacgacgatgacggctaccagagctactgcaccatctgttgcggcggaagagaggtgctgatgtgtggaaataacaactgctgccggtgcttctgcgtggaatgcgtggacctgctggtgggccccggcgccgcccaggccgctattaaggaagatccttggaactgctacatgtgcggccacaagggcacatacggcctgctgagacggagagaggactggcctagcagactgcagatgttcttcgccaataaccacgaccaggagttcgacccccctaaggtgtaccctcccgtccccgccgagaagagaaagcccatccgggtcctgagcctgttcgatggcatcgccaccggtctgctggtgctgaaggacctgggcatccaggtggataggtacattgcctccgaggtgtgcgaggactccatcaccgtgggaatggtgcgtcatcagggcaagatcatgtacgtgggcgacgtgcggagcgtgacacagaagcatatccaggagtggggccctttcgacctggtgatcggcggcagcccttgcaatgacctgagcatcgtgaacccagcccggaagggcctgtacgagggaaccggcagactgttcttcgagttttacagactgctgcacgacgcccggcctaaggaaggcgacgaccggcccttcttttggctgttcgagaatgtggtggccatgggagtcagcgacaagcgggatattagccggttcctggagagcaaccccgtgatgatcgatgccaaggaagtgagcgccgcccaccgggccagatacttctggggcaatctgcctggcatgaacagacccctggccagcaccgtgaacgacaagctggagctgcaggagtgcctggagcacggccggatcgccaagttcagcaaggtgagaaccatcaccacccgaagcaacagcatcaaacaaggcaaggaccagcactttcctgtgttcatgaacgagaaggaggacatcctgtggtgtaccgagatggagagagtgttcgggttcccagtccactacacagatgtcagcaacatgtctagactggccagacagagactgctgggaagaagctggtccgtccctgtgatcagacacctgttcgcccctctgaaggagtacttcgcctgcgtgagcagcggcaacagcaacgccaacagccggggccccagcttctctagcggcctggtgccactgtccctgagagggagccacatgggccccatggagatctacaaaaccgtgagcgcctggaagcggcagcctgtgcgcgtgctgagcctgtttcggaatatcgataaagtcctgaaaagcctgggattcctggagagcggctctggctccggcggtggcaccctgaagtacgtggaggatgtgacaaacgtggtcagacgggatgtggagaagtggggccccttcgatctggtgtacggcagcacccaacccctgggcagctcttgtgaccggtgccctggctggtacatgtttcagttccaccggatcctgcagtacgccctgccgagacaggagtcccagcggccattcttttggattttcatggacaacttgctgctgaccgaggatgaccaggaaactaccactcggttcctgcagaccgaagccgtgaccctgcaggacgtgagaggccgggactaccagaacgccatgcgggtgtggtccaacatccctggactgaaaagcaagcacgcacctctgacccctaaagaagaggagtacctgcaggcccaggtgcggagcagaagcaagctggacgcccctaaggtggatctgctggtgaagaattgcctcctgcccctgagagagtacttcaagtatttcagccagaatagtctgcccctgggaggcagcggcggcggcgccctggtgacatttgaggacgtcgccgtgcggttcacccaggaggaatgggctctgctggatccttctcagaaaatcctgtaccgggacgtgatgagagagacataccggaatctgacctccgtgggcatcaactgggaatgttgggaccttgaagcctgcttcagaagcctgggaagaaacctgagagtgcaggtggtgaagagaaagtgcgagctgaccaacagcggcccctgcgccgagggcggcccaagcagcggcgcccctcctcccagcggcggcagcccagccggctccccaacctctaccgaggagggcacctctgagtccgccacccccgagagcggccctggcacctccaccgagcccagcgagggcagcgcacccggcagccctgccggcagccccacctccacagaggagggaaccagcaccgagcccagcgaaggcagcgccccaggcaccagcaccgagcctagtgagcaggagattaaacggatcaacaagatcagaagaagacttgtgaaagacagcaacaccaagaaggccggcaagacaggccccatgaaaaccctgctggttagagtgatgacacccgatctgagagagcggctggaaaacctgagaaagaagcctgaaaatatcccccagcccatcagcaatacatctagagccaacctgaataagctgctgaccgattacaccgaaatgaagaaggcgatcctgcatgtgtactgggaagagttccagaaggaccctgtgggcctgatgagccgggtggcccagcctgccagcaagaagatcgatcagaacaagctgaaacctgagatggacgagaagggcaacctgaccaccgccggctttgcctgctctcagtgtggccagcccctgttcgtgtacaagctggagcaggtgtctgagaagggcaaggcttacaccaactacttcggacggtgcaatgtggccgagcacgaaaagctgatcctgctggcccagctgaagcccgagaaggatagcgacgaagccgtgacatatagcctgggaaagtttgggcagagggccctggatttctacagcattcatgtgaccaaggagtccacccaccccgtgaagcccctggcccagatcgccggaaacagatacgcctccggacctgtgggaaaggccctgagcgacgcatgtatgggcacaatcgcctccttcctgtctaagtaccaggacatcatcatcgaacaccagaaggtggtgaagggcaaccagaagagactggagagcctgcgggagctggccggcaaggaaaacctggaataccctagcgtgaccctgccacctcagcctcacaccaaggagggcgttgatgcctacaacgaagtgatcgcccgggtgcgaatgtgggtgaacctgaacctgtggcagaagctgaagctaagcagagatgatgccaagcctctgctgagactgaagggattcccttcctttcctctggtcgagagacaggccaacgaagtggactggtgggacatggtgtgtaacgtgaagaagctgatcaacgagaaaaaggaggatggcaaggtgttttggcagaatctggctggctacaagagacaggaagccctgagaccatacctgagcagcgaggaagatcggaagaagggaaagaaattcgctcggtaccagctgggcgacctgctgctgcacctggaaaagaagcacggcgaggactggggaaaggtgtacgacgaggcctgggagcggattgacaagaaagtggaaggcctgagcaagcacatcaagctggaagaggaacggagaagcgaggacgcccagagcaaggccgccctgaccgactggctgcgggctaaggccagcttcgtgatcgagggcctgaaggaggccgacaaggacgagttctgcagatgcgagctgaagctgcagaagtggtacggggacctgcggggaaagcccttcgccatcgaagccgagaacagcatcctggacatcagcggcttcagcaagcagtacaactgtgccttcatctggcagaaggacggcgtgaagaagctgaacctgtacctgatcatcaactacttcaagggcggcaagctgcggttcaagaagatcaaacctgaagccttcgaagccaacagattctacaccgtgatcaacaaaaagagcggcgagatcgtgcccatggaggtgaacttcaacttcgacgaccccaacctgatcatcctgcctctggcctttggcaagagacagggcagagaattcatctggaacgacctgctgtccctggaaaccggcagcctgaagctggccaacggaagagtgatcgagaagacactgtacaacagaagaacccggcaggatgagcctgccctgttcgtggccctgaccttcgagcggcgggaggtcctggactcctccaatatcaaaccaatgaacctgatcggcgtggcaagaggcgaaaacatccccgccgtgatcgccctgaccgaccccgagggctgcccactgagccggtttaaggatagcctgggaaacccaacccacatcctgagaatcggcgagagctataaggagaagcagcggaccatccaggccaagaaggaggtggagcagcggagagccggcggctacagccggaagtacgccagcaaagccaagaatctggcagacgatatggtgagaaacaccgctagagatctgctgtactacgccgtgacccaggatgccatgctgatcttcgccaacctgagccggggcttcggccggcagggcaagcggaccttcatggccgagagacagtacacacggatggaggactggctgaccgccaagctggcctacgagggcctgagcaagacctacctgtccaagacactggcccagtacacctccaagacatgcagcaactgtgggtttaccatcaccagcgccgactacgacagggtgctggagaagctgaagaagacagcaacaggctggatgaccacaattaacggcaaggagctgaaggtggagggccagattacctactacaacagatacaagagacagaacgtagtcaaggacctgtccgtcgagctggatagactgagcgaagaatctgtgaacaacgacatctcctcctggacaaagggcagaagcggagaagctctgagcctcctgaagaaaagattctcccatagacccgtgcaggagaagttcgtgtgcctgaactgcggcttcgagacacacgcagccgagcaagccgccctgaacatcgccagatcctggctgttcctgcggagccaggagtacaagaaataccagacaaacaagacaaccggcaacaccgataagagagccttcgtcgagacctggcagtccttttaccggaagaagcttaaggaggtgtggaaacctgccgtgcggtctggcggatctggcggaggctccagccagggcagcgtgaccttcagggacgtggccatcgacttcagccaggaggagtggaagtggctgcagcccgcccagagggacctgtacaggtgcgtgatgctggagaactacggccacctggtgagcctgggcctgagcatcagcaagcccgacgtggtgagcctgctggagcagggcaaggagccctggctgggcaagaggaacgtgaacagggacctgttcagcgtgagcgagagcagcggcggcccaagcagcggcgcccctcctcccagcggcggcagcccagccggctccccaacctctaccgaggagggcacctctgagtccgccacccccgagagcggccctggcacctccaccgagcccagcgagggcagcgcacccggcagccctgccggcagccccacctccacagaggagggaaccagcaccgagcccagcgaaggcagcgccccaggcaccagcaccgagcctagtgagcaggagattaaacggatcaacaagatcagaagaagacttgtgaaagacagcaacaccaagaaggccggcaagacaggccccatgaaaaccctgctggttagagtgatgacacccgatctgagagagcggctggaaaacctgagaaagaagcctgaaaatatcccccagcccatcagcaatacatctagagccaacctgaataagctgctgaccgattacaccgaaatgaagaaggcgatcctgcatgtgtactgggaagagttccagaaggaccctgtgggcctgatgagccgggtggcccagcctgccagcaagaagatcgatcagaacaagctgaaacctgagatggacgagaagggcaacctgaccaccgccggctttgcctgctctcagtgtggccagcccctgttcgtgtacaagctggagcaggtgtctgagaagggcaaggcttacaccaactacttcggacggtgcaatgtggccgagcacgaaaagctgatcctgctggcccagctgaagcccgagaaggatagcgacgaagccgtgacatatagcctgggaaagtttgggcagagggccctggatttctacagcattcatgtgaccaaggagtccacccaccccgtgaagcccctggcccagatcgccggaaacagatacgcctccggacctgtgggaaaggccctgagcgacgcatgtatgggcacaatcgcctccttcctgtctaagtaccaggacatcatcatcgaacaccagaaggtggtgaagggcaaccagaagagactggagagcctgcgggagctggccggcaaggaaaacctggaataccctagcgtgaccctgccacctcagcctcacaccaaggagggcgttgatgcctacaacgaagtgatcgcccgggtgcgaatgtgggtgaacctgaacctgtggcagaagctgaagctaagcagagatgatgccaagcctctgctgagactgaagggattcccttcctttcctctggtcgagagacaggccaacgaagtggactggtgggacatggtgtgtaacgtgaagaagctgatcaacgagaaaaaggaggatggcaaggtgttttggcagaatctggctggctacaagagacaggaagccctgagaccatacctgagcagcgaggaagatcggaagaagggaaagaaattcgctcggtaccagctgggcgacctgctgctgcacctggaaaagaagcacggcgaggactggggaaaggtgtacgacgaggcctgggagcggattgacaagaaagtggaaggcctgagcaagcacatcaagctggaagaggaacggagaagcgaggacgcccagagcaaggccgccctgaccgactggctgcgggctaaggccagcttcgtgatcgagggcctgaaggaggccgacaaggacgagttctgcagatgcgagctgaagctgcagaagtggtacggggacctgcggggaaagcccttcgccatcgaagccgagaacagcatcctggacatcagcggcttcagcaagcagtacaactgtgccttcatctggcagaaggacggcgtgaagaagctgaacctgtacctgatcatcaactacttcaagggcggcaagctgcggttcaagaagatcaaacctgaagccttcgaagccaacagattctacaccgtgatcaacaaaaagagcggcgagatcgtgcccatggaggtgaacttcaacttcgacgaccccaacctgatcatcctgcctctggcctttggcaagagacagggcagagaattcatctggaacgacctgctgtccctggaaaccggcagcctgaagctggccaacggaagagtgatcgagaagacactgtacaacagaagaacccggcaggatgagcctgccctgttcgtggccctgaccttcgagcggcgggaggtcctggactcctccaatatcaaaccaatgaacctgatcggcgtggcaagaggcgaaaacatccccgccgtgatcgccctgaccgaccccgagggctgcccactgagccggtttaaggatagcctgggaaacccaacccacatcctgagaatcggcgagagctataaggagaagcagcggaccatccaggccaagaaggaggtggagcagcggagagccggcggctacagccggaagtacgccagcaaagccaagaatctggcagacgatatggtgagaaacaccgctagagatctgctgtactacgccgtgacccaggatgccatgctgatcttcgccaacctgagccggggcttcggccggcagggcaagcggaccttcatggccgagagacagtacacacggatggaggactggctgaccgccaagctggcctacgagggcctgagcaagacctacctgtccaagacactggcccagtacacctccaagacatgcagcaactgtgggtttaccatcaccagcgccgactacgacagggtgctggagaagctgaagaagacagcaacaggctggatgaccacaattaacggcaaggagctgaaggtggagggccagattacctactacaacagatacaagagacagaacgtagtcaaggacctgtccgtcgagctggatagactgagcgaagaatctgtgaacaacgacatctcctcctggacaaagggcagaagcggagaagctctgagcctcctgaagaaaagattctcccatagacccgtgcaggagaagttcgtgtgcctgaactgcggcttcgagacacacgcagccgagcaagccgccctgaacatcgccagatcctggctgttcctgcggagccaggagtacaagaaataccagacaaacaagacaaccggcaacaccgataagagagccttcgtcgagacctggcagtccttttaccggaagaagcttaaggaggtgtggaaacctgccgtgcggtctggcggatctggcggaggctcctagccagggcagcgtgaccttcagggacgtggccatcgacttcagccaggaggagtggaagtggctgcagcccgcccagagggacctgtacaggtgcgtgatgctggagaactacggccacctggtgagcctgggcctgagcatcagcaagcccgacgtggtgagcctgctggagcagggcaaggagccctggctgggcaagaggaacgtgaacagggacctgttcagcgtgagcgagagcagcggatctggctccggcagcggccccaagaaaaagagaaaagtctaagctgccttctgcggggcttgccttctggccatgcccttcttctctcccttgcacctgtacctcttggtctttgaataaagcctgagtaggaaggctagcaaaaaaaaaaaaaaaaaaaaaaaaaaaaaaaaaaaaaaaaaaaaaaaaaaaaaaaaaaaaaaaaaaaaaaaaaaaaaaaa

SEQ ID NO: 16800 - RNA, 9485 nt, synthetic construct
  source 1..9485: mol_type = other RNA
aggaaataagagagaaaagaagagtaagaagaaatataagagccaccatggcccctaagaagaagcgtaaagtgagccggatggaacgcctcgtctacgaggtgcggcagaagtgcagaaacatcgaggacatctgcatctcctgcggatctctgaacgtgaccctggagcacccactgttcatcggcggcatgtgccagaactgtaaaaactgttttctggagtgtgcctatcaatacgacgatgacggctaccagagctactgcaccatctgttgcggcggaagagaggtgctgatgtgtggaaataacaactgctgccggtgcttctgcgtggaatgcgtggacctgctggtgggccccggcgccgcccaggccgctattaaggaagatccttggaactgctacatgtgcggccacaagggcacatacggcctgctgagacggagagaggactggcctagcagactgcagatgttcttcgccaataaccacgaccaggagttcgacccccctaaggtgtaccctcccgtccccgccgagaagagaaagcccatccgggtcctgagcctgttcgatggcatcgccaccggtctgctggtgctgaaggacctgggcatccaggtggataggtacattgcctccgaggtgtgcgaggactccatcaccgtgggaatggtgcgtcatcagggcaagatcatgtacgtgggcgacgtgcggagcgtgacacagaagcatatccaggagtggggccctttcgacctggtgatcggcggcagcccttgcaatgacctgagcatcgtgaacccagcccggaagggcctgtacgagggaaccggcagactgttcttcgagttttacagactgctgcacgacgcccggcctaaggaaggcgacgaccggcccttcttttggctgttcgagaatgtggtggccatgggagtcagcgacaagcgggatattagccggttcctggagagcaaccccgtgatgatcgatgccaaggaagtgagcgccgcccaccgggccagatacttctggggcaatctgcctggcatgaacagacccctggccagcaccgtgaacgacaagctggagctgcaggagtgcctggagcacggccggatcgccaagttcagcaaggtgagaaccatcaccacccgaagcaacagcatcaaacaaggcaaggaccagcactttcctgtgttcatgaacgagaaggaggacatcctgtggtgtaccgagatggagagagtgttcgggttcccagtccactacacagatgtcagcaacatgtctagactggccagacagagactgctgggaagaagctggtccgtccctgtgatcagacacctgttcgcccctctgaaggagtacttcgcctgcgtgagcagcggcaacagcaacgccaacagccggggccccagcttctctagcggcctggtgccactgtccctgagagggagccacatgggccccatggagatctacaaaaccgtgagcgcctggaagcggcagcctgtgcgcgtgctgagcctgtttcggaatatcgataaagtcctgaaaagcctgggattcctggagagcggctctggctccggcggtggcaccctgaagtacgtggaggatgtgacaaacgtggtcagacgggatgtggagaagtggggccccttcgatctggtgtacggcagcacccaacccctgggcagctcttgtgaccggtgccctggctggtacatgtttcagttccaccggatcctgcagtacgccctgccgagacaggagtcccagcggccattcttttggattttcatggacaacttgctgctgaccgaggatgaccaggaaactaccactcggttcctgcagaccgaagccgtgaccctgcaggacgtgagaggccgggactaccagaacgccatgcgggtgtggtccaacatccctggactgaaaagcaagcacgcacctctgacccctaaagaagaggagtacctgcaggcccaggtgcggagcagaagcaagctggacgcccctaaggtggatctgctggtgaagaattgcctcctgcccctgagagagtacttcaagtatttcagccagaatagtctgcccctgggaggcagcggcggcggcgccctggtgacatttgaggacgtcgccgtgcggttcacccaggaggaatgggctctgctggatccttctcagaaaatcctgtaccgggacgtgatgagagagacataccggaatctgacctccgtgggcatcaactgggaatgttgggaccttgaagcctgcttcagaagcctgggaagaaacctgagagtgcaggtggtgaagagaaagtgcgagctgaccaacagcggcccctgcgccgagggcggcccaagcagcggcgcccctcctcccagcggcggcagcccagccggctccccaacctctaccgaggagggcacctctgagtccgccacccccgagagcggccctggcacctccaccgagcccagcgagggcagcgcacccggcagccctgccggcagccccacctccacagaggagggaaccagcaccgagcccagcgaaggcagcgccccaggcaccagcaccgagcctagtgagcaggagattaaacggatcaacaagatcagaagaagacttgtgaaagacagcaacaccaagaaggccggcaagacaggccccatgaaaaccctgctggttagagtgatgacacccgatctgagagagcggctggaaaacctgagaaagaagcctgaaaatatcccccagcccatcagcaatacatctagagccaacctgaataagctgctgaccgattacaccgaaatgaagaaggcgatcctgcatgtgtactgggaagagttccagaaggaccctgtgggcctgatgagccgggtggcccagcctgccagcaagaagatcgatcagaacaagctgaaacctgagatggacgagaagggcaacctgaccaccgccggctttgcctgctctcagtgtggccagcccctgttcgtgtacaagctggagcaggtgtctgagaagggcaaggcttacaccaactacttcggacggtgcaatgtggccgagcacgaaaagctgatcctgctggcccagctgaagcccgagaaggatagcgacgaagccgtgacatatagcctgggaaagtttgggcagagggccctggatttctacagcattcatgtgaccaaggagtccacccaccccgtgaagcccctggcccagatcgccggaaacagatacgcctccggacctgtgggaaaggccctgagcgacgcatgtatgggcacaatcgcctccttcctgtctaagtaccaggacatcatcatcgaacaccagaaggtggtgaagggcaaccagaagagactggagagcctgcgggagctggccggcaaggaaaacctggaataccctagcgtgaccctgccacctcagcctcacaccaaggagggcgttgatgcctacaacgaagtgatcgcccgggtgcgaatgtgggtgaacctgaacctgtggcagaagctgaagctaagcagagatgatgccaagcctctgctgagactgaagggattcccttcctttcctctggtcgagagacaggccaacgaagtggactggtgggacatggtgtgtaacgtgaagaagctgatcaacgagaaaaaggaggatggcaaggtgttttggcagaatctggctggctacaagagacaggaagccctgagaccatacctgagcagcgaggaagatcggaagaagggaaagaaattcgctcggtaccagctgggcgacctgctgctgcacctggaaaagaagcacggcgaggactggggaaaggtgtacgacgaggcctgggagcggattgacaagaaagtggaaggcctgagcaagcacatcaagctggaagaggaacggagaagcgaggacgcccagagcaaggccgccctgaccgactggctgcgggctaaggccagcttcgtgatcgagggcctgaaggaggccgacaaggacgagttctgcagatgcgagctgaagctgcagaagtggtacggggacctgcggggaaagcccttcgccatcgaagccgagaacagcatcctggacatcagcggcttcagcaagcagtacaactgtgccttcatctggcagaaggacggcgtgaagaagctgaacctgtacctgatcatcaactacttcaagggcggcaagctgcggttcaagaagatcaaacctgaagccttcgaagccaacagattctacaccgtgatcaacaaaaagagcggcgagatcgtgcccatggaggtgaacttcaacttcgacgaccccaacctgatcatcctgcctctggcctttggcaagagacagggcagagaattcatctggaacgacctgctgtccctggaaaccggcagcctgaagctggccaacggaagagtgatcgagaagacactgtacaacagaagaacccggcaggatgagcctgccctgttcgtggccctgaccttcgagcggcgggaggtcctggactcctccaatatcaaaccaatgaacctgatcggcgtggcaagaggcgaaaacatccccgccgtgatcgccctgaccgaccccgagggctgcccactgagccggtttaaggatagcctgggaaacccaacccacatcctgagaatcggcgagagctataaggagaagcagcggaccatccaggccaagaaggaggtggagcagcggagagccggcggctacagccggaagtacgccagcaaagccaagaatctggcagacgatatggtgagaaacaccgctagagatctgctgtactacgccgtgacccaggatgccatgctgatcttcgccaacctgagccggggcttcggccggcagggcaagcggaccttcatggccgagagacagtacacacggatggaggactggctgaccgccaagctggcctacgagggcctgagcaagacctacctgtccaagacactggcccagtacacctccaagacatgcagcaactgtgggtttaccatcaccagcgccgactacgacagggtgctggagaagctgaagaagacagcaacaggctggatgaccacaattaacggcaaggagctgaaggtggagggccagattacctactacaacagatacaagagacagaacgtagtcaaggacctgtccgtcgagctggatagactgagcgaagaatctgtgaacaacgacatctcctcctggacaaagggcagaagcggagaagctctgagcctcctgaagaaaagattctcccatagacccgtgcaggagaagttcgtgtgcctgaactgcggcttcgagacacacgcagccgagcaagccgccctgaacatcgccagatcctggctgttcctgcggagccaggagtacaagaaataccagacaaacaagacaaccggcaacaccgataagagagccttcgtcgagacctggcagtccttttaccggaagaagcttaaggaggtgtggaaacctgccgtgcggtctggcggatctggcggaggctccatgaacatggagggcctggtgatgttccaggacctgttcatccacttcagccaggaggagtgggagtgcctggacgccgcccagaaggacctgtacagggacgtgatgatggagaactacagcagcctggtgagcctgggcctgtgcatccccaagcccgacgtgatcagcctgctggagcagggcaaggagccctggatggtgagcagggacgtgctgggcggctggtgccccgacagcgagggcggcccaagcagcggcgcccctcctcccagcggcggcagcccagccggctccccaacctctaccgaggagggcacctctgagtccgccacccccgagagcggccctggcacctccaccgagcccagcgagggcagcgcacccggcagccctgccggcagccccacctccacagaggagggaaccagcaccgagcccagcgaaggcagcgccccaggcaccagcaccgagcctagtgagcaggagattaaacggatcaacaagatcagaagaagacttgtgaaagacagcaacaccaagaaggccggcaagacaggccccatgaaaaccctgctggttagagtgatgacacccgatctgagagagcggctggaaaacctgagaaagaagcctgaaaatatcccccagcccatcagcaatacatctagagccaacctgaataagctgctgaccgattacaccgaaatgaagaaggcgatcctgcatgtgtactgggaagagttccagaaggaccctgtgggcctgatgagccgggtggcccagcctgccagcaagaagatcgatcagaacaagctgaaacctgagatggacgagaagggcaacctgaccaccgccggctttgcctgctctcagtgtggccagcccctgttcgtgtacaagctggagcaggtgtctgagaagggcaaggcttacaccaactacttcggacggtgcaatgtggccgagcacgaaaagctgatcctgctggcccagctgaagcccgagaaggatagcgacgaagccgtgacatatagcctgggaaagtttgggcagagggccctggatttctacagcattcatgtgaccaaggagtccacccaccccgtgaagcccctggcccagatcgccggaaacagatacgcctccggacctgtgggaaaggccctgagcgacgcatgtatgggcacaatcgcctccttcctgtctaagtaccaggacatcatcatcgaacaccagaaggtggtgaagggcaaccagaagagactggagagcctgcgggagctggccggcaaggaaaacctggaataccctagcgtgaccctgccacctcagcctcacaccaaggagggcgttgatgcctacaacgaagtgatcgcccgggtgcgaatgtgggtgaacctgaacctgtggcagaagctgaagctaagcagagatgatgccaagcctctgctgagactgaagggattcccttcctttcctctggtcgagagacaggccaacgaagtggactggtgggacatggtgtgtaacgtgaagaagctgatcaacgagaaaaaggaggatggcaaggtgttttggcagaatctggctggctacaagagacaggaagccctgagaccatacctgagcagcgaggaagatcggaagaagggaaagaaattcgctcggtaccagctgggcgacctgctgctgcacctggaaaagaagcacggcgaggactggggaaaggtgtacgacgaggcctgggagcggattgacaagaaagtggaaggcctgagcaagcacatcaagctggaagaggaacggagaagcgaggacgcccagagcaaggccgccctgaccgactggctgcgggctaaggccagcttcgtgatcgagggcctgaaggaggccgacaaggacgagttctgcagatgcgagctgaagctgcagaagtggtacggggacctgcggggaaagcccttcgccatcgaagccgagaacagcatcctggacatcagcggcttcagcaagcagtacaactgtgccttcatctggcagaaggacggcgtgaagaagctgaacctgtacctgatcatcaactacttcaagggcggcaagctgcggttcaagaagatcaaacctgaagccttcgaagccaacagattctacaccgtgatcaacaaaaagagcggcgagatcgtgcccatggaggtgaacttcaacttcgacgaccccaacctgatcatcctgcctctggcctttggcaagagacagggcagagaattcatctggaacgacctgctgtccctggaaaccggcagcctgaagctggccaacggaagagtgatcgagaagacactgtacaacagaagaacccggcaggatgagcctgccctgttcgtggccctgaccttcgagcggcgggaggtcctggactcctccaatatcaaaccaatgaacctgatcggcgtggcaagaggcgaaaacatccccgccgtgatcgccctgaccgaccccgagggctgcccactgagccggtttaaggatagcctgggaaacccaacccacatcctgagaatcggcgagagctataaggagaagcagcggaccatccaggccaagaaggaggtggagcagcggagagccggcggctacagccggaagtacgccagcaaagccaagaatctggcagacgatatggtgagaaacaccgctagagatctgctgtactacgccgtgacccaggatgccatgctgatcttcgccaacctgagccggggcttcggccggcagggcaagcggaccttcatggccgagagacagtacacacggatggaggactggctgaccgccaagctggcctacgagggcctgagcaagacctacctgtccaagacactggcccagtacacctccaagacatgcagcaactgtgggtttaccatcaccagcgccgactacgacagggtgctggagaagctgaagaagacagcaacaggctggatgaccacaattaacggcaaggagctgaaggtggagggccagattacctactacaacagatacaagagacagaacgtagtcaaggacctgtccgtcgagctggatagactgagcgaagaatctgtgaacaacgacatctcctcctggacaaagggcagaagcggagaagctctgagcctcctgaagaaaagattctcccatagacccgtgcaggagaagttcgtgtgcctgaactgcggcttcgagacacacgcagccgagcaagccgccctgaacatcgccagatcctggctgttcctgcggagccaggagtacaagaaataccagacaaacaagacaaccggcaacaccgataagagagccttcgtcgagacctggcagtccttttaccggaagaagcttaaggaggtgtggaaacctgccgtgcggtctggcggatctggcggaggctcctatgaacatggagggcctggtgatgttccaggacctgttcatccacttcagccaggaggagtgggagtgcctggacgccgcccagaaggacctgtacagggacgtgatgatggagaactacagcagcctggtgagcctgggcctgtgcatccccaagcccgacgtgatcagcctgctggagcagggcaaggagccctggatggtgagcagggacgtgctgggcggctggtgccccgacagcgagggatctggctccggcagcggccccaagaaaaagagaaaagtctaagctgccttctgcggggcttgccttctggccatgcccttcttctctcccttgcacctgtacctcttggtctttgaataaagcctgagtaggaaggctagcaaaaaaaaaaaaaaaaaaaaaaaaaaaaaaaaaaaaaaaaaaaaaaaaaaaaaaaaaaaaaaaaaaaaaaaaaaaaaaaa

SEQ ID NO: 16801 - RNA, 9485 nt, synthetic construct
  source 1..9485: mol_type = other RNA
aggaaataagagagaaaagaagagtaagaagaaatataagagccaccatggcccctaagaagaagcgtaaagtgagccggatggaacgcctcgtctacgaggtgcggcagaagtgcagaaacatcgaggacatctgcatctcctgcggatctctgaacgtgaccctggagcacccactgttcatcggcggcatgtgccagaactgtaaaaactgttttctggagtgtgcctatcaatacgacgatgacggctaccagagctactgcaccatctgttgcggcggaagagaggtgctgatgtgtggaaataacaactgctgccggtgcttctgcgtggaatgcgtggacctgctggtgggccccggcgccgcccaggccgctattaaggaagatccttggaactgctacatgtgcggccacaagggcacatacggcctgctgagacggagagaggactggcctagcagactgcagatgttcttcgccaataaccacgaccaggagttcgacccccctaaggtgtaccctcccgtccccgccgagaagagaaagcccatccgggtcctgagcctgttcgatggcatcgccaccggtctgctggtgctgaaggacctgggcatccaggtggataggtacattgcctccgaggtgtgcgaggactccatcaccgtgggaatggtgcgtcatcagggcaagatcatgtacgtgggcgacgtgcggagcgtgacacagaagcatatccaggagtggggccctttcgacctggtgatcggcggcagcccttgcaatgacctgagcatcgtgaacccagcccggaagggcctgtacgagggaaccggcagactgttcttcgagttttacagactgctgcacgacgcccggcctaaggaaggcgacgaccggcccttcttttggctgttcgagaatgtggtggccatgggagtcagcgacaagcgggatattagccggttcctggagagcaaccccgtgatgatcgatgccaaggaagtgagcgccgcccaccgggccagatacttctggggcaatctgcctggcatgaacagacccctggccagcaccgtgaacgacaagctggagctgcaggagtgcctggagcacggccggatcgccaagttcagcaaggtgagaaccatcaccacccgaagcaacagcatcaaacaaggcaaggaccagcactttcctgtgttcatgaacgagaaggaggacatcctgtggtgtaccgagatggagagagtgttcgggttcccagtccactacacagatgtcagcaacatgtctagactggccagacagagactgctgggaagaagctggtccgtccctgtgatcagacacctgttcgcccctctgaaggagtacttcgcctgcgtgagcagcggcaacagcaacgccaacagccggggccccagcttctctagcggcctggtgccactgtccctgagagggagccacatgggccccatggagatctacaaaaccgtgagcgcctggaagcggcagcctgtgcgcgtgctgagcctgtttcggaatatcgataaagtcctgaaaagcctgggattcctggagagcggctctggctccggcggtggcaccctgaagtacgtggaggatgtgacaaacgtggtcagacgggatgtggagaagtggggccccttcgatctggtgtacggcagcacccaacccctgggcagctcttgtgaccggtgccctggctggtacatgtttcagttccaccggatcctgcagtacgccctgccgagacaggagtcccagcggccattcttttggattttcatggacaacttgctgctgaccgaggatgaccaggaaactaccactcggttcctgcagaccgaagccgtgaccctgcaggacgtgagaggccgggactaccagaacgccatgcgggtgtggtccaacatccctggactgaaaagcaagcacgcacctctgacccctaaagaagaggagtacctgcaggcccaggtgcggagcagaagcaagctggacgcccctaaggtggatctgctggtgaagaattgcctcctgcccctgagagagtacttcaagtatttcagccagaatagtctgcccctgggaggcagcggcggcggcgccctggtgacatttgaggacgtcgccgtgcggttcacccaggaggaatgggctctgctggatccttctcagaaaatcctgtaccgggacgtgatgagagagacataccggaatctgacctccgtgggcatcaactgggaatgttgggaccttgaagcctgcttcagaagcctgggaagaaacctgagagtgcaggtggtgaagagaaagtgcgagctgaccaacagcggcccctgcgccgagggcggcccaagcagcggcgcccctcctcccagcggcggcagcccagccggctccccaacctctaccgaggagggcacctctgagtccgccacccccgagagcggccctggcacctccaccgagcccagcgagggcagcgcacccggcagccctgccggcagccccacctccacagaggagggaaccagcaccgagcccagcgaaggcagcgccccaggcaccagcaccgagcctagtgagcaggagattaaacggatcaacaagatcagaagaagacttgtgaaagacagcaacaccaagaaggccggcaagacaggccccatgaaaaccctgctggttagagtgatgacacccgatctgagagagcggctggaaaacctgagaaagaagcctgaaaatatcccccagcccatcagcaatacatctagagccaacctgaataagctgctgaccgattacaccgaaatgaagaaggcgatcctgcatgtgtactgggaagagttccagaaggaccctgtgggcctgatgagccgggtggcccagcctgccagcaagaagatcgatcagaacaagctgaaacctgagatggacgagaagggcaacctgaccaccgccggctttgcctgctctcagtgtggccagcccctgttcgtgtacaagctggagcaggtgtctgagaagggcaaggcttacaccaactacttcggacggtgcaatgtggccgagcacgaaaagctgatcctgctggcccagctgaagcccgagaaggatagcgacgaagccgtgacatatagcctgggaaagtttgggcagagggccctggatttctacagcattcatgtgaccaaggagtccacccaccccgtgaagcccctggcccagatcgccggaaacagatacgcctccggacctgtgggaaaggccctgagcgacgcatgtatgggcacaatcgcctccttcctgtctaagtaccaggacatcatcatcgaacaccagaaggtggtgaagggcaaccagaagagactggagagcctgcgggagctggccggcaaggaaaacctggaataccctagcgtgaccctgccacctcagcctcacaccaaggagggcgttgatgcctacaacgaagtgatcgcccgggtgcgaatgtgggtgaacctgaacctgtggcagaagctgaagctaagcagagatgatgccaagcctctgctgagactgaagggattcccttcctttcctctggtcgagagacaggccaacgaagtggactggtgggacatggtgtgtaacgtgaagaagctgatcaacgagaaaaaggaggatggcaaggtgttttggcagaatctggctggctacaagagacaggaagccctgagaccatacctgagcagcgaggaagatcggaagaagggaaagaaattcgctcggtaccagctgggcgacctgctgctgcacctggaaaagaagcacggcgaggactggggaaaggtgtacgacgaggcctgggagcggattgacaagaaagtggaaggcctgagcaagcacatcaagctggaagaggaacggagaagcgaggacgcccagagcaaggccgccctgaccgactggctgcgggctaaggccagcttcgtgatcgagggcctgaaggaggccgacaaggacgagttctgcagatgcgagctgaagctgcagaagtggtacggggacctgcggggaaagcccttcgccatcgaagccgagaacagcatcctggacatcagcggcttcagcaagcagtacaactgtgccttcatctggcagaaggacggcgtgaagaagctgaacctgtacctgatcatcaactacttcaagggcggcaagctgcggttcaagaagatcaaacctgaagccttcgaagccaacagattctacaccgtgatcaacaaaaagagcggcgagatcgtgcccatggaggtgaacttcaacttcgacgaccccaacctgatcatcctgcctctggcctttggcaagagacagggcagagaattcatctggaacgacctgctgtccctggaaaccggcagcctgaagctggccaacggaagagtgatcgagaagacactgtacaacagaagaacccggcaggatgagcctgccctgttcgtggccctgaccttcgagcggcgggaggtcctggactcctccaatatcaaaccaatgaacctgatcggcgtggcaagaggcgaaaacatccccgccgtgatcgccctgaccgaccccgagggctgcccactgagccggtttaaggatagcctgggaaacccaacccacatcctgagaatcggcgagagctataaggagaagcagcggaccatccaggccaagaaggaggtggagcagcggagagccggcggctacagccggaagtacgccagcaaagccaagaatctggcagacgatatggtgagaaacaccgctagagatctgctgtactacgccgtgacccaggatgccatgctgatcttcgccaacctgagccggggcttcggccggcagggcaagcggaccttcatggccgagagacagtacacacggatggaggactggctgaccgccaagctggcctacgagggcctgagcaagacctacctgtccaagacactggcccagtacacctccaagacatgcagcaactgtgggtttaccatcaccagcgccgactacgacagggtgctggagaagctgaagaagacagcaacaggctggatgaccacaattaacggcaaggagctgaaggtggagggccagattacctactacaacagatacaagagacagaacgtagtcaaggacctgtccgtcgagctggatagactgagcgaagaatctgtgaacaacgacatctcctcctggacaaagggcagaagcggagaagctctgagcctcctgaagaaaagattctcccatagacccgtgcaggagaagttcgtgtgcctgaactgcggcttcgagacacacgcagccgagcaagccgccctgaacatcgccagatcctggctgttcctgcggagccaggagtacaagaaataccagacaaacaagacaaccggcaacaccgataagagagccttcgtcgagacctggcagtccttttaccggaagaagcttaaggaggtgtggaaacctgccgtgcggtctggcggatctggcggaggctcccagcagatgcaggtgaccttcgaggacgtggccgtgagcttcagccaggaggagtgggagtacctggacgagggccagaaggagctgtacagggaggtgatgaaggagaactacgagaccgtggtgagcctgggcagccccgccagcacccccaagatcatcagctgcatcgagtgcggcgaggaggcctacatcaggggcgagcccggcagcgagggcagggagaccggcaagagcagctgcggcggcccaagcagcggcgcccctcctcccagcggcggcagcccagccggctccccaacctctaccgaggagggcacctctgagtccgccacccccgagagcggccctggcacctccaccgagcccagcgagggcagcgcacccggcagccctgccggcagccccacctccacagaggagggaaccagcaccgagcccagcgaaggcagcgccccaggcaccagcaccgagcctagtgagcaggagattaaacggatcaacaagatcagaagaagacttgtgaaagacagcaacaccaagaaggccggcaagacaggccccatgaaaaccctgctggttagagtgatgacacccgatctgagagagcggctggaaaacctgagaaagaagcctgaaaatatcccccagcccatcagcaatacatctagagccaacctgaataagctgctgaccgattacaccgaaatgaagaaggcgatcctgcatgtgtactgggaagagttccagaaggaccctgtgggcctgatgagccgggtggcccagcctgccagcaagaagatcgatcagaacaagctgaaacctgagatggacgagaagggcaacctgaccaccgccggctttgcctgctctcagtgtggccagcccctgttcgtgtacaagctggagcaggtgtctgagaagggcaaggcttacaccaactacttcggacggtgcaatgtggccgagcacgaaaagctgatcctgctggcccagctgaagcccgagaaggatagcgacgaagccgtgacatatagcctgggaaagtttgggcagagggccctggatttctacagcattcatgtgaccaaggagtccacccaccccgtgaagcccctggcccagatcgccggaaacagatacgcctccggacctgtgggaaaggccctgagcgacgcatgtatgggcacaatcgcctccttcctgtctaagtaccaggacatcatcatcgaacaccagaaggtggtgaagggcaaccagaagagactggagagcctgcgggagctggccggcaaggaaaacctggaataccctagcgtgaccctgccacctcagcctcacaccaaggagggcgttgatgcctacaacgaagtgatcgcccgggtgcgaatgtgggtgaacctgaacctgtggcagaagctgaagctaagcagagatgatgccaagcctctgctgagactgaagggattcccttcctttcctctggtcgagagacaggccaacgaagtggactggtgggacatggtgtgtaacgtgaagaagctgatcaacgagaaaaaggaggatggcaaggtgttttggcagaatctggctggctacaagagacaggaagccctgagaccatacctgagcagcgaggaagatcggaagaagggaaagaaattcgctcggtaccagctgggcgacctgctgctgcacctggaaaagaagcacggcgaggactggggaaaggtgtacgacgaggcctgggagcggattgacaagaaagtggaaggcctgagcaagcacatcaagctggaagaggaacggagaagcgaggacgcccagagcaaggccgccctgaccgactggctgcgggctaaggccagcttcgtgatcgagggcctgaaggaggccgacaaggacgagttctgcagatgcgagctgaagctgcagaagtggtacggggacctgcggggaaagcccttcgccatcgaagccgagaacagcatcctggacatcagcggcttcagcaagcagtacaactgtgccttcatctggcagaaggacggcgtgaagaagctgaacctgtacctgatcatcaactacttcaagggcggcaagctgcggttcaagaagatcaaacctgaagccttcgaagccaacagattctacaccgtgatcaacaaaaagagcggcgagatcgtgcccatggaggtgaacttcaacttcgacgaccccaacctgatcatcctgcctctggcctttggcaagagacagggcagagaattcatctggaacgacctgctgtccctggaaaccggcagcctgaagctggccaacggaagagtgatcgagaagacactgtacaacagaagaacccggcaggatgagcctgccctgttcgtggccctgaccttcgagcggcgggaggtcctggactcctccaatatcaaaccaatgaacctgatcggcgtggcaagaggcgaaaacatccccgccgtgatcgccctgaccgaccccgagggctgcccactgagccggtttaaggatagcctgggaaacccaacccacatcctgagaatcggcgagagctataaggagaagcagcggaccatccaggccaagaaggaggtggagcagcggagagccggcggctacagccggaagtacgccagcaaagccaagaatctggcagacgatatggtgagaaacaccgctagagatctgctgtactacgccgtgacccaggatgccatgctgatcttcgccaacctgagccggggcttcggccggcagggcaagcggaccttcatggccgagagacagtacacacggatggaggactggctgaccgccaagctggcctacgagggcctgagcaagacctacctgtccaagacactggcccagtacacctccaagacatgcagcaactgtgggtttaccatcaccagcgccgactacgacagggtgctggagaagctgaagaagacagcaacaggctggatgaccacaattaacggcaaggagctgaaggtggagggccagattacctactacaacagatacaagagacagaacgtagtcaaggacctgtccgtcgagctggatagactgagcgaagaatctgtgaacaacgacatctcctcctggacaaagggcagaagcggagaagctctgagcctcctgaagaaaagattctcccatagacccgtgcaggagaagttcgtgtgcctgaactgcggcttcgagacacacgcagccgagcaagccgccctgaacatcgccagatcctggctgttcctgcggagccaggagtacaagaaataccagacaaacaagacaaccggcaacaccgataagagagccttcgtcgagacctggcagtccttttaccggaagaagcttaaggaggtgtggaaacctgccgtgcggtctggcggatctggcggaggctcctcagcagatgcaggtgaccttcgaggacgtggccgtgagcttcagccaggaggagtgggagtacctggacgagggccagaaggagctgtacagggaggtgatgaaggagaactacgagaccgtggtgagcctgggcagccccgccagcacccccaagatcatcagctgcatcgagtgcggcgaggaggcctacatcaggggcgagcccggcagcgagggcagggagaccggcaagagcagctgcggatctggctccggcagcggccccaagaaaaagagaaaagtctaagctgccttctgcggggcttgccttctggccatgcccttcttctctcccttgcacctgtacctcttggtctttgaataaagcctgagtaggaaggctagcaaaaaaaaaaaaaaaaaaaaaaaaaaaaaaaaaaaaaaaaaaaaaaaaaaaaaaaaaaaaaaaaaaaaaaaaaaaaaaaa

SEQ ID NO: 16802 - RNA, 9485 nt, synthetic construct
  source 1..9485: mol_type = other RNA
aggaaataagagagaaaagaagagtaagaagaaatataagagccaccatggcccctaagaagaagcgtaaagtgagccggatggaacgcctcgtctacgaggtgcggcagaagtgcagaaacatcgaggacatctgcatctcctgcggatctctgaacgtgaccctggagcacccactgttcatcggcggcatgtgccagaactgtaaaaactgttttctggagtgtgcctatcaatacgacgatgacggctaccagagctactgcaccatctgttgcggcggaagagaggtgctgatgtgtggaaataacaactgctgccggtgcttctgcgtggaatgcgtggacctgctggtgggccccggcgccgcccaggccgctattaaggaagatccttggaactgctacatgtgcggccacaagggcacatacggcctgctgagacggagagaggactggcctagcagactgcagatgttcttcgccaataaccacgaccaggagttcgacccccctaaggtgtaccctcccgtccccgccgagaagagaaagcccatccgggtcctgagcctgttcgatggcatcgccaccggtctgctggtgctgaaggacctgggcatccaggtggataggtacattgcctccgaggtgtgcgaggactccatcaccgtgggaatggtgcgtcatcagggcaagatcatgtacgtgggcgacgtgcggagcgtgacacagaagcatatccaggagtggggccctttcgacctggtgatcggcggcagcccttgcaatgacctgagcatcgtgaacccagcccggaagggcctgtacgagggaaccggcagactgttcttcgagttttacagactgctgcacgacgcccggcctaaggaaggcgacgaccggcccttcttttggctgttcgagaatgtggtggccatgggagtcagcgacaagcgggatattagccggttcctggagagcaaccccgtgatgatcgatgccaaggaagtgagcgccgcccaccgggccagatacttctggggcaatctgcctggcatgaacagacccctggccagcaccgtgaacgacaagctggagctgcaggagtgcctggagcacggccggatcgccaagttcagcaaggtgagaaccatcaccacccgaagcaacagcatcaaacaaggcaaggaccagcactttcctgtgttcatgaacgagaaggaggacatcctgtggtgtaccgagatggagagagtgttcgggttcccagtccactacacagatgtcagcaacatgtctagactggccagacagagactgctgggaagaagctggtccgtccctgtgatcagacacctgttcgcccctctgaaggagtacttcgcctgcgtgagcagcggcaacagcaacgccaacagccggggccccagcttctctagcggcctggtgccactgtccctgagagggagccacatgggccccatggagatctacaaaaccgtgagcgcctggaagcggcagcctgtgcgcgtgctgagcctgtttcggaatatcgataaagtcctgaaaagcctgggattcctggagagcggctctggctccggcggtggcaccctgaagtacgtggaggatgtgacaaacgtggtcagacgggatgtggagaagtggggccccttcgatctggtgtacggcagcacccaacccctgggcagctcttgtgaccggtgccctggctggtacatgtttcagttccaccggatcctgcagtacgccctgccgagacaggagtcccagcggccattcttttggattttcatggacaacttgctgctgaccgaggatgaccaggaaactaccactcggttcctgcagaccgaagccgtgaccctgcaggacgtgagaggccgggactaccagaacgccatgcgggtgtggtccaacatccctggactgaaaagcaagcacgcacctctgacccctaaagaagaggagtacctgcaggcccaggtgcggagcagaagcaagctggacgcccctaaggtggatctgctggtgaagaattgcctcctgcccctgagagagtacttcaagtatttcagccagaatagtctgcccctgggaggcagcggcggcggcgccctggtgacatttgaggacgtcgccgtgcggttcacccaggaggaatgggctctgctggatccttctcagaaaatcctgtaccgggacgtgatgagagagacataccggaatctgacctccgtgggcatcaactgggaatgttgggaccttgaagcctgcttcagaagcctgggaagaaacctgagagtgcaggtggtgaagagaaagtgcgagctgaccaacagcggcccctgcgccgagggcggcccaagcagcggcgcccctcctcccagcggcggcagcccagccggctccccaacctctaccgaggagggcacctctgagtccgccacccccgagagcggccctggcacctccaccgagcccagcgagggcagcgcacccggcagccctgccggcagccccacctccacagaggagggaaccagcaccgagcccagcgaaggcagcgccccaggcaccagcaccgagcctagtgagcaggagattaaacggatcaacaagatcagaagaagacttgtgaaagacagcaacaccaagaaggccggcaagacaggccccatgaaaaccctgctggttagagtgatgacacccgatctgagagagcggctggaaaacctgagaaagaagcctgaaaatatcccccagcccatcagcaatacatctagagccaacctgaataagctgctgaccgattacaccgaaatgaagaaggcgatcctgcatgtgtactgggaagagttccagaaggaccctgtgggcctgatgagccgggtggcccagcctgccagcaagaagatcgatcagaacaagctgaaacctgagatggacgagaagggcaacctgaccaccgccggctttgcctgctctcagtgtggccagcccctgttcgtgtacaagctggagcaggtgtctgagaagggcaaggcttacaccaactacttcggacggtgcaatgtggccgagcacgaaaagctgatcctgctggcccagctgaagcccgagaaggatagcgacgaagccgtgacatatagcctgggaaagtttgggcagagggccctggatttctacagcattcatgtgaccaaggagtccacccaccccgtgaagcccctggcccagatcgccggaaacagatacgcctccggacctgtgggaaaggccctgagcgacgcatgtatgggcacaatcgcctccttcctgtctaagtaccaggacatcatcatcgaacaccagaaggtggtgaagggcaaccagaagagactggagagcctgcgggagctggccggcaaggaaaacctggaataccctagcgtgaccctgccacctcagcctcacaccaaggagggcgttgatgcctacaacgaagtgatcgcccgggtgcgaatgtgggtgaacctgaacctgtggcagaagctgaagctaagcagagatgatgccaagcctctgctgagactgaagggattcccttcctttcctctggtcgagagacaggccaacgaagtggactggtgggacatggtgtgtaacgtgaagaagctgatcaacgagaaaaaggaggatggcaaggtgttttggcagaatctggctggctacaagagacaggaagccctgagaccatacctgagcagcgaggaagatcggaagaagggaaagaaattcgctcggtaccagctgggcgacctgctgctgcacctggaaaagaagcacggcgaggactggggaaaggtgtacgacgaggcctgggagcggattgacaagaaagtggaaggcctgagcaagcacatcaagctggaagaggaacggagaagcgaggacgcccagagcaaggccgccctgaccgactggctgcgggctaaggccagcttcgtgatcgagggcctgaaggaggccgacaaggacgagttctgcagatgcgagctgaagctgcagaagtggtacggggacctgcggggaaagcccttcgccatcgaagccgagaacagcatcctggacatcagcggcttcagcaagcagtacaactgtgccttcatctggcagaaggacggcgtgaagaagctgaacctgtacctgatcatcaactacttcaagggcggcaagctgcggttcaagaagatcaaacctgaagccttcgaagccaacagattctacaccgtgatcaacaaaaagagcggcgagatcgtgcccatggaggtgaacttcaacttcgacgaccccaacctgatcatcctgcctctggcctttggcaagagacagggcagagaattcatctggaacgacctgctgtccctggaaaccggcagcctgaagctggccaacggaagagtgatcgagaagacactgtacaacagaagaacccggcaggatgagcctgccctgttcgtggccctgaccttcgagcggcgggaggtcctggactcctccaatatcaaaccaatgaacctgatcggcgtggcaagaggcgaaaacatccccgccgtgatcgccctgaccgaccccgagggctgcccactgagccggtttaaggatagcctgggaaacccaacccacatcctgagaatcggcgagagctataaggagaagcagcggaccatccaggccaagaaggaggtggagcagcggagagccggcggctacagccggaagtacgccagcaaagccaagaatctggcagacgatatggtgagaaacaccgctagagatctgctgtactacgccgtgacccaggatgccatgctgatcttcgccaacctgagccggggcttcggccggcagggcaagcggaccttcatggccgagagacagtacacacggatggaggactggctgaccgccaagctggcctacgagggcctgagcaagacctacctgtccaagacactggcccagtacacctccaagacatgcagcaactgtgggtttaccatcaccagcgccgactacgacagggtgctggagaagctgaagaagacagcaacaggctggatgaccacaattaacggcaaggagctgaaggtggagggccagattacctactacaacagatacaagagacagaacgtagtcaaggacctgtccgtcgagctggatagactgagcgaagaatctgtgaacaacgacatctcctcctggacaaagggcagaagcggagaagctctgagcctcctgaagaaaagattctcccatagacccgtgcaggagaagttcgtgtgcctgaactgcggcttcgagacacacgcagccgagcaagccgccctgaacatcgccagatcctggctgttcctgcggagccaggagtacaagaaataccagacaaacaagacaaccggcaacaccgataagagagccttcgtcgagacctggcagtccttttaccggaagaagcttaaggaggtgtggaaacctgccgtgcggtctggcggatctggcggaggctccagccagggccccgtgctgttcgaggacgtgagcgtggacttcacccagaaggagtggcagctgctggaccccgcccagaggaggctgtacagggacgtgatgctggagaactacaggcacctggagagcctgggccactgcgtgaccaagcccgagctgatcaggaggctggagcagggcgaggagccctggatcctgaagagggaggtgcccagccacagccacgccgaggtgcagagggccggcggcccaagcagcggcgcccctcctcccagcggcggcagcccagccggctccccaacctctaccgaggagggcacctctgagtccgccacccccgagagcggccctggcacctccaccgagcccagcgagggcagcgcacccggcagccctgccggcagccccacctccacagaggagggaaccagcaccgagcccagcgaaggcagcgccccaggcaccagcaccgagcctagtgagcaggagattaaacggatcaacaagatcagaagaagacttgtgaaagacagcaacaccaagaaggccggcaagacaggccccatgaaaaccctgctggttagagtgatgacacccgatctgagagagcggctggaaaacctgagaaagaagcctgaaaatatcccccagcccatcagcaatacatctagagccaacctgaataagctgctgaccgattacaccgaaatgaagaaggcgatcctgcatgtgtactgggaagagttccagaaggaccctgtgggcctgatgagccgggtggcccagcctgccagcaagaagatcgatcagaacaagctgaaacctgagatggacgagaagggcaacctgaccaccgccggctttgcctgctctcagtgtggccagcccctgttcgtgtacaagctggagcaggtgtctgagaagggcaaggcttacaccaactacttcggacggtgcaatgtggccgagcacgaaaagctgatcctgctggcccagctgaagcccgagaaggatagcgacgaagccgtgacatatagcctgggaaagtttgggcagagggccctggatttctacagcattcatgtgaccaaggagtccacccaccccgtgaagcccctggcccagatcgccggaaacagatacgcctccggacctgtgggaaaggccctgagcgacgcatgtatgggcacaatcgcctccttcctgtctaagtaccaggacatcatcatcgaacaccagaaggtggtgaagggcaaccagaagagactggagagcctgcgggagctggccggcaaggaaaacctggaataccctagcgtgaccctgccacctcagcctcacaccaaggagggcgttgatgcctacaacgaagtgatcgcccgggtgcgaatgtgggtgaacctgaacctgtggcagaagctgaagctaagcagagatgatgccaagcctctgctgagactgaagggattcccttcctttcctctggtcgagagacaggccaacgaagtggactggtgggacatggtgtgtaacgtgaagaagctgatcaacgagaaaaaggaggatggcaaggtgttttggcagaatctggctggctacaagagacaggaagccctgagaccatacctgagcagcgaggaagatcggaagaagggaaagaaattcgctcggtaccagctgggcgacctgctgctgcacctggaaaagaagcacggcgaggactggggaaaggtgtacgacgaggcctgggagcggattgacaagaaagtggaaggcctgagcaagcacatcaagctggaagaggaacggagaagcgaggacgcccagagcaaggccgccctgaccgactggctgcgggctaaggccagcttcgtgatcgagggcctgaaggaggccgacaaggacgagttctgcagatgcgagctgaagctgcagaagtggtacggggacctgcggggaaagcccttcgccatcgaagccgagaacagcatcctggacatcagcggcttcagcaagcagtacaactgtgccttcatctggcagaaggacggcgtgaagaagctgaacctgtacctgatcatcaactacttcaagggcggcaagctgcggttcaagaagatcaaacctgaagccttcgaagccaacagattctacaccgtgatcaacaaaaagagcggcgagatcgtgcccatggaggtgaacttcaacttcgacgaccccaacctgatcatcctgcctctggcctttggcaagagacagggcagagaattcatctggaacgacctgctgtccctggaaaccggcagcctgaagctggccaacggaagagtgatcgagaagacactgtacaacagaagaacccggcaggatgagcctgccctgttcgtggccctgaccttcgagcggcgggaggtcctggactcctccaatatcaaaccaatgaacctgatcggcgtggcaagaggcgaaaacatccccgccgtgatcgccctgaccgaccccgagggctgcccactgagccggtttaaggatagcctgggaaacccaacccacatcctgagaatcggcgagagctataaggagaagcagcggaccatccaggccaagaaggaggtggagcagcggagagccggcggctacagccggaagtacgccagcaaagccaagaatctggcagacgatatggtgagaaacaccgctagagatctgctgtactacgccgtgacccaggatgccatgctgatcttcgccaacctgagccggggcttcggccggcagggcaagcggaccttcatggccgagagacagtacacacggatggaggactggctgaccgccaagctggcctacgagggcctgagcaagacctacctgtccaagacactggcccagtacacctccaagacatgcagcaactgtgggtttaccatcaccagcgccgactacgacagggtgctggagaagctgaagaagacagcaacaggctggatgaccacaattaacggcaaggagctgaaggtggagggccagattacctactacaacagatacaagagacagaacgtagtcaaggacctgtccgtcgagctggatagactgagcgaagaatctgtgaacaacgacatctcctcctggacaaagggcagaagcggagaagctctgagcctcctgaagaaaagattctcccatagacccgtgcaggagaagttcgtgtgcctgaactgcggcttcgagacacacgcagccgagcaagccgccctgaacatcgccagatcctggctgttcctgcggagccaggagtacaagaaataccagacaaacaagacaaccggcaacaccgataagagagccttcgtcgagacctggcagtccttttaccggaagaagcttaaggaggtgtggaaacctgccgtgcggtctggcggatctggcggaggctcctagccagggccccgtgctgttcgaggacgtgagcgtggacttcacccagaaggagtggcagctgctggaccccgcccagaggaggctgtacagggacgtgatgctggagaactacaggcacctggagagcctgggccactgcgtgaccaagcccgagctgatcaggaggctggagcagggcgaggagccctggatcctgaagagggaggtgcccagccacagccacgccgaggtgcagagggccggatctggctccggcagcggccccaagaaaaagagaaaagtctaagctgccttctgcggggcttgccttctggccatgcccttcttctctcccttgcacctgtacctcttggtctttgaataaagcctgagtaggaaggctagcaaaaaaaaaaaaaaaaaaaaaaaaaaaaaaaaaaaaaaaaaaaaaaaaaaaaaaaaaaaaaaaaaaaaaaaaaaaaaaaa

SEQ ID NO: 16803 - RNA, 9485 nt, synthetic construct
  source 1..9485: mol_type = other RNA
aggaaataagagagaaaagaagagtaagaagaaatataagagccaccatggcccctaagaagaagcgtaaagtgagccggatggaacgcctcgtctacgaggtgcggcagaagtgcagaaacatcgaggacatctgcatctcctgcggatctctgaacgtgaccctggagcacccactgttcatcggcggcatgtgccagaactgtaaaaactgttttctggagtgtgcctatcaatacgacgatgacggctaccagagctactgcaccatctgttgcggcggaagagaggtgctgatgtgtggaaataacaactgctgccggtgcttctgcgtggaatgcgtggacctgctggtgggccccggcgccgcccaggccgctattaaggaagatccttggaactgctacatgtgcggccacaagggcacatacggcctgctgagacggagagaggactggcctagcagactgcagatgttcttcgccaataaccacgaccaggagttcgacccccctaaggtgtaccctcccgtccccgccgagaagagaaagcccatccgggtcctgagcctgttcgatggcatcgccaccggtctgctggtgctgaaggacctgggcatccaggtggataggtacattgcctccgaggtgtgcgaggactccatcaccgtgggaatggtgcgtcatcagggcaagatcatgtacgtgggcgacgtgcggagcgtgacacagaagcatatccaggagtggggccctttcgacctggtgatcggcggcagcccttgcaatgacctgagcatcgtgaacccagcccggaagggcctgtacgagggaaccggcagactgttcttcgagttttacagactgctgcacgacgcccggcctaaggaaggcgacgaccggcccttcttttggctgttcgagaatgtggtggccatgggagtcagcgacaagcgggatattagccggttcctggagagcaaccccgtgatgatcgatgccaaggaagtgagcgccgcccaccgggccagatacttctggggcaatctgcctggcatgaacagacccctggccagcaccgtgaacgacaagctggagctgcaggagtgcctggagcacggccggatcgccaagttcagcaaggtgagaaccatcaccacccgaagcaacagcatcaaacaaggcaaggaccagcactttcctgtgttcatgaacgagaaggaggacatcctgtggtgtaccgagatggagagagtgttcgggttcccagtccactacacagatgtcagcaacatgtctagactggccagacagagactgctgggaagaagctggtccgtccctgtgatcagacacctgttcgcccctctgaaggagtacttcgcctgcgtgagcagcggcaacagcaacgccaacagccggggccccagcttctctagcggcctggtgccactgtccctgagagggagccacatgggccccatggagatctacaaaaccgtgagcgcctggaagcggcagcctgtgcgcgtgctgagcctgtttcggaatatcgataaagtcctgaaaagcctgggattcctggagagcggctctggctccggcggtggcaccctgaagtacgtggaggatgtgacaaacgtggtcagacgggatgtggagaagtggggccccttcgatctggtgtacggcagcacccaacccctgggcagctcttgtgaccggtgccctggctggtacatgtttcagttccaccggatcctgcagtacgccctgccgagacaggagtcccagcggccattcttttggattttcatggacaacttgctgctgaccgaggatgaccaggaaactaccactcggttcctgcagaccgaagccgtgaccctgcaggacgtgagaggccgggactaccagaacgccatgcgggtgtggtccaacatccctggactgaaaagcaagcacgcacctctgacccctaaagaagaggagtacctgcaggcccaggtgcggagcagaagcaagctggacgcccctaaggtggatctgctggtgaagaattgcctcctgcccctgagagagtacttcaagtatttcagccagaatagtctgcccctgggaggcagcggcggcggcgccctggtgacatttgaggacgtcgccgtgcggttcacccaggaggaatgggctctgctggatccttctcagaaaatcctgtaccgggacgtgatgagagagacataccggaatctgacctccgtgggcatcaactgggaatgttgggaccttgaagcctgcttcagaagcctgggaagaaacctgagagtgcaggtggtgaagagaaagtgcgagctgaccaacagcggcccctgcgccgagggcggcccaagcagcggcgcccctcctcccagcggcggcagcccagccggctccccaacctctaccgaggagggcacctctgagtccgccacccccgagagcggccctggcacctccaccgagcccagcgagggcagcgcacccggcagccctgccggcagccccacctccacagaggagggaaccagcaccgagcccagcgaaggcagcgccccaggcaccagcaccgagcctagtgagcaggagattaaacggatcaacaagatcagaagaagacttgtgaaagacagcaacaccaagaaggccggcaagacaggccccatgaaaaccctgctggttagagtgatgacacccgatctgagagagcggctggaaaacctgagaaagaagcctgaaaatatcccccagcccatcagcaatacatctagagccaacctgaataagctgctgaccgattacaccgaaatgaagaaggcgatcctgcatgtgtactgggaagagttccagaaggaccctgtgggcctgatgagccgggtggcccagcctgccagcaagaagatcgatcagaacaagctgaaacctgagatggacgagaagggcaacctgaccaccgccggctttgcctgctctcagtgtggccagcccctgttcgtgtacaagctggagcaggtgtctgagaagggcaaggcttacaccaactacttcggacggtgcaatgtggccgagcacgaaaagctgatcctgctggcccagctgaagcccgagaaggatagcgacgaagccgtgacatatagcctgggaaagtttgggcagagggccctggatttctacagcattcatgtgaccaaggagtccacccaccccgtgaagcccctggcccagatcgccggaaacagatacgcctccggacctgtgggaaaggccctgagcgacgcatgtatgggcacaatcgcctccttcctgtctaagtaccaggacatcatcatcgaacaccagaaggtggtgaagggcaaccagaagagactggagagcctgcgggagctggccggcaaggaaaacctggaataccctagcgtgaccctgccacctcagcctcacaccaaggagggcgttgatgcctacaacgaagtgatcgcccgggtgcgaatgtgggtgaacctgaacctgtggcagaagctgaagctaagcagagatgatgccaagcctctgctgagactgaagggattcccttcctttcctctggtcgagagacaggccaacgaagtggactggtgggacatggtgtgtaacgtgaagaagctgatcaacgagaaaaaggaggatggcaaggtgttttggcagaatctggctggctacaagagacaggaagccctgagaccatacctgagcagcgaggaagatcggaagaagggaaagaaattcgctcggtaccagctgggcgacctgctgctgcacctggaaaagaagcacggcgaggactggggaaaggtgtacgacgaggcctgggagcggattgacaagaaagtggaaggcctgagcaagcacatcaagctggaagaggaacggagaagcgaggacgcccagagcaaggccgccctgaccgactggctgcgggctaaggccagcttcgtgatcgagggcctgaaggaggccgacaaggacgagttctgcagatgcgagctgaagctgcagaagtggtacggggacctgcggggaaagcccttcgccatcgaagccgagaacagcatcctggacatcagcggcttcagcaagcagtacaactgtgccttcatctggcagaaggacggcgtgaagaagctgaacctgtacctgatcatcaactacttcaagggcggcaagctgcggttcaagaagatcaaacctgaagccttcgaagccaacagattctacaccgtgatcaacaaaaagagcggcgagatcgtgcccatggaggtgaacttcaacttcgacgaccccaacctgatcatcctgcctctggcctttggcaagagacagggcagagaattcatctggaacgacctgctgtccctggaaaccggcagcctgaagctggccaacggaagagtgatcgagaagacactgtacaacagaagaacccggcaggatgagcctgccctgttcgtggccctgaccttcgagcggcgggaggtcctggactcctccaatatcaaaccaatgaacctgatcggcgtggcaagaggcgaaaacatccccgccgtgatcgccctgaccgaccccgagggctgcccactgagccggtttaaggatagcctgggaaacccaacccacatcctgagaatcggcgagagctataaggagaagcagcggaccatccaggccaagaaggaggtggagcagcggagagccggcggctacagccggaagtacgccagcaaagccaagaatctggcagacgatatggtgagaaacaccgctagagatctgctgtactacgccgtgacccaggatgccatgctgatcttcgccaacctgagccggggcttcggccggcagggcaagcggaccttcatggccgagagacagtacacacggatggaggactggctgaccgccaagctggcctacgagggcctgagcaagacctacctgtccaagacactggcccagtacacctccaagacatgcagcaactgtgggtttaccatcaccagcgccgactacgacagggtgctggagaagctgaagaagacagcaacaggctggatgaccacaattaacggcaaggagctgaaggtggagggccagattacctactacaacagatacaagagacagaacgtagtcaaggacctgtccgtcgagctggatagactgagcgaagaatctgtgaacaacgacatctcctcctggacaaagggcagaagcggagaagctctgagcctcctgaagaaaagattctcccatagacccgtgcaggagaagttcgtgtgcctgaactgcggcttcgagacacacgcagccgagcaagccgccctgaacatcgccagatcctggctgttcctgcggagccaggagtacaagaaataccagacaaacaagacaaccggcaacaccgataagagagccttcgtcgagacctggcagtccttttaccggaagaagcttaaggaggtgtggaaacctgccgtgcggtctggcggatctggcggaggctccgtgaccgagctgctgaccttcaaggacatcagcgtggacttcacccaggaggagtggggccagctggcccccgcccacaggaacctgtacagggaggtgatgctggagaactacggcaacctggtgagcgtggccggctgccagctgagcaagcccagcgtgatcagccagctggagaagggcgaggagccctggatgaccgagaaggagggcgccggcgaccccagcagcgacctgaagagcggcggcccaagcagcggcgcccctcctcccagcggcggcagcccagccggctccccaacctctaccgaggagggcacctctgagtccgccacccccgagagcggccctggcacctccaccgagcccagcgagggcagcgcacccggcagccctgccggcagccccacctccacagaggagggaaccagcaccgagcccagcgaaggcagcgccccaggcaccagcaccgagcctagtgagcaggagattaaacggatcaacaagatcagaagaagacttgtgaaagacagcaacaccaagaaggccggcaagacaggccccatgaaaaccctgctggttagagtgatgacacccgatctgagagagcggctggaaaacctgagaaagaagcctgaaaatatcccccagcccatcagcaatacatctagagccaacctgaataagctgctgaccgattacaccgaaatgaagaaggcgatcctgcatgtgtactgggaagagttccagaaggaccctgtgggcctgatgagccgggtggcccagcctgccagcaagaagatcgatcagaacaagctgaaacctgagatggacgagaagggcaacctgaccaccgccggctttgcctgctctcagtgtggccagcccctgttcgtgtacaagctggagcaggtgtctgagaagggcaaggcttacaccaactacttcggacggtgcaatgtggccgagcacgaaaagctgatcctgctggcccagctgaagcccgagaaggatagcgacgaagccgtgacatatagcctgggaaagtttgggcagagggccctggatttctacagcattcatgtgaccaaggagtccacccaccccgtgaagcccctggcccagatcgccggaaacagatacgcctccggacctgtgggaaaggccctgagcgacgcatgtatgggcacaatcgcctccttcctgtctaagtaccaggacatcatcatcgaacaccagaaggtggtgaagggcaaccagaagagactggagagcctgcgggagctggccggcaaggaaaacctggaataccctagcgtgaccctgccacctcagcctcacaccaaggagggcgttgatgcctacaacgaagtgatcgcccgggtgcgaatgtgggtgaacctgaacctgtggcagaagctgaagctaagcagagatgatgccaagcctctgctgagactgaagggattcccttcctttcctctggtcgagagacaggccaacgaagtggactggtgggacatggtgtgtaacgtgaagaagctgatcaacgagaaaaaggaggatggcaaggtgttttggcagaatctggctggctacaagagacaggaagccctgagaccatacctgagcagcgaggaagatcggaagaagggaaagaaattcgctcggtaccagctgggcgacctgctgctgcacctggaaaagaagcacggcgaggactggggaaaggtgtacgacgaggcctgggagcggattgacaagaaagtggaaggcctgagcaagcacatcaagctggaagaggaacggagaagcgaggacgcccagagcaaggccgccctgaccgactggctgcgggctaaggccagcttcgtgatcgagggcctgaaggaggccgacaaggacgagttctgcagatgcgagctgaagctgcagaagtggtacggggacctgcggggaaagcccttcgccatcgaagccgagaacagcatcctggacatcagcggcttcagcaagcagtacaactgtgccttcatctggcagaaggacggcgtgaagaagctgaacctgtacctgatcatcaactacttcaagggcggcaagctgcggttcaagaagatcaaacctgaagccttcgaagccaacagattctacaccgtgatcaacaaaaagagcggcgagatcgtgcccatggaggtgaacttcaacttcgacgaccccaacctgatcatcctgcctctggcctttggcaagagacagggcagagaattcatctggaacgacctgctgtccctggaaaccggcagcctgaagctggccaacggaagagtgatcgagaagacactgtacaacagaagaacccggcaggatgagcctgccctgttcgtggccctgaccttcgagcggcgggaggtcctggactcctccaatatcaaaccaatgaacctgatcggcgtggcaagaggcgaaaacatccccgccgtgatcgccctgaccgaccccgagggctgcccactgagccggtttaaggatagcctgggaaacccaacccacatcctgagaatcggcgagagctataaggagaagcagcggaccatccaggccaagaaggaggtggagcagcggagagccggcggctacagccggaagtacgccagcaaagccaagaatctggcagacgatatggtgagaaacaccgctagagatctgctgtactacgccgtgacccaggatgccatgctgatcttcgccaacctgagccggggcttcggccggcagggcaagcggaccttcatggccgagagacagtacacacggatggaggactggctgaccgccaagctggcctacgagggcctgagcaagacctacctgtccaagacactggcccagtacacctccaagacatgcagcaactgtgggtttaccatcaccagcgccgactacgacagggtgctggagaagctgaagaagacagcaacaggctggatgaccacaattaacggcaaggagctgaaggtggagggccagattacctactacaacagatacaagagacagaacgtagtcaaggacctgtccgtcgagctggatagactgagcgaagaatctgtgaacaacgacatctcctcctggacaaagggcagaagcggagaagctctgagcctcctgaagaaaagattctcccatagacccgtgcaggagaagttcgtgtgcctgaactgcggcttcgagacacacgcagccgagcaagccgccctgaacatcgccagatcctggctgttcctgcggagccaggagtacaagaaataccagacaaacaagacaaccggcaacaccgataagagagccttcgtcgagacctggcagtccttttaccggaagaagcttaaggaggtgtggaaacctgccgtgcggtctggcggatctggcggaggctcctgtgaccgagctgctgaccttcaaggacatcagcgtggacttcacccaggaggagtggggccagctggcccccgcccacaggaacctgtacagggaggtgatgctggagaactacggcaacctggtgagcgtggccggctgccagctgagcaagcccagcgtgatcagccagctggagaagggcgaggagccctggatgaccgagaaggagggcgccggcgaccccagcagcgacctgaagagcggatctggctccggcagcggccccaagaaaaagagaaaagtctaagctgccttctgcggggcttgccttctggccatgcccttcttctctcccttgcacctgtacctcttggtctttgaataaagcctgagtaggaaggctagcaaaaaaaaaaaaaaaaaaaaaaaaaaaaaaaaaaaaaaaaaaaaaaaaaaaaaaaaaaaaaaaaaaaaaaaaaaaaaaaa

SEQ ID NO: 16804 - RNA, 9485 nt, synthetic construct
  source 1..9485: mol_type = other RNA
aggaaataagagagaaaagaagagtaagaagaaatataagagccaccatggcccctaagaagaagcgtaaagtgagccggatggaacgcctcgtctacgaggtgcggcagaagtgcagaaacatcgaggacatctgcatctcctgcggatctctgaacgtgaccctggagcacccactgttcatcggcggcatgtgccagaactgtaaaaactgttttctggagtgtgcctatcaatacgacgatgacggctaccagagctactgcaccatctgttgcggcggaagagaggtgctgatgtgtggaaataacaactgctgccggtgcttctgcgtggaatgcgtggacctgctggtgggccccggcgccgcccaggccgctattaaggaagatccttggaactgctacatgtgcggccacaagggcacatacggcctgctgagacggagagaggactggcctagcagactgcagatgttcttcgccaataaccacgaccaggagttcgacccccctaaggtgtaccctcccgtccccgccgagaagagaaagcccatccgggtcctgagcctgttcgatggcatcgccaccggtctgctggtgctgaaggacctgggcatccaggtggataggtacattgcctccgaggtgtgcgaggactccatcaccgtgggaatggtgcgtcatcagggcaagatcatgtacgtgggcgacgtgcggagcgtgacacagaagcatatccaggagtggggccctttcgacctggtgatcggcggcagcccttgcaatgacctgagcatcgtgaacccagcccggaagggcctgtacgagggaaccggcagactgttcttcgagttttacagactgctgcacgacgcccggcctaaggaaggcgacgaccggcccttcttttggctgttcgagaatgtggtggccatgggagtcagcgacaagcgggatattagccggttcctggagagcaaccccgtgatgatcgatgccaaggaagtgagcgccgcccaccgggccagatacttctggggcaatctgcctggcatgaacagacccctggccagcaccgtgaacgacaagctggagctgcaggagtgcctggagcacggccggatcgccaagttcagcaaggtgagaaccatcaccacccgaagcaacagcatcaaacaaggcaaggaccagcactttcctgtgttcatgaacgagaaggaggacatcctgtggtgtaccgagatggagagagtgttcgggttcccagtccactacacagatgtcagcaacatgtctagactggccagacagagactgctgggaagaagctggtccgtccctgtgatcagacacctgttcgcccctctgaaggagtacttcgcctgcgtgagcagcggcaacagcaacgccaacagccggggccccagcttctctagcggcctggtgccactgtccctgagagggagccacatgggccccatggagatctacaaaaccgtgagcgcctggaagcggcagcctgtgcgcgtgctgagcctgtttcggaatatcgataaagtcctgaaaagcctgggattcctggagagcggctctggctccggcggtggcaccctgaagtacgtggaggatgtgacaaacgtggtcagacgggatgtggagaagtggggccccttcgatctggtgtacggcagcacccaacccctgggcagctcttgtgaccggtgccctggctggtacatgtttcagttccaccggatcctgcagtacgccctgccgagacaggagtcccagcggccattcttttggattttcatggacaacttgctgctgaccgaggatgaccaggaaactaccactcggttcctgcagaccgaagccgtgaccctgcaggacgtgagaggccgggactaccagaacgccatgcgggtgtggtccaacatccctggactgaaaagcaagcacgcacctctgacccctaaagaagaggagtacctgcaggcccaggtgcggagcagaagcaagctggacgcccctaaggtggatctgctggtgaagaattgcctcctgcccctgagagagtacttcaagtatttcagccagaatagtctgcccctgggaggcagcggcggcggcgccctggtgacatttgaggacgtcgccgtgcggttcacccaggaggaatgggctctgctggatccttctcagaaaatcctgtaccgggacgtgatgagagagacataccggaatctgacctccgtgggcatcaactgggaatgttgggaccttgaagcctgcttcagaagcctgggaagaaacctgagagtgcaggtggtgaagagaaagtgcgagctgaccaacagcggcccctgcgccgagggcggcccaagcagcggcgcccctcctcccagcggcggcagcccagccggctccccaacctctaccgaggagggcacctctgagtccgccacccccgagagcggccctggcacctccaccgagcccagcgagggcagcgcacccggcagccctgccggcagccccacctccacagaggagggaaccagcaccgagcccagcgaaggcagcgccccaggcaccagcaccgagcctagtgagcaggagattaaacggatcaacaagatcagaagaagacttgtgaaagacagcaacaccaagaaggccggcaagacaggccccatgaaaaccctgctggttagagtgatgacacccgatctgagagagcggctggaaaacctgagaaagaagcctgaaaatatcccccagcccatcagcaatacatctagagccaacctgaataagctgctgaccgattacaccgaaatgaagaaggcgatcctgcatgtgtactgggaagagttccagaaggaccctgtgggcctgatgagccgggtggcccagcctgccagcaagaagatcgatcagaacaagctgaaacctgagatggacgagaagggcaacctgaccaccgccggctttgcctgctctcagtgtggccagcccctgttcgtgtacaagctggagcaggtgtctgagaagggcaaggcttacaccaactacttcggacggtgcaatgtggccgagcacgaaaagctgatcctgctggcccagctgaagcccgagaaggatagcgacgaagccgtgacatatagcctgggaaagtttgggcagagggccctggatttctacagcattcatgtgaccaaggagtccacccaccccgtgaagcccctggcccagatcgccggaaacagatacgcctccggacctgtgggaaaggccctgagcgacgcatgtatgggcacaatcgcctccttcctgtctaagtaccaggacatcatcatcgaacaccagaaggtggtgaagggcaaccagaagagactggagagcctgcgggagctggccggcaaggaaaacctggaataccctagcgtgaccctgccacctcagcctcacaccaaggagggcgttgatgcctacaacgaagtgatcgcccgggtgcgaatgtgggtgaacctgaacctgtggcagaagctgaagctaagcagagatgatgccaagcctctgctgagactgaagggattcccttcctttcctctggtcgagagacaggccaacgaagtggactggtgggacatggtgtgtaacgtgaagaagctgatcaacgagaaaaaggaggatggcaaggtgttttggcagaatctggctggctacaagagacaggaagccctgagaccatacctgagcagcgaggaagatcggaagaagggaaagaaattcgctcggtaccagctgggcgacctgctgctgcacctggaaaagaagcacggcgaggactggggaaaggtgtacgacgaggcctgggagcggattgacaagaaagtggaaggcctgagcaagcacatcaagctggaagaggaacggagaagcgaggacgcccagagcaaggccgccctgaccgactggctgcgggctaaggccagcttcgtgatcgagggcctgaaggaggccgacaaggacgagttctgcagatgcgagctgaagctgcagaagtggtacggggacctgcggggaaagcccttcgccatcgaagccgagaacagcatcctggacatcagcggcttcagcaagcagtacaactgtgccttcatctggcagaaggacggcgtgaagaagctgaacctgtacctgatcatcaactacttcaagggcggcaagctgcggttcaagaagatcaaacctgaagccttcgaagccaacagattctacaccgtgatcaacaaaaagagcggcgagatcgtgcccatggaggtgaacttcaacttcgacgaccccaacctgatcatcctgcctctggcctttggcaagagacagggcagagaattcatctggaacgacctgctgtccctggaaaccggcagcctgaagctggccaacggaagagtgatcgagaagacactgtacaacagaagaacccggcaggatgagcctgccctgttcgtggccctgaccttcgagcggcgggaggtcctggactcctccaatatcaaaccaatgaacctgatcggcgtggcaagaggcgaaaacatccccgccgtgatcgccctgaccgaccccgagggctgcccactgagccggtttaaggatagcctgggaaacccaacccacatcctgagaatcggcgagagctataaggagaagcagcggaccatccaggccaagaaggaggtggagcagcggagagccggcggctacagccggaagtacgccagcaaagccaagaatctggcagacgatatggtgagaaacaccgctagagatctgctgtactacgccgtgacccaggatgccatgctgatcttcgccaacctgagccggggcttcggccggcagggcaagcggaccttcatggccgagagacagtacacacggatggaggactggctgaccgccaagctggcctacgagggcctgagcaagacctacctgtccaagacactggcccagtacacctccaagacatgcagcaactgtgggtttaccatcaccagcgccgactacgacagggtgctggagaagctgaagaagacagcaacaggctggatgaccacaattaacggcaaggagctgaaggtggagggccagattacctactacaacagatacaagagacagaacgtagtcaaggacctgtccgtcgagctggatagactgagcgaagaatctgtgaacaacgacatctcctcctggacaaagggcagaagcggagaagctctgagcctcctgaagaaaagattctcccatagacccgtgcaggagaagttcgtgtgcctgaactgcggcttcgagacacacgcagccgagcaagccgccctgaacatcgccagatcctggctgttcctgcggagccaggagtacaagaaataccagacaaacaagacaaccggcaacaccgataagagagccttcgtcgagacctggcagtccttttaccggaagaagcttaaggaggtgtggaaacctgccgtgcggtctggcggatctggcggaggctccgacctggaccaggtgaccttcgaggacgtggtggtggacttcaccagggaggagtggggctgcctggagcccgcccagaggaccctgtacagggacgtgatgctggagaccttcaggctgctggtgagcgtgggccactggctgcccaagcccgacgtgatcagcctgctggagcaggaggccgagctgtgggccgccgacgagggcggccccaggggcatgtgccccgacctggagaccaggggcggcccaagcagcggcgcccctcctcccagcggcggcagcccagccggctccccaacctctaccgaggagggcacctctgagtccgccacccccgagagcggccctggcacctccaccgagcccagcgagggcagcgcacccggcagccctgccggcagccccacctccacagaggagggaaccagcaccgagcccagcgaaggcagcgccccaggcaccagcaccgagcctagtgagcaggagattaaacggatcaacaagatcagaagaagacttgtgaaagacagcaacaccaagaaggccggcaagacaggccccatgaaaaccctgctggttagagtgatgacacccgatctgagagagcggctggaaaacctgagaaagaagcctgaaaatatcccccagcccatcagcaatacatctagagccaacctgaataagctgctgaccgattacaccgaaatgaagaaggcgatcctgcatgtgtactgggaagagttccagaaggaccctgtgggcctgatgagccgggtggcccagcctgccagcaagaagatcgatcagaacaagctgaaacctgagatggacgagaagggcaacctgaccaccgccggctttgcctgctctcagtgtggccagcccctgttcgtgtacaagctggagcaggtgtctgagaagggcaaggcttacaccaactacttcggacggtgcaatgtggccgagcacgaaaagctgatcctgctggcccagctgaagcccgagaaggatagcgacgaagccgtgacatatagcctgggaaagtttgggcagagggccctggatttctacagcattcatgtgaccaaggagtccacccaccccgtgaagcccctggcccagatcgccggaaacagatacgcctccggacctgtgggaaaggccctgagcgacgcatgtatgggcacaatcgcctccttcctgtctaagtaccaggacatcatcatcgaacaccagaaggtggtgaagggcaaccagaagagactggagagcctgcgggagctggccggcaaggaaaacctggaataccctagcgtgaccctgccacctcagcctcacaccaaggagggcgttgatgcctacaacgaagtgatcgcccgggtgcgaatgtgggtgaacctgaacctgtggcagaagctgaagctaagcagagatgatgccaagcctctgctgagactgaagggattcccttcctttcctctggtcgagagacaggccaacgaagtggactggtgggacatggtgtgtaacgtgaagaagctgatcaacgagaaaaaggaggatggcaaggtgttttggcagaatctggctggctacaagagacaggaagccctgagaccatacctgagcagcgaggaagatcggaagaagggaaagaaattcgctcggtaccagctgggcgacctgctgctgcacctggaaaagaagcacggcgaggactggggaaaggtgtacgacgaggcctgggagcggattgacaagaaagtggaaggcctgagcaagcacatcaagctggaagaggaacggagaagcgaggacgcccagagcaaggccgccctgaccgactggctgcgggctaaggccagcttcgtgatcgagggcctgaaggaggccgacaaggacgagttctgcagatgcgagctgaagctgcagaagtggtacggggacctgcggggaaagcccttcgccatcgaagccgagaacagcatcctggacatcagcggcttcagcaagcagtacaactgtgccttcatctggcagaaggacggcgtgaagaagctgaacctgtacctgatcatcaactacttcaagggcggcaagctgcggttcaagaagatcaaacctgaagccttcgaagccaacagattctacaccgtgatcaacaaaaagagcggcgagatcgtgcccatggaggtgaacttcaacttcgacgaccccaacctgatcatcctgcctctggcctttggcaagagacagggcagagaattcatctggaacgacctgctgtccctggaaaccggcagcctgaagctggccaacggaagagtgatcgagaagacactgtacaacagaagaacccggcaggatgagcctgccctgttcgtggccctgaccttcgagcggcgggaggtcctggactcctccaatatcaaaccaatgaacctgatcggcgtggcaagaggcgaaaacatccccgccgtgatcgccctgaccgaccccgagggctgcccactgagccggtttaaggatagcctgggaaacccaacccacatcctgagaatcggcgagagctataaggagaagcagcggaccatccaggccaagaaggaggtggagcagcggagagccggcggctacagccggaagtacgccagcaaagccaagaatctggcagacgatatggtgagaaacaccgctagagatctgctgtactacgccgtgacccaggatgccatgctgatcttcgccaacctgagccggggcttcggccggcagggcaagcggaccttcatggccgagagacagtacacacggatggaggactggctgaccgccaagctggcctacgagggcctgagcaagacctacctgtccaagacactggcccagtacacctccaagacatgcagcaactgtgggtttaccatcaccagcgccgactacgacagggtgctggagaagctgaagaagacagcaacaggctggatgaccacaattaacggcaaggagctgaaggtggagggccagattacctactacaacagatacaagagacagaacgtagtcaaggacctgtccgtcgagctggatagactgagcgaagaatctgtgaacaacgacatctcctcctggacaaagggcagaagcggagaagctctgagcctcctgaagaaaagattctcccatagacccgtgcaggagaagttcgtgtgcctgaactgcggcttcgagacacacgcagccgagcaagccgccctgaacatcgccagatcctggctgttcctgcggagccaggagtacaagaaataccagacaaacaagacaaccggcaacaccgataagagagccttcgtcgagacctggcagtccttttaccggaagaagcttaaggaggtgtggaaacctgccgtgcggtctggcggatctggcggaggctcctgacctggaccaggtgaccttcgaggacgtggtggtggacttcaccagggaggagtggggctgcctggagcccgcccagaggaccctgtacagggacgtgatgctggagaccttcaggctgctggtgagcgtgggccactggctgcccaagcccgacgtgatcagcctgctggagcaggaggccgagctgtgggccgccgacgagggcggccccaggggcatgtgccccgacctggagaccaggggatctggctccggcagcggccccaagaaaaagagaaaagtctaagctgccttctgcggggcttgccttctggccatgcccttcttctctcccttgcacctgtacctcttggtctttgaataaagcctgagtaggaaggctagcaaaaaaaaaaaaaaaaaaaaaaaaaaaaaaaaaaaaaaaaaaaaaaaaaaaaaaaaaaaaaaaaaaaaaaaaaaaaaaaa

SEQ ID NO: 16805 - RNA, 9485 nt, synthetic construct
  source 1..9485: mol_type = other RNA
aggaaataagagagaaaagaagagtaagaagaaatataagagccaccatggcccctaagaagaagcgtaaagtgagccggatggaacgcctcgtctacgaggtgcggcagaagtgcagaaacatcgaggacatctgcatctcctgcggatctctgaacgtgaccctggagcacccactgttcatcggcggcatgtgccagaactgtaaaaactgttttctggagtgtgcctatcaatacgacgatgacggctaccagagctactgcaccatctgttgcggcggaagagaggtgctgatgtgtggaaataacaactgctgccggtgcttctgcgtggaatgcgtggacctgctggtgggccccggcgccgcccaggccgctattaaggaagatccttggaactgctacatgtgcggccacaagggcacatacggcctgctgagacggagagaggactggcctagcagactgcagatgttcttcgccaataaccacgaccaggagttcgacccccctaaggtgtaccctcccgtccccgccgagaagagaaagcccatccgggtcctgagcctgttcgatggcatcgccaccggtctgctggtgctgaaggacctgggcatccaggtggataggtacattgcctccgaggtgtgcgaggactccatcaccgtgggaatggtgcgtcatcagggcaagatcatgtacgtgggcgacgtgcggagcgtgacacagaagcatatccaggagtggggccctttcgacctggtgatcggcggcagcccttgcaatgacctgagcatcgtgaacccagcccggaagggcctgtacgagggaaccggcagactgttcttcgagttttacagactgctgcacgacgcccggcctaaggaaggcgacgaccggcccttcttttggctgttcgagaatgtggtggccatgggagtcagcgacaagcgggatattagccggttcctggagagcaaccccgtgatgatcgatgccaaggaagtgagcgccgcccaccgggccagatacttctggggcaatctgcctggcatgaacagacccctggccagcaccgtgaacgacaagctggagctgcaggagtgcctggagcacggccggatcgccaagttcagcaaggtgagaaccatcaccacccgaagcaacagcatcaaacaaggcaaggaccagcactttcctgtgttcatgaacgagaaggaggacatcctgtggtgtaccgagatggagagagtgttcgggttcccagtccactacacagatgtcagcaacatgtctagactggccagacagagactgctgggaagaagctggtccgtccctgtgatcagacacctgttcgcccctctgaaggagtacttcgcctgcgtgagcagcggcaacagcaacgccaacagccggggccccagcttctctagcggcctggtgccactgtccctgagagggagccacatgggccccatggagatctacaaaaccgtgagcgcctggaagcggcagcctgtgcgcgtgctgagcctgtttcggaatatcgataaagtcctgaaaagcctgggattcctggagagcggctctggctccggcggtggcaccctgaagtacgtggaggatgtgacaaacgtggtcagacgggatgtggagaagtggggccccttcgatctggtgtacggcagcacccaacccctgggcagctcttgtgaccggtgccctggctggtacatgtttcagttccaccggatcctgcagtacgccctgccgagacaggagtcccagcggccattcttttggattttcatggacaacttgctgctgaccgaggatgaccaggaaactaccactcggttcctgcagaccgaagccgtgaccctgcaggacgtgagaggccgggactaccagaacgccatgcgggtgtggtccaacatccctggactgaaaagcaagcacgcacctctgacccctaaagaagaggagtacctgcaggcccaggtgcggagcagaagcaagctggacgcccctaaggtggatctgctggtgaagaattgcctcctgcccctgagagagtacttcaagtatttcagccagaatagtctgcccctgggaggcagcggcggcggcgccctggtgacatttgaggacgtcgccgtgcggttcacccaggaggaatgggctctgctggatccttctcagaaaatcctgtaccgggacgtgatgagagagacataccggaatctgacctccgtgggcatcaactgggaatgttgggaccttgaagcctgcttcagaagcctgggaagaaacctgagagtgcaggtggtgaagagaaagtgcgagctgaccaacagcggcccctgcgccgagggcggcccaagcagcggcgcccctcctcccagcggcggcagcccagccggctccccaacctctaccgaggagggcacctctgagtccgccacccccgagagcggccctggcacctccaccgagcccagcgagggcagcgcacccggcagccctgccggcagccccacctccacagaggagggaaccagcaccgagcccagcgaaggcagcgccccaggcaccagcaccgagcctagtgagcaggagattaaacggatcaacaagatcagaagaagacttgtgaaagacagcaacaccaagaaggccggcaagacaggccccatgaaaaccctgctggttagagtgatgacacccgatctgagagagcggctggaaaacctgagaaagaagcctgaaaatatcccccagcccatcagcaatacatctagagccaacctgaataagctgctgaccgattacaccgaaatgaagaaggcgatcctgcatgtgtactgggaagagttccagaaggaccctgtgggcctgatgagccgggtggcccagcctgccagcaagaagatcgatcagaacaagctgaaacctgagatggacgagaagggcaacctgaccaccgccggctttgcctgctctcagtgtggccagcccctgttcgtgtacaagctggagcaggtgtctgagaagggcaaggcttacaccaactacttcggacggtgcaatgtggccgagcacgaaaagctgatcctgctggcccagctgaagcccgagaaggatagcgacgaagccgtgacatatagcctgggaaagtttgggcagagggccctggatttctacagcattcatgtgaccaaggagtccacccaccccgtgaagcccctggcccagatcgccggaaacagatacgcctccggacctgtgggaaaggccctgagcgacgcatgtatgggcacaatcgcctccttcctgtctaagtaccaggacatcatcatcgaacaccagaaggtggtgaagggcaaccagaagagactggagagcctgcgggagctggccggcaaggaaaacctggaataccctagcgtgaccctgccacctcagcctcacaccaaggagggcgttgatgcctacaacgaagtgatcgcccgggtgcgaatgtgggtgaacctgaacctgtggcagaagctgaagctaagcagagatgatgccaagcctctgctgagactgaagggattcccttcctttcctctggtcgagagacaggccaacgaagtggactggtgggacatggtgtgtaacgtgaagaagctgatcaacgagaaaaaggaggatggcaaggtgttttggcagaatctggctggctacaagagacaggaagccctgagaccatacctgagcagcgaggaagatcggaagaagggaaagaaattcgctcggtaccagctgggcgacctgctgctgcacctggaaaagaagcacggcgaggactggggaaaggtgtacgacgaggcctgggagcggattgacaagaaagtggaaggcctgagcaagcacatcaagctggaagaggaacggagaagcgaggacgcccagagcaaggccgccctgaccgactggctgcgggctaaggccagcttcgtgatcgagggcctgaaggaggccgacaaggacgagttctgcagatgcgagctgaagctgcagaagtggtacggggacctgcggggaaagcccttcgccatcgaagccgagaacagcatcctggacatcagcggcttcagcaagcagtacaactgtgccttcatctggcagaaggacggcgtgaagaagctgaacctgtacctgatcatcaactacttcaagggcggcaagctgcggttcaagaagatcaaacctgaagccttcgaagccaacagattctacaccgtgatcaacaaaaagagcggcgagatcgtgcccatggaggtgaacttcaacttcgacgaccccaacctgatcatcctgcctctggcctttggcaagagacagggcagagaattcatctggaacgacctgctgtccctggaaaccggcagcctgaagctggccaacggaagagtgatcgagaagacactgtacaacagaagaacccggcaggatgagcctgccctgttcgtggccctgaccttcgagcggcgggaggtcctggactcctccaatatcaaaccaatgaacctgatcggcgtggcaagaggcgaaaacatccccgccgtgatcgccctgaccgaccccgagggctgcccactgagccggtttaaggatagcctgggaaacccaacccacatcctgagaatcggcgagagctataaggagaagcagcggaccatccaggccaagaaggaggtggagcagcggagagccggcggctacagccggaagtacgccagcaaagccaagaatctggcagacgatatggtgagaaacaccgctagagatctgctgtactacgccgtgacccaggatgccatgctgatcttcgccaacctgagccggggcttcggccggcagggcaagcggaccttcatggccgagagacagtacacacggatggaggactggctgaccgccaagctggcctacgagggcctgagcaagacctacctgtccaagacactggcccagtacacctccaagacatgcagcaactgtgggtttaccatcaccagcgccgactacgacagggtgctggagaagctgaagaagacagcaacaggctggatgaccacaattaacggcaaggagctgaaggtggagggccagattacctactacaacagatacaagagacagaacgtagtcaaggacctgtccgtcgagctggatagactgagcgaagaatctgtgaacaacgacatctcctcctggacaaagggcagaagcggagaagctctgagcctcctgaagaaaagattctcccatagacccgtgcaggagaagttcgtgtgcctgaactgcggcttcgagacacacgcagccgagcaagccgccctgaacatcgccagatcctggctgttcctgcggagccaggagtacaagaaataccagacaaacaagacaaccggcaacaccgataagagagccttcgtcgagacctggcagtccttttaccggaagaagcttaaggaggtgtggaaacctgccgtgcggtctggcggatctggcggaggctccgcccacggcagcgtgaccttcagggacgtggccatggacttcagccagcaggagtgggagtgcctgaaccccttccagaagaccctgtacagggacgtgatgatggagaactacggcaacctggtgagcctgggccacagcatcagcaagcccgacgtgatcaccctgctggagcagggcaaggagccctggatgatcgtgaagaaggagaccaggaagtggaggaaggacctggagagcaggggcggcccaagcagcggcgcccctcctcccagcggcggcagcccagccggctccccaacctctaccgaggagggcacctctgagtccgccacccccgagagcggccctggcacctccaccgagcccagcgagggcagcgcacccggcagccctgccggcagccccacctccacagaggagggaaccagcaccgagcccagcgaaggcagcgccccaggcaccagcaccgagcctagtgagcaggagattaaacggatcaacaagatcagaagaagacttgtgaaagacagcaacaccaagaaggccggcaagacaggccccatgaaaaccctgctggttagagtgatgacacccgatctgagagagcggctggaaaacctgagaaagaagcctgaaaatatcccccagcccatcagcaatacatctagagccaacctgaataagctgctgaccgattacaccgaaatgaagaaggcgatcctgcatgtgtactgggaagagttccagaaggaccctgtgggcctgatgagccgggtggcccagcctgccagcaagaagatcgatcagaacaagctgaaacctgagatggacgagaagggcaacctgaccaccgccggctttgcctgctctcagtgtggccagcccctgttcgtgtacaagctggagcaggtgtctgagaagggcaaggcttacaccaactacttcggacggtgcaatgtggccgagcacgaaaagctgatcctgctggcccagctgaagcccgagaaggatagcgacgaagccgtgacatatagcctgggaaagtttgggcagagggccctggatttctacagcattcatgtgaccaaggagtccacccaccccgtgaagcccctggcccagatcgccggaaacagatacgcctccggacctgtgggaaaggccctgagcgacgcatgtatgggcacaatcgcctccttcctgtctaagtaccaggacatcatcatcgaacaccagaaggtggtgaagggcaaccagaagagactggagagcctgcgggagctggccggcaaggaaaacctggaataccctagcgtgaccctgccacctcagcctcacaccaaggagggcgttgatgcctacaacgaagtgatcgcccgggtgcgaatgtgggtgaacctgaacctgtggcagaagctgaagctaagcagagatgatgccaagcctctgctgagactgaagggattcccttcctttcctctggtcgagagacaggccaacgaagtggactggtgggacatggtgtgtaacgtgaagaagctgatcaacgagaaaaaggaggatggcaaggtgttttggcagaatctggctggctacaagagacaggaagccctgagaccatacctgagcagcgaggaagatcggaagaagggaaagaaattcgctcggtaccagctgggcgacctgctgctgcacctggaaaagaagcacggcgaggactggggaaaggtgtacgacgaggcctgggagcggattgacaagaaagtggaaggcctgagcaagcacatcaagctggaagaggaacggagaagcgaggacgcccagagcaaggccgccctgaccgactggctgcgggctaaggccagcttcgtgatcgagggcctgaaggaggccgacaaggacgagttctgcagatgcgagctgaagctgcagaagtggtacggggacctgcggggaaagcccttcgccatcgaagccgagaacagcatcctggacatcagcggcttcagcaagcagtacaactgtgccttcatctggcagaaggacggcgtgaagaagctgaacctgtacctgatcatcaactacttcaagggcggcaagctgcggttcaagaagatcaaacctgaagccttcgaagccaacagattctacaccgtgatcaacaaaaagagcggcgagatcgtgcccatggaggtgaacttcaacttcgacgaccccaacctgatcatcctgcctctggcctttggcaagagacagggcagagaattcatctggaacgacctgctgtccctggaaaccggcagcctgaagctggccaacggaagagtgatcgagaagacactgtacaacagaagaacccggcaggatgagcctgccctgttcgtggccctgaccttcgagcggcgggaggtcctggactcctccaatatcaaaccaatgaacctgatcggcgtggcaagaggcgaaaacatccccgccgtgatcgccctgaccgaccccgagggctgcccactgagccggtttaaggatagcctgggaaacccaacccacatcctgagaatcggcgagagctataaggagaagcagcggaccatccaggccaagaaggaggtggagcagcggagagccggcggctacagccggaagtacgccagcaaagccaagaatctggcagacgatatggtgagaaacaccgctagagatctgctgtactacgccgtgacccaggatgccatgctgatcttcgccaacctgagccggggcttcggccggcagggcaagcggaccttcatggccgagagacagtacacacggatggaggactggctgaccgccaagctggcctacgagggcctgagcaagacctacctgtccaagacactggcccagtacacctccaagacatgcagcaactgtgggtttaccatcaccagcgccgactacgacagggtgctggagaagctgaagaagacagcaacaggctggatgaccacaattaacggcaaggagctgaaggtggagggccagattacctactacaacagatacaagagacagaacgtagtcaaggacctgtccgtcgagctggatagactgagcgaagaatctgtgaacaacgacatctcctcctggacaaagggcagaagcggagaagctctgagcctcctgaagaaaagattctcccatagacccgtgcaggagaagttcgtgtgcctgaactgcggcttcgagacacacgcagccgagcaagccgccctgaacatcgccagatcctggctgttcctgcggagccaggagtacaagaaataccagacaaacaagacaaccggcaacaccgataagagagccttcgtcgagacctggcagtccttttaccggaagaagcttaaggaggtgtggaaacctgccgtgcggtctggcggatctggcggaggctcctgcccacggcagcgtgaccttcagggacgtggccatggacttcagccagcaggagtgggagtgcctgaaccccttccagaagaccctgtacagggacgtgatgatggagaactacggcaacctggtgagcctgggccacagcatcagcaagcccgacgtgatcaccctgctggagcagggcaaggagccctggatgatcgtgaagaaggagaccaggaagtggaggaaggacctggagagcaggggatctggctccggcagcggccccaagaaaaagagaaaagtctaagctgccttctgcggggcttgccttctggccatgcccttcttctctcccttgcacctgtacctcttggtctttgaataaagcctgagtaggaaggctagcaaaaaaaaaaaaaaaaaaaaaaaaaaaaaaaaaaaaaaaaaaaaaaaaaaaaaaaaaaaaaaaaaaaaaaaaaaaaaaaa

SEQ ID NO: 16806 - RNA, 9485 nt, synthetic construct
  source 1..9485: mol_type = other RNA
aggaaataagagagaaaagaagagtaagaagaaatataagagccaccatggcccctaagaagaagcgtaaagtgagccggatggaacgcctcgtctacgaggtgcggcagaagtgcagaaacatcgaggacatctgcatctcctgcggatctctgaacgtgaccctggagcacccactgttcatcggcggcatgtgccagaactgtaaaaactgttttctggagtgtgcctatcaatacgacgatgacggctaccagagctactgcaccatctgttgcggcggaagagaggtgctgatgtgtggaaataacaactgctgccggtgcttctgcgtggaatgcgtggacctgctggtgggccccggcgccgcccaggccgctattaaggaagatccttggaactgctacatgtgcggccacaagggcacatacggcctgctgagacggagagaggactggcctagcagactgcagatgttcttcgccaataaccacgaccaggagttcgacccccctaaggtgtaccctcccgtccccgccgagaagagaaagcccatccgggtcctgagcctgttcgatggcatcgccaccggtctgctggtgctgaaggacctgggcatccaggtggataggtacattgcctccgaggtgtgcgaggactccatcaccgtgggaatggtgcgtcatcagggcaagatcatgtacgtgggcgacgtgcggagcgtgacacagaagcatatccaggagtggggccctttcgacctggtgatcggcggcagcccttgcaatgacctgagcatcgtgaacccagcccggaagggcctgtacgagggaaccggcagactgttcttcgagttttacagactgctgcacgacgcccggcctaaggaaggcgacgaccggcccttcttttggctgttcgagaatgtggtggccatgggagtcagcgacaagcgggatattagccggttcctggagagcaaccccgtgatgatcgatgccaaggaagtgagcgccgcccaccgggccagatacttctggggcaatctgcctggcatgaacagacccctggccagcaccgtgaacgacaagctggagctgcaggagtgcctggagcacggccggatcgccaagttcagcaaggtgagaaccatcaccacccgaagcaacagcatcaaacaaggcaaggaccagcactttcctgtgttcatgaacgagaaggaggacatcctgtggtgtaccgagatggagagagtgttcgggttcccagtccactacacagatgtcagcaacatgtctagactggccagacagagactgctgggaagaagctggtccgtccctgtgatcagacacctgttcgcccctctgaaggagtacttcgcctgcgtgagcagcggcaacagcaacgccaacagccggggccccagcttctctagcggcctggtgccactgtccctgagagggagccacatgggccccatggagatctacaaaaccgtgagcgcctggaagcggcagcctgtgcgcgtgctgagcctgtttcggaatatcgataaagtcctgaaaagcctgggattcctggagagcggctctggctccggcggtggcaccctgaagtacgtggaggatgtgacaaacgtggtcagacgggatgtggagaagtggggccccttcgatctggtgtacggcagcacccaacccctgggcagctcttgtgaccggtgccctggctggtacatgtttcagttccaccggatcctgcagtacgccctgccgagacaggagtcccagcggccattcttttggattttcatggacaacttgctgctgaccgaggatgaccaggaaactaccactcggttcctgcagaccgaagccgtgaccctgcaggacgtgagaggccgggactaccagaacgccatgcgggtgtggtccaacatccctggactgaaaagcaagcacgcacctctgacccctaaagaagaggagtacctgcaggcccaggtgcggagcagaagcaagctggacgcccctaaggtggatctgctggtgaagaattgcctcctgcccctgagagagtacttcaagtatttcagccagaatagtctgcccctgggaggcagcggcggcggcgccctggtgacatttgaggacgtcgccgtgcggttcacccaggaggaatgggctctgctggatccttctcagaaaatcctgtaccgggacgtgatgagagagacataccggaatctgacctccgtgggcatcaactgggaatgttgggaccttgaagcctgcttcagaagcctgggaagaaacctgagagtgcaggtggtgaagagaaagtgcgagctgaccaacagcggcccctgcgccgagggcggcccaagcagcggcgcccctcctcccagcggcggcagcccagccggctccccaacctctaccgaggagggcacctctgagtccgccacccccgagagcggccctggcacctccaccgagcccagcgagggcagcgcacccggcagccctgccggcagccccacctccacagaggagggaaccagcaccgagcccagcgaaggcagcgccccaggcaccagcaccgagcctagtgagcaggagattaaacggatcaacaagatcagaagaagacttgtgaaagacagcaacaccaagaaggccggcaagacaggccccatgaaaaccctgctggttagagtgatgacacccgatctgagagagcggctggaaaacctgagaaagaagcctgaaaatatcccccagcccatcagcaatacatctagagccaacctgaataagctgctgaccgattacaccgaaatgaagaaggcgatcctgcatgtgtactgggaagagttccagaaggaccctgtgggcctgatgagccgggtggcccagcctgccagcaagaagatcgatcagaacaagctgaaacctgagatggacgagaagggcaacctgaccaccgccggctttgcctgctctcagtgtggccagcccctgttcgtgtacaagctggagcaggtgtctgagaagggcaaggcttacaccaactacttcggacggtgcaatgtggccgagcacgaaaagctgatcctgctggcccagctgaagcccgagaaggatagcgacgaagccgtgacatatagcctgggaaagtttgggcagagggccctggatttctacagcattcatgtgaccaaggagtccacccaccccgtgaagcccctggcccagatcgccggaaacagatacgcctccggacctgtgggaaaggccctgagcgacgcatgtatgggcacaatcgcctccttcctgtctaagtaccaggacatcatcatcgaacaccagaaggtggtgaagggcaaccagaagagactggagagcctgcgggagctggccggcaaggaaaacctggaataccctagcgtgaccctgccacctcagcctcacaccaaggagggcgttgatgcctacaacgaagtgatcgcccgggtgcgaatgtgggtgaacctgaacctgtggcagaagctgaagctaagcagagatgatgccaagcctctgctgagactgaagggattcccttcctttcctctggtcgagagacaggccaacgaagtggactggtgggacatggtgtgtaacgtgaagaagctgatcaacgagaaaaaggaggatggcaaggtgttttggcagaatctggctggctacaagagacaggaagccctgagaccatacctgagcagcgaggaagatcggaagaagggaaagaaattcgctcggtaccagctgggcgacctgctgctgcacctggaaaagaagcacggcgaggactggggaaaggtgtacgacgaggcctgggagcggattgacaagaaagtggaaggcctgagcaagcacatcaagctggaagaggaacggagaagcgaggacgcccagagcaaggccgccctgaccgactggctgcgggctaaggccagcttcgtgatcgagggcctgaaggaggccgacaaggacgagttctgcagatgcgagctgaagctgcagaagtggtacggggacctgcggggaaagcccttcgccatcgaagccgagaacagcatcctggacatcagcggcttcagcaagcagtacaactgtgccttcatctggcagaaggacggcgtgaagaagctgaacctgtacctgatcatcaactacttcaagggcggcaagctgcggttcaagaagatcaaacctgaagccttcgaagccaacagattctacaccgtgatcaacaaaaagagcggcgagatcgtgcccatggaggtgaacttcaacttcgacgaccccaacctgatcatcctgcctctggcctttggcaagagacagggcagagaattcatctggaacgacctgctgtccctggaaaccggcagcctgaagctggccaacggaagagtgatcgagaagacactgtacaacagaagaacccggcaggatgagcctgccctgttcgtggccctgaccttcgagcggcgggaggtcctggactcctccaatatcaaaccaatgaacctgatcggcgtggcaagaggcgaaaacatccccgccgtgatcgccctgaccgaccccgagggctgcccactgagccggtttaaggatagcctgggaaacccaacccacatcctgagaatcggcgagagctataaggagaagcagcggaccatccaggccaagaaggaggtggagcagcggagagccggcggctacagccggaagtacgccagcaaagccaagaatctggcagacgatatggtgagaaacaccgctagagatctgctgtactacgccgtgacccaggatgccatgctgatcttcgccaacctgagccggggcttcggccggcagggcaagcggaccttcatggccgagagacagtacacacggatggaggactggctgaccgccaagctggcctacgagggcctgagcaagacctacctgtccaagacactggcccagtacacctccaagacatgcagcaactgtgggtttaccatcaccagcgccgactacgacagggtgctggagaagctgaagaagacagcaacaggctggatgaccacaattaacggcaaggagctgaaggtggagggccagattacctactacaacagatacaagagacagaacgtagtcaaggacctgtccgtcgagctggatagactgagcgaagaatctgtgaacaacgacatctcctcctggacaaagggcagaagcggagaagctctgagcctcctgaagaaaagattctcccatagacccgtgcaggagaagttcgtgtgcctgaactgcggcttcgagacacacgcagccgagcaagccgccctgaacatcgccagatcctggctgttcctgcggagccaggagtacaagaaataccagacaaacaagacaaccggcaacaccgataagagagccttcgtcgagacctggcagtccttttaccggaagaagcttaaggaggtgtggaaacctgccgtgcggtctggcggatctggcggaggctccgcccaggagagcgtgaccttcgaggacgtggccgtgaacttcaccaacagggagtggcagagcctgacctacgcccagaggcacctgtacaagcacgtgatgctggagaactacaggaacatggtgagcctgggcttccccttccccaagccccccctgatcagccacctggagaggggcgtggagccctgcgtgcaggacccccaggacaaggagagcctgagctgcagctaccccgtgagcggcggcccaagcagcggcgcccctcctcccagcggcggcagcccagccggctccccaacctctaccgaggagggcacctctgagtccgccacccccgagagcggccctggcacctccaccgagcccagcgagggcagcgcacccggcagccctgccggcagccccacctccacagaggagggaaccagcaccgagcccagcgaaggcagcgccccaggcaccagcaccgagcctagtgagcaggagattaaacggatcaacaagatcagaagaagacttgtgaaagacagcaacaccaagaaggccggcaagacaggccccatgaaaaccctgctggttagagtgatgacacccgatctgagagagcggctggaaaacctgagaaagaagcctgaaaatatcccccagcccatcagcaatacatctagagccaacctgaataagctgctgaccgattacaccgaaatgaagaaggcgatcctgcatgtgtactgggaagagttccagaaggaccctgtgggcctgatgagccgggtggcccagcctgccagcaagaagatcgatcagaacaagctgaaacctgagatggacgagaagggcaacctgaccaccgccggctttgcctgctctcagtgtggccagcccctgttcgtgtacaagctggagcaggtgtctgagaagggcaaggcttacaccaactacttcggacggtgcaatgtggccgagcacgaaaagctgatcctgctggcccagctgaagcccgagaaggatagcgacgaagccgtgacatatagcctgggaaagtttgggcagagggccctggatttctacagcattcatgtgaccaaggagtccacccaccccgtgaagcccctggcccagatcgccggaaacagatacgcctccggacctgtgggaaaggccctgagcgacgcatgtatgggcacaatcgcctccttcctgtctaagtaccaggacatcatcatcgaacaccagaaggtggtgaagggcaaccagaagagactggagagcctgcgggagctggccggcaaggaaaacctggaataccctagcgtgaccctgccacctcagcctcacaccaaggagggcgttgatgcctacaacgaagtgatcgcccgggtgcgaatgtgggtgaacctgaacctgtggcagaagctgaagctaagcagagatgatgccaagcctctgctgagactgaagggattcccttcctttcctctggtcgagagacaggccaacgaagtggactggtgggacatggtgtgtaacgtgaagaagctgatcaacgagaaaaaggaggatggcaaggtgttttggcagaatctggctggctacaagagacaggaagccctgagaccatacctgagcagcgaggaagatcggaagaagggaaagaaattcgctcggtaccagctgggcgacctgctgctgcacctggaaaagaagcacggcgaggactggggaaaggtgtacgacgaggcctgggagcggattgacaagaaagtggaaggcctgagcaagcacatcaagctggaagaggaacggagaagcgaggacgcccagagcaaggccgccctgaccgactggctgcgggctaaggccagcttcgtgatcgagggcctgaaggaggccgacaaggacgagttctgcagatgcgagctgaagctgcagaagtggtacggggacctgcggggaaagcccttcgccatcgaagccgagaacagcatcctggacatcagcggcttcagcaagcagtacaactgtgccttcatctggcagaaggacggcgtgaagaagctgaacctgtacctgatcatcaactacttcaagggcggcaagctgcggttcaagaagatcaaacctgaagccttcgaagccaacagattctacaccgtgatcaacaaaaagagcggcgagatcgtgcccatggaggtgaacttcaacttcgacgaccccaacctgatcatcctgcctctggcctttggcaagagacagggcagagaattcatctggaacgacctgctgtccctggaaaccggcagcctgaagctggccaacggaagagtgatcgagaagacactgtacaacagaagaacccggcaggatgagcctgccctgttcgtggccctgaccttcgagcggcgggaggtcctggactcctccaatatcaaaccaatgaacctgatcggcgtggcaagaggcgaaaacatccccgccgtgatcgccctgaccgaccccgagggctgcccactgagccggtttaaggatagcctgggaaacccaacccacatcctgagaatcggcgagagctataaggagaagcagcggaccatccaggccaagaaggaggtggagcagcggagagccggcggctacagccggaagtacgccagcaaagccaagaatctggcagacgatatggtgagaaacaccgctagagatctgctgtactacgccgtgacccaggatgccatgctgatcttcgccaacctgagccggggcttcggccggcagggcaagcggaccttcatggccgagagacagtacacacggatggaggactggctgaccgccaagctggcctacgagggcctgagcaagacctacctgtccaagacactggcccagtacacctccaagacatgcagcaactgtgggtttaccatcaccagcgccgactacgacagggtgctggagaagctgaagaagacagcaacaggctggatgaccacaattaacggcaaggagctgaaggtggagggccagattacctactacaacagatacaagagacagaacgtagtcaaggacctgtccgtcgagctggatagactgagcgaagaatctgtgaacaacgacatctcctcctggacaaagggcagaagcggagaagctctgagcctcctgaagaaaagattctcccatagacccgtgcaggagaagttcgtgtgcctgaactgcggcttcgagacacacgcagccgagcaagccgccctgaacatcgccagatcctggctgttcctgcggagccaggagtacaagaaataccagacaaacaagacaaccggcaacaccgataagagagccttcgtcgagacctggcagtccttttaccggaagaagcttaaggaggtgtggaaacctgccgtgcggtctggcggatctggcggaggctcctgcccaggagagcgtgaccttcgaggacgtggccgtgaacttcaccaacagggagtggcagagcctgacctacgcccagaggcacctgtacaagcacgtgatgctggagaactacaggaacatggtgagcctgggcttccccttccccaagccccccctgatcagccacctggagaggggcgtggagccctgcgtgcaggacccccaggacaaggagagcctgagctgcagctaccccgtgagcggatctggctccggcagcggccccaagaaaaagagaaaagtctaagctgccttctgcggggcttgccttctggccatgcccttcttctctcccttgcacctgtacctcttggtctttgaataaagcctgagtaggaaggctagcaaaaaaaaaaaaaaaaaaaaaaaaaaaaaaaaaaaaaaaaaaaaaaaaaaaaaaaaaaaaaaaaaaaaaaaaaaaaaaaa

SEQ ID NO: 16807 - RNA, 9485 nt, synthetic construct
  source 1..9485: mol_type = other RNA
aggaaataagagagaaaagaagagtaagaagaaatataagagccaccatggcccctaagaagaagcgtaaagtgagccggatggaacgcctcgtctacgaggtgcggcagaagtgcagaaacatcgaggacatctgcatctcctgcggatctctgaacgtgaccctggagcacccactgttcatcggcggcatgtgccagaactgtaaaaactgttttctggagtgtgcctatcaatacgacgatgacggctaccagagctactgcaccatctgttgcggcggaagagaggtgctgatgtgtggaaataacaactgctgccggtgcttctgcgtggaatgcgtggacctgctggtgggccccggcgccgcccaggccgctattaaggaagatccttggaactgctacatgtgcggccacaagggcacatacggcctgctgagacggagagaggactggcctagcagactgcagatgttcttcgccaataaccacgaccaggagttcgacccccctaaggtgtaccctcccgtccccgccgagaagagaaagcccatccgggtcctgagcctgttcgatggcatcgccaccggtctgctggtgctgaaggacctgggcatccaggtggataggtacattgcctccgaggtgtgcgaggactccatcaccgtgggaatggtgcgtcatcagggcaagatcatgtacgtgggcgacgtgcggagcgtgacacagaagcatatccaggagtggggccctttcgacctggtgatcggcggcagcccttgcaatgacctgagcatcgtgaacccagcccggaagggcctgtacgagggaaccggcagactgttcttcgagttttacagactgctgcacgacgcccggcctaaggaaggcgacgaccggcccttcttttggctgttcgagaatgtggtggccatgggagtcagcgacaagcgggatattagccggttcctggagagcaaccccgtgatgatcgatgccaaggaagtgagcgccgcccaccgggccagatacttctggggcaatctgcctggcatgaacagacccctggccagcaccgtgaacgacaagctggagctgcaggagtgcctggagcacggccggatcgccaagttcagcaaggtgagaaccatcaccacccgaagcaacagcatcaaacaaggcaaggaccagcactttcctgtgttcatgaacgagaaggaggacatcctgtggtgtaccgagatggagagagtgttcgggttcccagtccactacacagatgtcagcaacatgtctagactggccagacagagactgctgggaagaagctggtccgtccctgtgatcagacacctgttcgcccctctgaaggagtacttcgcctgcgtgagcagcggcaacagcaacgccaacagccggggccccagcttctctagcggcctggtgccactgtccctgagagggagccacatgggccccatggagatctacaaaaccgtgagcgcctggaagcggcagcctgtgcgcgtgctgagcctgtttcggaatatcgataaagtcctgaaaagcctgggattcctggagagcggctctggctccggcggtggcaccctgaagtacgtggaggatgtgacaaacgtggtcagacgggatgtggagaagtggggccccttcgatctggtgtacggcagcacccaacccctgggcagctcttgtgaccggtgccctggctggtacatgtttcagttccaccggatcctgcagtacgccctgccgagacaggagtcccagcggccattcttttggattttcatggacaacttgctgctgaccgaggatgaccaggaaactaccactcggttcctgcagaccgaagccgtgaccctgcaggacgtgagaggccgggactaccagaacgccatgcgggtgtggtccaacatccctggactgaaaagcaagcacgcacctctgacccctaaagaagaggagtacctgcaggcccaggtgcggagcagaagcaagctggacgcccctaaggtggatctgctggtgaagaattgcctcctgcccctgagagagtacttcaagtatttcagccagaatagtctgcccctgggaggcagcggcggcggcgccctggtgacatttgaggacgtcgccgtgcggttcacccaggaggaatgggctctgctggatccttctcagaaaatcctgtaccgggacgtgatgagagagacataccggaatctgacctccgtgggcatcaactgggaatgttgggaccttgaagcctgcttcagaagcctgggaagaaacctgagagtgcaggtggtgaagagaaagtgcgagctgaccaacagcggcccctgcgccgagggcggcccaagcagcggcgcccctcctcccagcggcggcagcccagccggctccccaacctctaccgaggagggcacctctgagtccgccacccccgagagcggccctggcacctccaccgagcccagcgagggcagcgcacccggcagccctgccggcagccccacctccacagaggagggaaccagcaccgagcccagcgaaggcagcgccccaggcaccagcaccgagcctagtgagcaggagattaaacggatcaacaagatcagaagaagacttgtgaaagacagcaacaccaagaaggccggcaagacaggccccatgaaaaccctgctggttagagtgatgacacccgatctgagagagcggctggaaaacctgagaaagaagcctgaaaatatcccccagcccatcagcaatacatctagagccaacctgaataagctgctgaccgattacaccgaaatgaagaaggcgatcctgcatgtgtactgggaagagttccagaaggaccctgtgggcctgatgagccgggtggcccagcctgccagcaagaagatcgatcagaacaagctgaaacctgagatggacgagaagggcaacctgaccaccgccggctttgcctgctctcagtgtggccagcccctgttcgtgtacaagctggagcaggtgtctgagaagggcaaggcttacaccaactacttcggacggtgcaatgtggccgagcacgaaaagctgatcctgctggcccagctgaagcccgagaaggatagcgacgaagccgtgacatatagcctgggaaagtttgggcagagggccctggatttctacagcattcatgtgaccaaggagtccacccaccccgtgaagcccctggcccagatcgccggaaacagatacgcctccggacctgtgggaaaggccctgagcgacgcatgtatgggcacaatcgcctccttcctgtctaagtaccaggacatcatcatcgaacaccagaaggtggtgaagggcaaccagaagagactggagagcctgcgggagctggccggcaaggaaaacctggaataccctagcgtgaccctgccacctcagcctcacaccaaggagggcgttgatgcctacaacgaagtgatcgcccgggtgcgaatgtgggtgaacctgaacctgtggcagaagctgaagctaagcagagatgatgccaagcctctgctgagactgaagggattcccttcctttcctctggtcgagagacaggccaacgaagtggactggtgggacatggtgtgtaacgtgaagaagctgatcaacgagaaaaaggaggatggcaaggtgttttggcagaatctggctggctacaagagacaggaagccctgagaccatacctgagcagcgaggaagatcggaagaagggaaagaaattcgctcggtaccagctgggcgacctgctgctgcacctggaaaagaagcacggcgaggactggggaaaggtgtacgacgaggcctgggagcggattgacaagaaagtggaaggcctgagcaagcacatcaagctggaagaggaacggagaagcgaggacgcccagagcaaggccgccctgaccgactggctgcgggctaaggccagcttcgtgatcgagggcctgaaggaggccgacaaggacgagttctgcagatgcgagctgaagctgcagaagtggtacggggacctgcggggaaagcccttcgccatcgaagccgagaacagcatcctggacatcagcggcttcagcaagcagtacaactgtgccttcatctggcagaaggacggcgtgaagaagctgaacctgtacctgatcatcaactacttcaagggcggcaagctgcggttcaagaagatcaaacctgaagccttcgaagccaacagattctacaccgtgatcaacaaaaagagcggcgagatcgtgcccatggaggtgaacttcaacttcgacgaccccaacctgatcatcctgcctctggcctttggcaagagacagggcagagaattcatctggaacgacctgctgtccctggaaaccggcagcctgaagctggccaacggaagagtgatcgagaagacactgtacaacagaagaacccggcaggatgagcctgccctgttcgtggccctgaccttcgagcggcgggaggtcctggactcctccaatatcaaaccaatgaacctgatcggcgtggcaagaggcgaaaacatccccgccgtgatcgccctgaccgaccccgagggctgcccactgagccggtttaaggatagcctgggaaacccaacccacatcctgagaatcggcgagagctataaggagaagcagcggaccatccaggccaagaaggaggtggagcagcggagagccggcggctacagccggaagtacgccagcaaagccaagaatctggcagacgatatggtgagaaacaccgctagagatctgctgtactacgccgtgacccaggatgccatgctgatcttcgccaacctgagccggggcttcggccggcagggcaagcggaccttcatggccgagagacagtacacacggatggaggactggctgaccgccaagctggcctacgagggcctgagcaagacctacctgtccaagacactggcccagtacacctccaagacatgcagcaactgtgggtttaccatcaccagcgccgactacgacagggtgctggagaagctgaagaagacagcaacaggctggatgaccacaattaacggcaaggagctgaaggtggagggccagattacctactacaacagatacaagagacagaacgtagtcaaggacctgtccgtcgagctggatagactgagcgaagaatctgtgaacaacgacatctcctcctggacaaagggcagaagcggagaagctctgagcctcctgaagaaaagattctcccatagacccgtgcaggagaagttcgtgtgcctgaactgcggcttcgagacacacgcagccgagcaagccgccctgaacatcgccagatcctggctgttcctgcggagccaggagtacaagaaataccagacaaacaagacaaccggcaacaccgataagagagccttcgtcgagacctggcagtccttttaccggaagaagcttaaggaggtgtggaaacctgccgtgcggtctggcggatctggcggaggctccatgcaggagagcgtgaccttcaaggacgtggccgtggacttcacccaggaggagtggaagcagctggaccccgcccagagggacctgtacagggacgtgatgctggagaactacaggaacctggtgagcctgggcctgcccgtgttcaagcccgacgtgatcagccagctggagaagggcgaggccccctggacccccgaggtgcccaggagcacctgcagcggcagcttcagccaggaggccggcggcccaagcagcggcgcccctcctcccagcggcggcagcccagccggctccccaacctctaccgaggagggcacctctgagtccgccacccccgagagcggccctggcacctccaccgagcccagcgagggcagcgcacccggcagccctgccggcagccccacctccacagaggagggaaccagcaccgagcccagcgaaggcagcgccccaggcaccagcaccgagcctagtgagcaggagattaaacggatcaacaagatcagaagaagacttgtgaaagacagcaacaccaagaaggccggcaagacaggccccatgaaaaccctgctggttagagtgatgacacccgatctgagagagcggctggaaaacctgagaaagaagcctgaaaatatcccccagcccatcagcaatacatctagagccaacctgaataagctgctgaccgattacaccgaaatgaagaaggcgatcctgcatgtgtactgggaagagttccagaaggaccctgtgggcctgatgagccgggtggcccagcctgccagcaagaagatcgatcagaacaagctgaaacctgagatggacgagaagggcaacctgaccaccgccggctttgcctgctctcagtgtggccagcccctgttcgtgtacaagctggagcaggtgtctgagaagggcaaggcttacaccaactacttcggacggtgcaatgtggccgagcacgaaaagctgatcctgctggcccagctgaagcccgagaaggatagcgacgaagccgtgacatatagcctgggaaagtttgggcagagggccctggatttctacagcattcatgtgaccaaggagtccacccaccccgtgaagcccctggcccagatcgccggaaacagatacgcctccggacctgtgggaaaggccctgagcgacgcatgtatgggcacaatcgcctccttcctgtctaagtaccaggacatcatcatcgaacaccagaaggtggtgaagggcaaccagaagagactggagagcctgcgggagctggccggcaaggaaaacctggaataccctagcgtgaccctgccacctcagcctcacaccaaggagggcgttgatgcctacaacgaagtgatcgcccgggtgcgaatgtgggtgaacctgaacctgtggcagaagctgaagctaagcagagatgatgccaagcctctgctgagactgaagggattcccttcctttcctctggtcgagagacaggccaacgaagtggactggtgggacatggtgtgtaacgtgaagaagctgatcaacgagaaaaaggaggatggcaaggtgttttggcagaatctggctggctacaagagacaggaagccctgagaccatacctgagcagcgaggaagatcggaagaagggaaagaaattcgctcggtaccagctgggcgacctgctgctgcacctggaaaagaagcacggcgaggactggggaaaggtgtacgacgaggcctgggagcggattgacaagaaagtggaaggcctgagcaagcacatcaagctggaagaggaacggagaagcgaggacgcccagagcaaggccgccctgaccgactggctgcgggctaaggccagcttcgtgatcgagggcctgaaggaggccgacaaggacgagttctgcagatgcgagctgaagctgcagaagtggtacggggacctgcggggaaagcccttcgccatcgaagccgagaacagcatcctggacatcagcggcttcagcaagcagtacaactgtgccttcatctggcagaaggacggcgtgaagaagctgaacctgtacctgatcatcaactacttcaagggcggcaagctgcggttcaagaagatcaaacctgaagccttcgaagccaacagattctacaccgtgatcaacaaaaagagcggcgagatcgtgcccatggaggtgaacttcaacttcgacgaccccaacctgatcatcctgcctctggcctttggcaagagacagggcagagaattcatctggaacgacctgctgtccctggaaaccggcagcctgaagctggccaacggaagagtgatcgagaagacactgtacaacagaagaacccggcaggatgagcctgccctgttcgtggccctgaccttcgagcggcgggaggtcctggactcctccaatatcaaaccaatgaacctgatcggcgtggcaagaggcgaaaacatccccgccgtgatcgccctgaccgaccccgagggctgcccactgagccggtttaaggatagcctgggaaacccaacccacatcctgagaatcggcgagagctataaggagaagcagcggaccatccaggccaagaaggaggtggagcagcggagagccggcggctacagccggaagtacgccagcaaagccaagaatctggcagacgatatggtgagaaacaccgctagagatctgctgtactacgccgtgacccaggatgccatgctgatcttcgccaacctgagccggggcttcggccggcagggcaagcggaccttcatggccgagagacagtacacacggatggaggactggctgaccgccaagctggcctacgagggcctgagcaagacctacctgtccaagacactggcccagtacacctccaagacatgcagcaactgtgggtttaccatcaccagcgccgactacgacagggtgctggagaagctgaagaagacagcaacaggctggatgaccacaattaacggcaaggagctgaaggtggagggccagattacctactacaacagatacaagagacagaacgtagtcaaggacctgtccgtcgagctggatagactgagcgaagaatctgtgaacaacgacatctcctcctggacaaagggcagaagcggagaagctctgagcctcctgaagaaaagattctcccatagacccgtgcaggagaagttcgtgtgcctgaactgcggcttcgagacacacgcagccgagcaagccgccctgaacatcgccagatcctggctgttcctgcggagccaggagtacaagaaataccagacaaacaagacaaccggcaacaccgataagagagccttcgtcgagacctggcagtccttttaccggaagaagcttaaggaggtgtggaaacctgccgtgcggtctggcggatctggcggaggctcctatgcaggagagcgtgaccttcaaggacgtggccgtggacttcacccaggaggagtggaagcagctggaccccgcccagagggacctgtacagggacgtgatgctggagaactacaggaacctggtgagcctgggcctgcccgtgttcaagcccgacgtgatcagccagctggagaagggcgaggccccctggacccccgaggtgcccaggagcacctgcagcggcagcttcagccaggaggccggatctggctccggcagcggccccaagaaaaagagaaaagtctaagctgccttctgcggggcttgccttctggccatgcccttcttctctcccttgcacctgtacctcttggtctttgaataaagcctgagtaggaaggctagcaaaaaaaaaaaaaaaaaaaaaaaaaaaaaaaaaaaaaaaaaaaaaaaaaaaaaaaaaaaaaaaaaaaaaaaaaaaaaaaa

SEQ ID NO: 16808 - RNA, 9485 nt, synthetic construct
  source 1..9485: mol_type = other RNA
aggaaataagagagaaaagaagagtaagaagaaatataagagccaccatggcccctaagaagaagcgtaaagtgagccggatggaacgcctcgtctacgaggtgcggcagaagtgcagaaacatcgaggacatctgcatctcctgcggatctctgaacgtgaccctggagcacccactgttcatcggcggcatgtgccagaactgtaaaaactgttttctggagtgtgcctatcaatacgacgatgacggctaccagagctactgcaccatctgttgcggcggaagagaggtgctgatgtgtggaaataacaactgctgccggtgcttctgcgtggaatgcgtggacctgctggtgggccccggcgccgcccaggccgctattaaggaagatccttggaactgctacatgtgcggccacaagggcacatacggcctgctgagacggagagaggactggcctagcagactgcagatgttcttcgccaataaccacgaccaggagttcgacccccctaaggtgtaccctcccgtccccgccgagaagagaaagcccatccgggtcctgagcctgttcgatggcatcgccaccggtctgctggtgctgaaggacctgggcatccaggtggataggtacattgcctccgaggtgtgcgaggactccatcaccgtgggaatggtgcgtcatcagggcaagatcatgtacgtgggcgacgtgcggagcgtgacacagaagcatatccaggagtggggccctttcgacctggtgatcggcggcagcccttgcaatgacctgagcatcgtgaacccagcccggaagggcctgtacgagggaaccggcagactgttcttcgagttttacagactgctgcacgacgcccggcctaaggaaggcgacgaccggcccttcttttggctgttcgagaatgtggtggccatgggagtcagcgacaagcgggatattagccggttcctggagagcaaccccgtgatgatcgatgccaaggaagtgagcgccgcccaccgggccagatacttctggggcaatctgcctggcatgaacagacccctggccagcaccgtgaacgacaagctggagctgcaggagtgcctggagcacggccggatcgccaagttcagcaaggtgagaaccatcaccacccgaagcaacagcatcaaacaaggcaaggaccagcactttcctgtgttcatgaacgagaaggaggacatcctgtggtgtaccgagatggagagagtgttcgggttcccagtccactacacagatgtcagcaacatgtctagactggccagacagagactgctgggaagaagctggtccgtccctgtgatcagacacctgttcgcccctctgaaggagtacttcgcctgcgtgagcagcggcaacagcaacgccaacagccggggccccagcttctctagcggcctggtgccactgtccctgagagggagccacatgggccccatggagatctacaaaaccgtgagcgcctggaagcggcagcctgtgcgcgtgctgagcctgtttcggaatatcgataaagtcctgaaaagcctgggattcctggagagcggctctggctccggcggtggcaccctgaagtacgtggaggatgtgacaaacgtggtcagacgggatgtggagaagtggggccccttcgatctggtgtacggcagcacccaacccctgggcagctcttgtgaccggtgccctggctggtacatgtttcagttccaccggatcctgcagtacgccctgccgagacaggagtcccagcggccattcttttggattttcatggacaacttgctgctgaccgaggatgaccaggaaactaccactcggttcctgcagaccgaagccgtgaccctgcaggacgtgagaggccgggactaccagaacgccatgcgggtgtggtccaacatccctggactgaaaagcaagcacgcacctctgacccctaaagaagaggagtacctgcaggcccaggtgcggagcagaagcaagctggacgcccctaaggtggatctgctggtgaagaattgcctcctgcccctgagagagtacttcaagtatttcagccagaatagtctgcccctgggaggcagcggcggcggcgccctggtgacatttgaggacgtcgccgtgcggttcacccaggaggaatgggctctgctggatccttctcagaaaatcctgtaccgggacgtgatgagagagacataccggaatctgacctccgtgggcatcaactgggaatgttgggaccttgaagcctgcttcagaagcctgggaagaaacctgagagtgcaggtggtgaagagaaagtgcgagctgaccaacagcggcccctgcgccgagggcggcccaagcagcggcgcccctcctcccagcggcggcagcccagccggctccccaacctctaccgaggagggcacctctgagtccgccacccccgagagcggccctggcacctccaccgagcccagcgagggcagcgcacccggcagccctgccggcagccccacctccacagaggagggaaccagcaccgagcccagcgaaggcagcgccccaggcaccagcaccgagcctagtgagcaggagattaaacggatcaacaagatcagaagaagacttgtgaaagacagcaacaccaagaaggccggcaagacaggccccatgaaaaccctgctggttagagtgatgacacccgatctgagagagcggctggaaaacctgagaaagaagcctgaaaatatcccccagcccatcagcaatacatctagagccaacctgaataagctgctgaccgattacaccgaaatgaagaaggcgatcctgcatgtgtactgggaagagttccagaaggaccctgtgggcctgatgagccgggtggcccagcctgccagcaagaagatcgatcagaacaagctgaaacctgagatggacgagaagggcaacctgaccaccgccggctttgcctgctctcagtgtggccagcccctgttcgtgtacaagctggagcaggtgtctgagaagggcaaggcttacaccaactacttcggacggtgcaatgtggccgagcacgaaaagctgatcctgctggcccagctgaagcccgagaaggatagcgacgaagccgtgacatatagcctgggaaagtttgggcagagggccctggatttctacagcattcatgtgaccaaggagtccacccaccccgtgaagcccctggcccagatcgccggaaacagatacgcctccggacctgtgggaaaggccctgagcgacgcatgtatgggcacaatcgcctccttcctgtctaagtaccaggacatcatcatcgaacaccagaaggtggtgaagggcaaccagaagagactggagagcctgcgggagctggccggcaaggaaaacctggaataccctagcgtgaccctgccacctcagcctcacaccaaggagggcgttgatgcctacaacgaagtgatcgcccgggtgcgaatgtgggtgaacctgaacctgtggcagaagctgaagctaagcagagatgatgccaagcctctgctgagactgaagggattcccttcctttcctctggtcgagagacaggccaacgaagtggactggtgggacatggtgtgtaacgtgaagaagctgatcaacgagaaaaaggaggatggcaaggtgttttggcagaatctggctggctacaagagacaggaagccctgagaccatacctgagcagcgaggaagatcggaagaagggaaagaaattcgctcggtaccagctgggcgacctgctgctgcacctggaaaagaagcacggcgaggactggggaaaggtgtacgacgaggcctgggagcggattgacaagaaagtggaaggcctgagcaagcacatcaagctggaagaggaacggagaagcgaggacgcccagagcaaggccgccctgaccgactggctgcgggctaaggccagcttcgtgatcgagggcctgaaggaggccgacaaggacgagttctgcagatgcgagctgaagctgcagaagtggtacggggacctgcggggaaagcccttcgccatcgaagccgagaacagcatcctggacatcagcggcttcagcaagcagtacaactgtgccttcatctggcagaaggacggcgtgaagaagctgaacctgtacctgatcatcaactacttcaagggcggcaagctgcggttcaagaagatcaaacctgaagccttcgaagccaacagattctacaccgtgatcaacaaaaagagcggcgagatcgtgcccatggaggtgaacttcaacttcgacgaccccaacctgatcatcctgcctctggcctttggcaagagacagggcagagaattcatctggaacgacctgctgtccctggaaaccggcagcctgaagctggccaacggaagagtgatcgagaagacactgtacaacagaagaacccggcaggatgagcctgccctgttcgtggccctgaccttcgagcggcgggaggtcctggactcctccaatatcaaaccaatgaacctgatcggcgtggcaagaggcgaaaacatccccgccgtgatcgccctgaccgaccccgagggctgcccactgagccggtttaaggatagcctgggaaacccaacccacatcctgagaatcggcgagagctataaggagaagcagcggaccatccaggccaagaaggaggtggagcagcggagagccggcggctacagccggaagtacgccagcaaagccaagaatctggcagacgatatggtgagaaacaccgctagagatctgctgtactacgccgtgacccaggatgccatgctgatcttcgccaacctgagccggggcttcggccggcagggcaagcggaccttcatggccgagagacagtacacacggatggaggactggctgaccgccaagctggcctacgagggcctgagcaagacctacctgtccaagacactggcccagtacacctccaagacatgcagcaactgtgggtttaccatcaccagcgccgactacgacagggtgctggagaagctgaagaagacagcaacaggctggatgaccacaattaacggcaaggagctgaaggtggagggccagattacctactacaacagatacaagagacagaacgtagtcaaggacctgtccgtcgagctggatagactgagcgaagaatctgtgaacaacgacatctcctcctggacaaagggcagaagcggagaagctctgagcctcctgaagaaaagattctcccatagacccgtgcaggagaagttcgtgtgcctgaactgcggcttcgagacacacgcagccgagcaagccgccctgaacatcgccagatcctggctgttcctgcggagccaggagtacaagaaataccagacaaacaagacaaccggcaacaccgataagagagccttcgtcgagacctggcagtccttttaccggaagaagcttaaggaggtgtggaaacctgccgtgcggtctggcggatctggcggaggctccgaccagctgcaggaggccttcgaggacgtggccctgtacttcacccagaacgagtgggagctgctgggcgacggcgacaaggtgctgtacagggaccagatgctgaggaactaccaggccctggtgagcctgggctaccagggccccgcccccgacctgatcagcaggatccagaggcaggaggtggagctgtgggtgtgcgaggaggagaaccccggcgagagcgtgtggaccgagggcctgggcggcccaagcagcggcgcccctcctcccagcggcggcagcccagccggctccccaacctctaccgaggagggcacctctgagtccgccacccccgagagcggccctggcacctccaccgagcccagcgagggcagcgcacccggcagccctgccggcagccccacctccacagaggagggaaccagcaccgagcccagcgaaggcagcgccccaggcaccagcaccgagcctagtgagcaggagattaaacggatcaacaagatcagaagaagacttgtgaaagacagcaacaccaagaaggccggcaagacaggccccatgaaaaccctgctggttagagtgatgacacccgatctgagagagcggctggaaaacctgagaaagaagcctgaaaatatcccccagcccatcagcaatacatctagagccaacctgaataagctgctgaccgattacaccgaaatgaagaaggcgatcctgcatgtgtactgggaagagttccagaaggaccctgtgggcctgatgagccgggtggcccagcctgccagcaagaagatcgatcagaacaagctgaaacctgagatggacgagaagggcaacctgaccaccgccggctttgcctgctctcagtgtggccagcccctgttcgtgtacaagctggagcaggtgtctgagaagggcaaggcttacaccaactacttcggacggtgcaatgtggccgagcacgaaaagctgatcctgctggcccagctgaagcccgagaaggatagcgacgaagccgtgacatatagcctgggaaagtttgggcagagggccctggatttctacagcattcatgtgaccaaggagtccacccaccccgtgaagcccctggcccagatcgccggaaacagatacgcctccggacctgtgggaaaggccctgagcgacgcatgtatgggcacaatcgcctccttcctgtctaagtaccaggacatcatcatcgaacaccagaaggtggtgaagggcaaccagaagagactggagagcctgcgggagctggccggcaaggaaaacctggaataccctagcgtgaccctgccacctcagcctcacaccaaggagggcgttgatgcctacaacgaagtgatcgcccgggtgcgaatgtgggtgaacctgaacctgtggcagaagctgaagctaagcagagatgatgccaagcctctgctgagactgaagggattcccttcctttcctctggtcgagagacaggccaacgaagtggactggtgggacatggtgtgtaacgtgaagaagctgatcaacgagaaaaaggaggatggcaaggtgttttggcagaatctggctggctacaagagacaggaagccctgagaccatacctgagcagcgaggaagatcggaagaagggaaagaaattcgctcggtaccagctgggcgacctgctgctgcacctggaaaagaagcacggcgaggactggggaaaggtgtacgacgaggcctgggagcggattgacaagaaagtggaaggcctgagcaagcacatcaagctggaagaggaacggagaagcgaggacgcccagagcaaggccgccctgaccgactggctgcgggctaaggccagcttcgtgatcgagggcctgaaggaggccgacaaggacgagttctgcagatgcgagctgaagctgcagaagtggtacggggacctgcggggaaagcccttcgccatcgaagccgagaacagcatcctggacatcagcggcttcagcaagcagtacaactgtgccttcatctggcagaaggacggcgtgaagaagctgaacctgtacctgatcatcaactacttcaagggcggcaagctgcggttcaagaagatcaaacctgaagccttcgaagccaacagattctacaccgtgatcaacaaaaagagcggcgagatcgtgcccatggaggtgaacttcaacttcgacgaccccaacctgatcatcctgcctctggcctttggcaagagacagggcagagaattcatctggaacgacctgctgtccctggaaaccggcagcctgaagctggccaacggaagagtgatcgagaagacactgtacaacagaagaacccggcaggatgagcctgccctgttcgtggccctgaccttcgagcggcgggaggtcctggactcctccaatatcaaaccaatgaacctgatcggcgtggcaagaggcgaaaacatccccgccgtgatcgccctgaccgaccccgagggctgcccactgagccggtttaaggatagcctgggaaacccaacccacatcctgagaatcggcgagagctataaggagaagcagcggaccatccaggccaagaaggaggtggagcagcggagagccggcggctacagccggaagtacgccagcaaagccaagaatctggcagacgatatggtgagaaacaccgctagagatctgctgtactacgccgtgacccaggatgccatgctgatcttcgccaacctgagccggggcttcggccggcagggcaagcggaccttcatggccgagagacagtacacacggatggaggactggctgaccgccaagctggcctacgagggcctgagcaagacctacctgtccaagacactggcccagtacacctccaagacatgcagcaactgtgggtttaccatcaccagcgccgactacgacagggtgctggagaagctgaagaagacagcaacaggctggatgaccacaattaacggcaaggagctgaaggtggagggccagattacctactacaacagatacaagagacagaacgtagtcaaggacctgtccgtcgagctggatagactgagcgaagaatctgtgaacaacgacatctcctcctggacaaagggcagaagcggagaagctctgagcctcctgaagaaaagattctcccatagacccgtgcaggagaagttcgtgtgcctgaactgcggcttcgagacacacgcagccgagcaagccgccctgaacatcgccagatcctggctgttcctgcggagccaggagtacaagaaataccagacaaacaagacaaccggcaacaccgataagagagccttcgtcgagacctggcagtccttttaccggaagaagcttaaggaggtgtggaaacctgccgtgcggtctggcggatctggcggaggctcctgaccagctgcaggaggccttcgaggacgtggccctgtacttcacccagaacgagtgggagctgctgggcgacggcgacaaggtgctgtacagggaccagatgctgaggaactaccaggccctggtgagcctgggctaccagggccccgcccccgacctgatcagcaggatccagaggcaggaggtggagctgtgggtgtgcgaggaggagaaccccggcgagagcgtgtggaccgagggcctgggatctggctccggcagcggccccaagaaaaagagaaaagtctaagctgccttctgcggggcttgccttctggccatgcccttcttctctcccttgcacctgtacctcttggtctttgaataaagcctgagtaggaaggctagcaaaaaaaaaaaaaaaaaaaaaaaaaaaaaaaaaaaaaaaaaaaaaaaaaaaaaaaaaaaaaaaaaaaaaaaaaaaaaaaa

SEQ ID NO: 16809 - RNA, 9485 nt, synthetic construct
  source 1..9485: mol_type = other RNA
aggaaataagagagaaaagaagagtaagaagaaatataagagccaccatggcccctaagaagaagcgtaaagtgagccggatggaacgcctcgtctacgaggtgcggcagaagtgcagaaacatcgaggacatctgcatctcctgcggatctctgaacgtgaccctggagcacccactgttcatcggcggcatgtgccagaactgtaaaaactgttttctggagtgtgcctatcaatacgacgatgacggctaccagagctactgcaccatctgttgcggcggaagagaggtgctgatgtgtggaaataacaactgctgccggtgcttctgcgtggaatgcgtggacctgctggtgggccccggcgccgcccaggccgctattaaggaagatccttggaactgctacatgtgcggccacaagggcacatacggcctgctgagacggagagaggactggcctagcagactgcagatgttcttcgccaataaccacgaccaggagttcgacccccctaaggtgtaccctcccgtccccgccgagaagagaaagcccatccgggtcctgagcctgttcgatggcatcgccaccggtctgctggtgctgaaggacctgggcatccaggtggataggtacattgcctccgaggtgtgcgaggactccatcaccgtgggaatggtgcgtcatcagggcaagatcatgtacgtgggcgacgtgcggagcgtgacacagaagcatatccaggagtggggccctttcgacctggtgatcggcggcagcccttgcaatgacctgagcatcgtgaacccagcccggaagggcctgtacgagggaaccggcagactgttcttcgagttttacagactgctgcacgacgcccggcctaaggaaggcgacgaccggcccttcttttggctgttcgagaatgtggtggccatgggagtcagcgacaagcgggatattagccggttcctggagagcaaccccgtgatgatcgatgccaaggaagtgagcgccgcccaccgggccagatacttctggggcaatctgcctggcatgaacagacccctggccagcaccgtgaacgacaagctggagctgcaggagtgcctggagcacggccggatcgccaagttcagcaaggtgagaaccatcaccacccgaagcaacagcatcaaacaaggcaaggaccagcactttcctgtgttcatgaacgagaaggaggacatcctgtggtgtaccgagatggagagagtgttcgggttcccagtccactacacagatgtcagcaacatgtctagactggccagacagagactgctgggaagaagctggtccgtccctgtgatcagacacctgttcgcccctctgaaggagtacttcgcctgcgtgagcagcggcaacagcaacgccaacagccggggccccagcttctctagcggcctggtgccactgtccctgagagggagccacatgggccccatggagatctacaaaaccgtgagcgcctggaagcggcagcctgtgcgcgtgctgagcctgtttcggaatatcgataaagtcctgaaaagcctgggattcctggagagcggctctggctccggcggtggcaccctgaagtacgtggaggatgtgacaaacgtggtcagacgggatgtggagaagtggggccccttcgatctggtgtacggcagcacccaacccctgggcagctcttgtgaccggtgccctggctggtacatgtttcagttccaccggatcctgcagtacgccctgccgagacaggagtcccagcggccattcttttggattttcatggacaacttgctgctgaccgaggatgaccaggaaactaccactcggttcctgcagaccgaagccgtgaccctgcaggacgtgagaggccgggactaccagaacgccatgcgggtgtggtccaacatccctggactgaaaagcaagcacgcacctctgacccctaaagaagaggagtacctgcaggcccaggtgcggagcagaagcaagctggacgcccctaaggtggatctgctggtgaagaattgcctcctgcccctgagagagtacttcaagtatttcagccagaatagtctgcccctgggaggcagcggcggcggcgccctggtgacatttgaggacgtcgccgtgcggttcacccaggaggaatgggctctgctggatccttctcagaaaatcctgtaccgggacgtgatgagagagacataccggaatctgacctccgtgggcatcaactgggaatgttgggaccttgaagcctgcttcagaagcctgggaagaaacctgagagtgcaggtggtgaagagaaagtgcgagctgaccaacagcggcccctgcgccgagggcggcccaagcagcggcgcccctcctcccagcggcggcagcccagccggctccccaacctctaccgaggagggcacctctgagtccgccacccccgagagcggccctggcacctccaccgagcccagcgagggcagcgcacccggcagccctgccggcagccccacctccacagaggagggaaccagcaccgagcccagcgaaggcagcgccccaggcaccagcaccgagcctagtgagcaggagattaaacggatcaacaagatcagaagaagacttgtgaaagacagcaacaccaagaaggccggcaagacaggccccatgaaaaccctgctggttagagtgatgacacccgatctgagagagcggctggaaaacctgagaaagaagcctgaaaatatcccccagcccatcagcaatacatctagagccaacctgaataagctgctgaccgattacaccgaaatgaagaaggcgatcctgcatgtgtactgggaagagttccagaaggaccctgtgggcctgatgagccgggtggcccagcctgccagcaagaagatcgatcagaacaagctgaaacctgagatggacgagaagggcaacctgaccaccgccggctttgcctgctctcagtgtggccagcccctgttcgtgtacaagctggagcaggtgtctgagaagggcaaggcttacaccaactacttcggacggtgcaatgtggccgagcacgaaaagctgatcctgctggcccagctgaagcccgagaaggatagcgacgaagccgtgacatatagcctgggaaagtttgggcagagggccctggatttctacagcattcatgtgaccaaggagtccacccaccccgtgaagcccctggcccagatcgccggaaacagatacgcctccggacctgtgggaaaggccctgagcgacgcatgtatgggcacaatcgcctccttcctgtctaagtaccaggacatcatcatcgaacaccagaaggtggtgaagggcaaccagaagagactggagagcctgcgggagctggccggcaaggaaaacctggaataccctagcgtgaccctgccacctcagcctcacaccaaggagggcgttgatgcctacaacgaagtgatcgcccgggtgcgaatgtgggtgaacctgaacctgtggcagaagctgaagctaagcagagatgatgccaagcctctgctgagactgaagggattcccttcctttcctctggtcgagagacaggccaacgaagtggactggtgggacatggtgtgtaacgtgaagaagctgatcaacgagaaaaaggaggatggcaaggtgttttggcagaatctggctggctacaagagacaggaagccctgagaccatacctgagcagcgaggaagatcggaagaagggaaagaaattcgctcggtaccagctgggcgacctgctgctgcacctggaaaagaagcacggcgaggactggggaaaggtgtacgacgaggcctgggagcggattgacaagaaagtggaaggcctgagcaagcacatcaagctggaagaggaacggagaagcgaggacgcccagagcaaggccgccctgaccgactggctgcgggctaaggccagcttcgtgatcgagggcctgaaggaggccgacaaggacgagttctgcagatgcgagctgaagctgcagaagtggtacggggacctgcggggaaagcccttcgccatcgaagccgagaacagcatcctggacatcagcggcttcagcaagcagtacaactgtgccttcatctggcagaaggacggcgtgaagaagctgaacctgtacctgatcatcaactacttcaagggcggcaagctgcggttcaagaagatcaaacctgaagccttcgaagccaacagattctacaccgtgatcaacaaaaagagcggcgagatcgtgcccatggaggtgaacttcaacttcgacgaccccaacctgatcatcctgcctctggcctttggcaagagacagggcagagaattcatctggaacgacctgctgtccctggaaaccggcagcctgaagctggccaacggaagagtgatcgagaagacactgtacaacagaagaacccggcaggatgagcctgccctgttcgtggccctgaccttcgagcggcgggaggtcctggactcctccaatatcaaaccaatgaacctgatcggcgtggcaagaggcgaaaacatccccgccgtgatcgccctgaccgaccccgagggctgcccactgagccggtttaaggatagcctgggaaacccaacccacatcctgagaatcggcgagagctataaggagaagcagcggaccatccaggccaagaaggaggtggagcagcggagagccggcggctacagccggaagtacgccagcaaagccaagaatctggcagacgatatggtgagaaacaccgctagagatctgctgtactacgccgtgacccaggatgccatgctgatcttcgccaacctgagccggggcttcggccggcagggcaagcggaccttcatggccgagagacagtacacacggatggaggactggctgaccgccaagctggcctacgagggcctgagcaagacctacctgtccaagacactggcccagtacacctccaagacatgcagcaactgtgggtttaccatcaccagcgccgactacgacagggtgctggagaagctgaagaagacagcaacaggctggatgaccacaattaacggcaaggagctgaaggtggagggccagattacctactacaacagatacaagagacagaacgtagtcaaggacctgtccgtcgagctggatagactgagcgaagaatctgtgaacaacgacatctcctcctggacaaagggcagaagcggagaagctctgagcctcctgaagaaaagattctcccatagacccgtgcaggagaagttcgtgtgcctgaactgcggcttcgagacacacgcagccgagcaagccgccctgaacatcgccagatcctggctgttcctgcggagccaggagtacaagaaataccagacaaacaagacaaccggcaacaccgataagagagccttcgtcgagacctggcagtccttttaccggaagaagcttaaggaggtgtggaaacctgccgtgcggtctggcggatctggcggaggctccgtgagggagcccctgaccttcgaggacgtggccgtgaacttcacccaggaggagtggcagcagctggaccccgcccagaagaccctgcacagggacgtgatgctggagatctacagccacctggtgagcgtgggctgcagcggcatcaagcccgacatcatcagcaagctggagcacggcgaggacccctggatcagggagagcgagctgcccaggtggacctacagcgacagggagaagagcggcggcccaagcagcggcgcccctcctcccagcggcggcagcccagccggctccccaacctctaccgaggagggcacctctgagtccgccacccccgagagcggccctggcacctccaccgagcccagcgagggcagcgcacccggcagccctgccggcagccccacctccacagaggagggaaccagcaccgagcccagcgaaggcagcgccccaggcaccagcaccgagcctagtgagcaggagattaaacggatcaacaagatcagaagaagacttgtgaaagacagcaacaccaagaaggccggcaagacaggccccatgaaaaccctgctggttagagtgatgacacccgatctgagagagcggctggaaaacctgagaaagaagcctgaaaatatcccccagcccatcagcaatacatctagagccaacctgaataagctgctgaccgattacaccgaaatgaagaaggcgatcctgcatgtgtactgggaagagttccagaaggaccctgtgggcctgatgagccgggtggcccagcctgccagcaagaagatcgatcagaacaagctgaaacctgagatggacgagaagggcaacctgaccaccgccggctttgcctgctctcagtgtggccagcccctgttcgtgtacaagctggagcaggtgtctgagaagggcaaggcttacaccaactacttcggacggtgcaatgtggccgagcacgaaaagctgatcctgctggcccagctgaagcccgagaaggatagcgacgaagccgtgacatatagcctgggaaagtttgggcagagggccctggatttctacagcattcatgtgaccaaggagtccacccaccccgtgaagcccctggcccagatcgccggaaacagatacgcctccggacctgtgggaaaggccctgagcgacgcatgtatgggcacaatcgcctccttcctgtctaagtaccaggacatcatcatcgaacaccagaaggtggtgaagggcaaccagaagagactggagagcctgcgggagctggccggcaaggaaaacctggaataccctagcgtgaccctgccacctcagcctcacaccaaggagggcgttgatgcctacaacgaagtgatcgcccgggtgcgaatgtgggtgaacctgaacctgtggcagaagctgaagctaagcagagatgatgccaagcctctgctgagactgaagggattcccttcctttcctctggtcgagagacaggccaacgaagtggactggtgggacatggtgtgtaacgtgaagaagctgatcaacgagaaaaaggaggatggcaaggtgttttggcagaatctggctggctacaagagacaggaagccctgagaccatacctgagcagcgaggaagatcggaagaagggaaagaaattcgctcggtaccagctgggcgacctgctgctgcacctggaaaagaagcacggcgaggactggggaaaggtgtacgacgaggcctgggagcggattgacaagaaagtggaaggcctgagcaagcacatcaagctggaagaggaacggagaagcgaggacgcccagagcaaggccgccctgaccgactggctgcgggctaaggccagcttcgtgatcgagggcctgaaggaggccgacaaggacgagttctgcagatgcgagctgaagctgcagaagtggtacggggacctgcggggaaagcccttcgccatcgaagccgagaacagcatcctggacatcagcggcttcagcaagcagtacaactgtgccttcatctggcagaaggacggcgtgaagaagctgaacctgtacctgatcatcaactacttcaagggcggcaagctgcggttcaagaagatcaaacctgaagccttcgaagccaacagattctacaccgtgatcaacaaaaagagcggcgagatcgtgcccatggaggtgaacttcaacttcgacgaccccaacctgatcatcctgcctctggcctttggcaagagacagggcagagaattcatctggaacgacctgctgtccctggaaaccggcagcctgaagctggccaacggaagagtgatcgagaagacactgtacaacagaagaacccggcaggatgagcctgccctgttcgtggccctgaccttcgagcggcgggaggtcctggactcctccaatatcaaaccaatgaacctgatcggcgtggcaagaggcgaaaacatccccgccgtgatcgccctgaccgaccccgagggctgcccactgagccggtttaaggatagcctgggaaacccaacccacatcctgagaatcggcgagagctataaggagaagcagcggaccatccaggccaagaaggaggtggagcagcggagagccggcggctacagccggaagtacgccagcaaagccaagaatctggcagacgatatggtgagaaacaccgctagagatctgctgtactacgccgtgacccaggatgccatgctgatcttcgccaacctgagccggggcttcggccggcagggcaagcggaccttcatggccgagagacagtacacacggatggaggactggctgaccgccaagctggcctacgagggcctgagcaagacctacctgtccaagacactggcccagtacacctccaagacatgcagcaactgtgggtttaccatcaccagcgccgactacgacagggtgctggagaagctgaagaagacagcaacaggctggatgaccacaattaacggcaaggagctgaaggtggagggccagattacctactacaacagatacaagagacagaacgtagtcaaggacctgtccgtcgagctggatagactgagcgaagaatctgtgaacaacgacatctcctcctggacaaagggcagaagcggagaagctctgagcctcctgaagaaaagattctcccatagacccgtgcaggagaagttcgtgtgcctgaactgcggcttcgagacacacgcagccgagcaagccgccctgaacatcgccagatcctggctgttcctgcggagccaggagtacaagaaataccagacaaacaagacaaccggcaacaccgataagagagccttcgtcgagacctggcagtccttttaccggaagaagcttaaggaggtgtggaaacctgccgtgcggtctggcggatctggcggaggctcctgtgagggagcccctgaccttcgaggacgtggccgtgaacttcacccaggaggagtggcagcagctggaccccgcccagaagaccctgcacagggacgtgatgctggagatctacagccacctggtgagcgtgggctgcagcggcatcaagcccgacatcatcagcaagctggagcacggcgaggacccctggatcagggagagcgagctgcccaggtggacctacagcgacagggagaagagcggatctggctccggcagcggccccaagaaaaagagaaaagtctaagctgccttctgcggggcttgccttctggccatgcccttcttctctcccttgcacctgtacctcttggtctttgaataaagcctgagtaggaaggctagcaaaaaaaaaaaaaaaaaaaaaaaaaaaaaaaaaaaaaaaaaaaaaaaaaaaaaaaaaaaaaaaaaaaaaaaaaaaaaaaa

SEQ ID NO: 16810 - RNA, 9485 nt, synthetic construct
  source 1..9485: mol_type = other RNA
aggaaataagagagaaaagaagagtaagaagaaatataagagccaccatggcccctaagaagaagcgtaaagtgagccggatggaacgcctcgtctacgaggtgcggcagaagtgcagaaacatcgaggacatctgcatctcctgcggatctctgaacgtgaccctggagcacccactgttcatcggcggcatgtgccagaactgtaaaaactgttttctggagtgtgcctatcaatacgacgatgacggctaccagagctactgcaccatctgttgcggcggaagagaggtgctgatgtgtggaaataacaactgctgccggtgcttctgcgtggaatgcgtggacctgctggtgggccccggcgccgcccaggccgctattaaggaagatccttggaactgctacatgtgcggccacaagggcacatacggcctgctgagacggagagaggactggcctagcagactgcagatgttcttcgccaataaccacgaccaggagttcgacccccctaaggtgtaccctcccgtccccgccgagaagagaaagcccatccgggtcctgagcctgttcgatggcatcgccaccggtctgctggtgctgaaggacctgggcatccaggtggataggtacattgcctccgaggtgtgcgaggactccatcaccgtgggaatggtgcgtcatcagggcaagatcatgtacgtgggcgacgtgcggagcgtgacacagaagcatatccaggagtggggccctttcgacctggtgatcggcggcagcccttgcaatgacctgagcatcgtgaacccagcccggaagggcctgtacgagggaaccggcagactgttcttcgagttttacagactgctgcacgacgcccggcctaaggaaggcgacgaccggcccttcttttggctgttcgagaatgtggtggccatgggagtcagcgacaagcgggatattagccggttcctggagagcaaccccgtgatgatcgatgccaaggaagtgagcgccgcccaccgggccagatacttctggggcaatctgcctggcatgaacagacccctggccagcaccgtgaacgacaagctggagctgcaggagtgcctggagcacggccggatcgccaagttcagcaaggtgagaaccatcaccacccgaagcaacagcatcaaacaaggcaaggaccagcactttcctgtgttcatgaacgagaaggaggacatcctgtggtgtaccgagatggagagagtgttcgggttcccagtccactacacagatgtcagcaacatgtctagactggccagacagagactgctgggaagaagctggtccgtccctgtgatcagacacctgttcgcccctctgaaggagtacttcgcctgcgtgagcagcggcaacagcaacgccaacagccggggccccagcttctctagcggcctggtgccactgtccctgagagggagccacatgggccccatggagatctacaaaaccgtgagcgcctggaagcggcagcctgtgcgcgtgctgagcctgtttcggaatatcgataaagtcctgaaaagcctgggattcctggagagcggctctggctccggcggtggcaccctgaagtacgtggaggatgtgacaaacgtggtcagacgggatgtggagaagtggggccccttcgatctggtgtacggcagcacccaacccctgggcagctcttgtgaccggtgccctggctggtacatgtttcagttccaccggatcctgcagtacgccctgccgagacaggagtcccagcggccattcttttggattttcatggacaacttgctgctgaccgaggatgaccaggaaactaccactcggttcctgcagaccgaagccgtgaccctgcaggacgtgagaggccgggactaccagaacgccatgcgggtgtggtccaacatccctggactgaaaagcaagcacgcacctctgacccctaaagaagaggagtacctgcaggcccaggtgcggagcagaagcaagctggacgcccctaaggtggatctgctggtgaagaattgcctcctgcccctgagagagtacttcaagtatttcagccagaatagtctgcccctgggaggcagcggcggcggcgccctggtgacatttgaggacgtcgccgtgcggttcacccaggaggaatgggctctgctggatccttctcagaaaatcctgtaccgggacgtgatgagagagacataccggaatctgacctccgtgggcatcaactgggaatgttgggaccttgaagcctgcttcagaagcctgggaagaaacctgagagtgcaggtggtgaagagaaagtgcgagctgaccaacagcggcccctgcgccgagggcggcccaagcagcggcgcccctcctcccagcggcggcagcccagccggctccccaacctctaccgaggagggcacctctgagtccgccacccccgagagcggccctggcacctccaccgagcccagcgagggcagcgcacccggcagccctgccggcagccccacctccacagaggagggaaccagcaccgagcccagcgaaggcagcgccccaggcaccagcaccgagcctagtgagcaggagattaaacggatcaacaagatcagaagaagacttgtgaaagacagcaacaccaagaaggccggcaagacaggccccatgaaaaccctgctggttagagtgatgacacccgatctgagagagcggctggaaaacctgagaaagaagcctgaaaatatcccccagcccatcagcaatacatctagagccaacctgaataagctgctgaccgattacaccgaaatgaagaaggcgatcctgcatgtgtactgggaagagttccagaaggaccctgtgggcctgatgagccgggtggcccagcctgccagcaagaagatcgatcagaacaagctgaaacctgagatggacgagaagggcaacctgaccaccgccggctttgcctgctctcagtgtggccagcccctgttcgtgtacaagctggagcaggtgtctgagaagggcaaggcttacaccaactacttcggacggtgcaatgtggccgagcacgaaaagctgatcctgctggcccagctgaagcccgagaaggatagcgacgaagccgtgacatatagcctgggaaagtttgggcagagggccctggatttctacagcattcatgtgaccaaggagtccacccaccccgtgaagcccctggcccagatcgccggaaacagatacgcctccggacctgtgggaaaggccctgagcgacgcatgtatgggcacaatcgcctccttcctgtctaagtaccaggacatcatcatcgaacaccagaaggtggtgaagggcaaccagaagagactggagagcctgcgggagctggccggcaaggaaaacctggaataccctagcgtgaccctgccacctcagcctcacaccaaggagggcgttgatgcctacaacgaagtgatcgcccgggtgcgaatgtgggtgaacctgaacctgtggcagaagctgaagctaagcagagatgatgccaagcctctgctgagactgaagggattcccttcctttcctctggtcgagagacaggccaacgaagtggactggtgggacatggtgtgtaacgtgaagaagctgatcaacgagaaaaaggaggatggcaaggtgttttggcagaatctggctggctacaagagacaggaagccctgagaccatacctgagcagcgaggaagatcggaagaagggaaagaaattcgctcggtaccagctgggcgacctgctgctgcacctggaaaagaagcacggcgaggactggggaaaggtgtacgacgaggcctgggagcggattgacaagaaagtggaaggcctgagcaagcacatcaagctggaagaggaacggagaagcgaggacgcccagagcaaggccgccctgaccgactggctgcgggctaaggccagcttcgtgatcgagggcctgaaggaggccgacaaggacgagttctgcagatgcgagctgaagctgcagaagtggtacggggacctgcggggaaagcccttcgccatcgaagccgagaacagcatcctggacatcagcggcttcagcaagcagtacaactgtgccttcatctggcagaaggacggcgtgaagaagctgaacctgtacctgatcatcaactacttcaagggcggcaagctgcggttcaagaagatcaaacctgaagccttcgaagccaacagattctacaccgtgatcaacaaaaagagcggcgagatcgtgcccatggaggtgaacttcaacttcgacgaccccaacctgatcatcctgcctctggcctttggcaagagacagggcagagaattcatctggaacgacctgctgtccctggaaaccggcagcctgaagctggccaacggaagagtgatcgagaagacactgtacaacagaagaacccggcaggatgagcctgccctgttcgtggccctgaccttcgagcggcgggaggtcctggactcctccaatatcaaaccaatgaacctgatcggcgtggcaagaggcgaaaacatccccgccgtgatcgccctgaccgaccccgagggctgcccactgagccggtttaaggatagcctgggaaacccaacccacatcctgagaatcggcgagagctataaggagaagcagcggaccatccaggccaagaaggaggtggagcagcggagagccggcggctacagccggaagtacgccagcaaagccaagaatctggcagacgatatggtgagaaacaccgctagagatctgctgtactacgccgtgacccaggatgccatgctgatcttcgccaacctgagccggggcttcggccggcagggcaagcggaccttcatggccgagagacagtacacacggatggaggactggctgaccgccaagctggcctacgagggcctgagcaagacctacctgtccaagacactggcccagtacacctccaagacatgcagcaactgtgggtttaccatcaccagcgccgactacgacagggtgctggagaagctgaagaagacagcaacaggctggatgaccacaattaacggcaaggagctgaaggtggagggccagattacctactacaacagatacaagagacagaacgtagtcaaggacctgtccgtcgagctggatagactgagcgaagaatctgtgaacaacgacatctcctcctggacaaagggcagaagcggagaagctctgagcctcctgaagaaaagattctcccatagacccgtgcaggagaagttcgtgtgcctgaactgcggcttcgagacacacgcagccgagcaagccgccctgaacatcgccagatcctggctgttcctgcggagccaggagtacaagaaataccagacaaacaagacaaccggcaacaccgataagagagccttcgtcgagacctggcagtccttttaccggaagaagcttaaggaggtgtggaaacctgccgtgcggtctggcggatctggcggaggctccatgaagctgggcagcgtgaccttcgaggacgtggccgtgtacttcagctgggaggagtgggccctgctggacgaggcccagaggtgcctgtaccacgacgtgatgctggagaacttcgccctgaccagcagcctggtggtgagcagcagcagccacaccatcgcccagctgggcctgggcgaggagagcttcgtgctgcccaggatgcacatgatccccctgagcaccaggtgggcccagaggggcggcccaagcagcggcgcccctcctcccagcggcggcagcccagccggctccccaacctctaccgaggagggcacctctgagtccgccacccccgagagcggccctggcacctccaccgagcccagcgagggcagcgcacccggcagccctgccggcagccccacctccacagaggagggaaccagcaccgagcccagcgaaggcagcgccccaggcaccagcaccgagcctagtgagcaggagattaaacggatcaacaagatcagaagaagacttgtgaaagacagcaacaccaagaaggccggcaagacaggccccatgaaaaccctgctggttagagtgatgacacccgatctgagagagcggctggaaaacctgagaaagaagcctgaaaatatcccccagcccatcagcaatacatctagagccaacctgaataagctgctgaccgattacaccgaaatgaagaaggcgatcctgcatgtgtactgggaagagttccagaaggaccctgtgggcctgatgagccgggtggcccagcctgccagcaagaagatcgatcagaacaagctgaaacctgagatggacgagaagggcaacctgaccaccgccggctttgcctgctctcagtgtggccagcccctgttcgtgtacaagctggagcaggtgtctgagaagggcaaggcttacaccaactacttcggacggtgcaatgtggccgagcacgaaaagctgatcctgctggcccagctgaagcccgagaaggatagcgacgaagccgtgacatatagcctgggaaagtttgggcagagggccctggatttctacagcattcatgtgaccaaggagtccacccaccccgtgaagcccctggcccagatcgccggaaacagatacgcctccggacctgtgggaaaggccctgagcgacgcatgtatgggcacaatcgcctccttcctgtctaagtaccaggacatcatcatcgaacaccagaaggtggtgaagggcaaccagaagagactggagagcctgcgggagctggccggcaaggaaaacctggaataccctagcgtgaccctgccacctcagcctcacaccaaggagggcgttgatgcctacaacgaagtgatcgcccgggtgcgaatgtgggtgaacctgaacctgtggcagaagctgaagctaagcagagatgatgccaagcctctgctgagactgaagggattcccttcctttcctctggtcgagagacaggccaacgaagtggactggtgggacatggtgtgtaacgtgaagaagctgatcaacgagaaaaaggaggatggcaaggtgttttggcagaatctggctggctacaagagacaggaagccctgagaccatacctgagcagcgaggaagatcggaagaagggaaagaaattcgctcggtaccagctgggcgacctgctgctgcacctggaaaagaagcacggcgaggactggggaaaggtgtacgacgaggcctgggagcggattgacaagaaagtggaaggcctgagcaagcacatcaagctggaagaggaacggagaagcgaggacgcccagagcaaggccgccctgaccgactggctgcgggctaaggccagcttcgtgatcgagggcctgaaggaggccgacaaggacgagttctgcagatgcgagctgaagctgcagaagtggtacggggacctgcggggaaagcccttcgccatcgaagccgagaacagcatcctggacatcagcggcttcagcaagcagtacaactgtgccttcatctggcagaaggacggcgtgaagaagctgaacctgtacctgatcatcaactacttcaagggcggcaagctgcggttcaagaagatcaaacctgaagccttcgaagccaacagattctacaccgtgatcaacaaaaagagcggcgagatcgtgcccatggaggtgaacttcaacttcgacgaccccaacctgatcatcctgcctctggcctttggcaagagacagggcagagaattcatctggaacgacctgctgtccctggaaaccggcagcctgaagctggccaacggaagagtgatcgagaagacactgtacaacagaagaacccggcaggatgagcctgccctgttcgtggccctgaccttcgagcggcgggaggtcctggactcctccaatatcaaaccaatgaacctgatcggcgtggcaagaggcgaaaacatccccgccgtgatcgccctgaccgaccccgagggctgcccactgagccggtttaaggatagcctgggaaacccaacccacatcctgagaatcggcgagagctataaggagaagcagcggaccatccaggccaagaaggaggtggagcagcggagagccggcggctacagccggaagtacgccagcaaagccaagaatctggcagacgatatggtgagaaacaccgctagagatctgctgtactacgccgtgacccaggatgccatgctgatcttcgccaacctgagccggggcttcggccggcagggcaagcggaccttcatggccgagagacagtacacacggatggaggactggctgaccgccaagctggcctacgagggcctgagcaagacctacctgtccaagacactggcccagtacacctccaagacatgcagcaactgtgggtttaccatcaccagcgccgactacgacagggtgctggagaagctgaagaagacagcaacaggctggatgaccacaattaacggcaaggagctgaaggtggagggccagattacctactacaacagatacaagagacagaacgtagtcaaggacctgtccgtcgagctggatagactgagcgaagaatctgtgaacaacgacatctcctcctggacaaagggcagaagcggagaagctctgagcctcctgaagaaaagattctcccatagacccgtgcaggagaagttcgtgtgcctgaactgcggcttcgagacacacgcagccgagcaagccgccctgaacatcgccagatcctggctgttcctgcggagccaggagtacaagaaataccagacaaacaagacaaccggcaacaccgataagagagccttcgtcgagacctggcagtccttttaccggaagaagcttaaggaggtgtggaaacctgccgtgcggtctggcggatctggcggaggctcctatgaagctgggcagcgtgaccttcgaggacgtggccgtgtacttcagctgggaggagtgggccctgctggacgaggcccagaggtgcctgtaccacgacgtgatgctggagaacttcgccctgaccagcagcctggtggtgagcagcagcagccacaccatcgcccagctgggcctgggcgaggagagcttcgtgctgcccaggatgcacatgatccccctgagcaccaggtgggcccagaggggatctggctccggcagcggccccaagaaaaagagaaaagtctaagctgccttctgcggggcttgccttctggccatgcccttcttctctcccttgcacctgtacctcttggtctttgaataaagcctgagtaggaaggctagcaaaaaaaaaaaaaaaaaaaaaaaaaaaaaaaaaaaaaaaaaaaaaaaaaaaaaaaaaaaaaaaaaaaaaaaaaaaaaaaa

SEQ ID NO: 16811 - RNA, 9485 nt, synthetic construct
  source 1..9485: mol_type = other RNA
aggaaataagagagaaaagaagagtaagaagaaatataagagccaccatggcccctaagaagaagcgtaaagtgagccggatggaacgcctcgtctacgaggtgcggcagaagtgcagaaacatcgaggacatctgcatctcctgcggatctctgaacgtgaccctggagcacccactgttcatcggcggcatgtgccagaactgtaaaaactgttttctggagtgtgcctatcaatacgacgatgacggctaccagagctactgcaccatctgttgcggcggaagagaggtgctgatgtgtggaaataacaactgctgccggtgcttctgcgtggaatgcgtggacctgctggtgggccccggcgccgcccaggccgctattaaggaagatccttggaactgctacatgtgcggccacaagggcacatacggcctgctgagacggagagaggactggcctagcagactgcagatgttcttcgccaataaccacgaccaggagttcgacccccctaaggtgtaccctcccgtccccgccgagaagagaaagcccatccgggtcctgagcctgttcgatggcatcgccaccggtctgctggtgctgaaggacctgggcatccaggtggataggtacattgcctccgaggtgtgcgaggactccatcaccgtgggaatggtgcgtcatcagggcaagatcatgtacgtgggcgacgtgcggagcgtgacacagaagcatatccaggagtggggccctttcgacctggtgatcggcggcagcccttgcaatgacctgagcatcgtgaacccagcccggaagggcctgtacgagggaaccggcagactgttcttcgagttttacagactgctgcacgacgcccggcctaaggaaggcgacgaccggcccttcttttggctgttcgagaatgtggtggccatgggagtcagcgacaagcgggatattagccggttcctggagagcaaccccgtgatgatcgatgccaaggaagtgagcgccgcccaccgggccagatacttctggggcaatctgcctggcatgaacagacccctggccagcaccgtgaacgacaagctggagctgcaggagtgcctggagcacggccggatcgccaagttcagcaaggtgagaaccatcaccacccgaagcaacagcatcaaacaaggcaaggaccagcactttcctgtgttcatgaacgagaaggaggacatcctgtggtgtaccgagatggagagagtgttcgggttcccagtccactacacagatgtcagcaacatgtctagactggccagacagagactgctgggaagaagctggtccgtccctgtgatcagacacctgttcgcccctctgaaggagtacttcgcctgcgtgagcagcggcaacagcaacgccaacagccggggccccagcttctctagcggcctggtgccactgtccctgagagggagccacatgggccccatggagatctacaaaaccgtgagcgcctggaagcggcagcctgtgcgcgtgctgagcctgtttcggaatatcgataaagtcctgaaaagcctgggattcctggagagcggctctggctccggcggtggcaccctgaagtacgtggaggatgtgacaaacgtggtcagacgggatgtggagaagtggggccccttcgatctggtgtacggcagcacccaacccctgggcagctcttgtgaccggtgccctggctggtacatgtttcagttccaccggatcctgcagtacgccctgccgagacaggagtcccagcggccattcttttggattttcatggacaacttgctgctgaccgaggatgaccaggaaactaccactcggttcctgcagaccgaagccgtgaccctgcaggacgtgagaggccgggactaccagaacgccatgcgggtgtggtccaacatccctggactgaaaagcaagcacgcacctctgacccctaaagaagaggagtacctgcaggcccaggtgcggagcagaagcaagctggacgcccctaaggtggatctgctggtgaagaattgcctcctgcccctgagagagtacttcaagtatttcagccagaatagtctgcccctgggaggcagcggcggcggcgccctggtgacatttgaggacgtcgccgtgcggttcacccaggaggaatgggctctgctggatccttctcagaaaatcctgtaccgggacgtgatgagagagacataccggaatctgacctccgtgggcatcaactgggaatgttgggaccttgaagcctgcttcagaagcctgggaagaaacctgagagtgcaggtggtgaagagaaagtgcgagctgaccaacagcggcccctgcgccgagggcggcccaagcagcggcgcccctcctcccagcggcggcagcccagccggctccccaacctctaccgaggagggcacctctgagtccgccacccccgagagcggccctggcacctccaccgagcccagcgagggcagcgcacccggcagccctgccggcagccccacctccacagaggagggaaccagcaccgagcccagcgaaggcagcgccccaggcaccagcaccgagcctagtgagcaggagattaaacggatcaacaagatcagaagaagacttgtgaaagacagcaacaccaagaaggccggcaagacaggccccatgaaaaccctgctggttagagtgatgacacccgatctgagagagcggctggaaaacctgagaaagaagcctgaaaatatcccccagcccatcagcaatacatctagagccaacctgaataagctgctgaccgattacaccgaaatgaagaaggcgatcctgcatgtgtactgggaagagttccagaaggaccctgtgggcctgatgagccgggtggcccagcctgccagcaagaagatcgatcagaacaagctgaaacctgagatggacgagaagggcaacctgaccaccgccggctttgcctgctctcagtgtggccagcccctgttcgtgtacaagctggagcaggtgtctgagaagggcaaggcttacaccaactacttcggacggtgcaatgtggccgagcacgaaaagctgatcctgctggcccagctgaagcccgagaaggatagcgacgaagccgtgacatatagcctgggaaagtttgggcagagggccctggatttctacagcattcatgtgaccaaggagtccacccaccccgtgaagcccctggcccagatcgccggaaacagatacgcctccggacctgtgggaaaggccctgagcgacgcatgtatgggcacaatcgcctccttcctgtctaagtaccaggacatcatcatcgaacaccagaaggtggtgaagggcaaccagaagagactggagagcctgcgggagctggccggcaaggaaaacctggaataccctagcgtgaccctgccacctcagcctcacaccaaggagggcgttgatgcctacaacgaagtgatcgcccgggtgcgaatgtgggtgaacctgaacctgtggcagaagctgaagctaagcagagatgatgccaagcctctgctgagactgaagggattcccttcctttcctctggtcgagagacaggccaacgaagtggactggtgggacatggtgtgtaacgtgaagaagctgatcaacgagaaaaaggaggatggcaaggtgttttggcagaatctggctggctacaagagacaggaagccctgagaccatacctgagcagcgaggaagatcggaagaagggaaagaaattcgctcggtaccagctgggcgacctgctgctgcacctggaaaagaagcacggcgaggactggggaaaggtgtacgacgaggcctgggagcggattgacaagaaagtggaaggcctgagcaagcacatcaagctggaagaggaacggagaagcgaggacgcccagagcaaggccgccctgaccgactggctgcgggctaaggccagcttcgtgatcgagggcctgaaggaggccgacaaggacgagttctgcagatgcgagctgaagctgcagaagtggtacggggacctgcggggaaagcccttcgccatcgaagccgagaacagcatcctggacatcagcggcttcagcaagcagtacaactgtgccttcatctggcagaaggacggcgtgaagaagctgaacctgtacctgatcatcaactacttcaagggcggcaagctgcggttcaagaagatcaaacctgaagccttcgaagccaacagattctacaccgtgatcaacaaaaagagcggcgagatcgtgcccatggaggtgaacttcaacttcgacgaccccaacctgatcatcctgcctctggcctttggcaagagacagggcagagaattcatctggaacgacctgctgtccctggaaaccggcagcctgaagctggccaacggaagagtgatcgagaagacactgtacaacagaagaacccggcaggatgagcctgccctgttcgtggccctgaccttcgagcggcgggaggtcctggactcctccaatatcaaaccaatgaacctgatcggcgtggcaagaggcgaaaacatccccgccgtgatcgccctgaccgaccccgagggctgcccactgagccggtttaaggatagcctgggaaacccaacccacatcctgagaatcggcgagagctataaggagaagcagcggaccatccaggccaagaaggaggtggagcagcggagagccggcggctacagccggaagtacgccagcaaagccaagaatctggcagacgatatggtgagaaacaccgctagagatctgctgtactacgccgtgacccaggatgccatgctgatcttcgccaacctgagccggggcttcggccggcagggcaagcggaccttcatggccgagagacagtacacacggatggaggactggctgaccgccaagctggcctacgagggcctgagcaagacctacctgtccaagacactggcccagtacacctccaagacatgcagcaactgtgggtttaccatcaccagcgccgactacgacagggtgctggagaagctgaagaagacagcaacaggctggatgaccacaattaacggcaaggagctgaaggtggagggccagattacctactacaacagatacaagagacagaacgtagtcaaggacctgtccgtcgagctggatagactgagcgaagaatctgtgaacaacgacatctcctcctggacaaagggcagaagcggagaagctctgagcctcctgaagaaaagattctcccatagacccgtgcaggagaagttcgtgtgcctgaactgcggcttcgagacacacgcagccgagcaagccgccctgaacatcgccagatcctggctgttcctgcggagccaggagtacaagaaataccagacaaacaagacaaccggcaacaccgataagagagccttcgtcgagacctggcagtccttttaccggaagaagcttaaggaggtgtggaaacctgccgtgcggtctggcggatctggcggaggctcccagatgtgggtgaccttcgaggacgtggccgtgagcttcagccaggaggagtgggtgtacctggacgagggccagaaggagctgtacagggaggtgatgaaggagaactacgagaccgtgatgagcctggccggcgaggagttcagcaggggcaaggagaaggagggcagcatcgagcagcagagcctgaagaccgaggtgcacgagatgaacaagagggtgaagctgttcaagtgcagcgagggcggcccaagcagcggcgcccctcctcccagcggcggcagcccagccggctccccaacctctaccgaggagggcacctctgagtccgccacccccgagagcggccctggcacctccaccgagcccagcgagggcagcgcacccggcagccctgccggcagccccacctccacagaggagggaaccagcaccgagcccagcgaaggcagcgccccaggcaccagcaccgagcctagtgagcaggagattaaacggatcaacaagatcagaagaagacttgtgaaagacagcaacaccaagaaggccggcaagacaggccccatgaaaaccctgctggttagagtgatgacacccgatctgagagagcggctggaaaacctgagaaagaagcctgaaaatatcccccagcccatcagcaatacatctagagccaacctgaataagctgctgaccgattacaccgaaatgaagaaggcgatcctgcatgtgtactgggaagagttccagaaggaccctgtgggcctgatgagccgggtggcccagcctgccagcaagaagatcgatcagaacaagctgaaacctgagatggacgagaagggcaacctgaccaccgccggctttgcctgctctcagtgtggccagcccctgttcgtgtacaagctggagcaggtgtctgagaagggcaaggcttacaccaactacttcggacggtgcaatgtggccgagcacgaaaagctgatcctgctggcccagctgaagcccgagaaggatagcgacgaagccgtgacatatagcctgggaaagtttgggcagagggccctggatttctacagcattcatgtgaccaaggagtccacccaccccgtgaagcccctggcccagatcgccggaaacagatacgcctccggacctgtgggaaaggccctgagcgacgcatgtatgggcacaatcgcctccttcctgtctaagtaccaggacatcatcatcgaacaccagaaggtggtgaagggcaaccagaagagactggagagcctgcgggagctggccggcaaggaaaacctggaataccctagcgtgaccctgccacctcagcctcacaccaaggagggcgttgatgcctacaacgaagtgatcgcccgggtgcgaatgtgggtgaacctgaacctgtggcagaagctgaagctaagcagagatgatgccaagcctctgctgagactgaagggattcccttcctttcctctggtcgagagacaggccaacgaagtggactggtgggacatggtgtgtaacgtgaagaagctgatcaacgagaaaaaggaggatggcaaggtgttttggcagaatctggctggctacaagagacaggaagccctgagaccatacctgagcagcgaggaagatcggaagaagggaaagaaattcgctcggtaccagctgggcgacctgctgctgcacctggaaaagaagcacggcgaggactggggaaaggtgtacgacgaggcctgggagcggattgacaagaaagtggaaggcctgagcaagcacatcaagctggaagaggaacggagaagcgaggacgcccagagcaaggccgccctgaccgactggctgcgggctaaggccagcttcgtgatcgagggcctgaaggaggccgacaaggacgagttctgcagatgcgagctgaagctgcagaagtggtacggggacctgcggggaaagcccttcgccatcgaagccgagaacagcatcctggacatcagcggcttcagcaagcagtacaactgtgccttcatctggcagaaggacggcgtgaagaagctgaacctgtacctgatcatcaactacttcaagggcggcaagctgcggttcaagaagatcaaacctgaagccttcgaagccaacagattctacaccgtgatcaacaaaaagagcggcgagatcgtgcccatggaggtgaacttcaacttcgacgaccccaacctgatcatcctgcctctggcctttggcaagagacagggcagagaattcatctggaacgacctgctgtccctggaaaccggcagcctgaagctggccaacggaagagtgatcgagaagacactgtacaacagaagaacccggcaggatgagcctgccctgttcgtggccctgaccttcgagcggcgggaggtcctggactcctccaatatcaaaccaatgaacctgatcggcgtggcaagaggcgaaaacatccccgccgtgatcgccctgaccgaccccgagggctgcccactgagccggtttaaggatagcctgggaaacccaacccacatcctgagaatcggcgagagctataaggagaagcagcggaccatccaggccaagaaggaggtggagcagcggagagccggcggctacagccggaagtacgccagcaaagccaagaatctggcagacgatatggtgagaaacaccgctagagatctgctgtactacgccgtgacccaggatgccatgctgatcttcgccaacctgagccggggcttcggccggcagggcaagcggaccttcatggccgagagacagtacacacggatggaggactggctgaccgccaagctggcctacgagggcctgagcaagacctacctgtccaagacactggcccagtacacctccaagacatgcagcaactgtgggtttaccatcaccagcgccgactacgacagggtgctggagaagctgaagaagacagcaacaggctggatgaccacaattaacggcaaggagctgaaggtggagggccagattacctactacaacagatacaagagacagaacgtagtcaaggacctgtccgtcgagctggatagactgagcgaagaatctgtgaacaacgacatctcctcctggacaaagggcagaagcggagaagctctgagcctcctgaagaaaagattctcccatagacccgtgcaggagaagttcgtgtgcctgaactgcggcttcgagacacacgcagccgagcaagccgccctgaacatcgccagatcctggctgttcctgcggagccaggagtacaagaaataccagacaaacaagacaaccggcaacaccgataagagagccttcgtcgagacctggcagtccttttaccggaagaagcttaaggaggtgtggaaacctgccgtgcggtctggcggatctggcggaggctcctcagatgtgggtgaccttcgaggacgtggccgtgagcttcagccaggaggagtgggtgtacctggacgagggccagaaggagctgtacagggaggtgatgaaggagaactacgagaccgtgatgagcctggccggcgaggagttcagcaggggcaaggagaaggagggcagcatcgagcagcagagcctgaagaccgaggtgcacgagatgaacaagagggtgaagctgttcaagtgcagcgagggatctggctccggcagcggccccaagaaaaagagaaaagtctaagctgccttctgcggggcttgccttctggccatgcccttcttctctcccttgcacctgtacctcttggtctttgaataaagcctgagtaggaaggctagcaaaaaaaaaaaaaaaaaaaaaaaaaaaaaaaaaaaaaaaaaaaaaaaaaaaaaaaaaaaaaaaaaaaaaaaaaaaaaaaa

SEQ ID NO: 16812 - RNA, 9485 nt, synthetic construct
  source 1..9485: mol_type = other RNA
aggaaataagagagaaaagaagagtaagaagaaatataagagccaccatggcccctaagaagaagcgtaaagtgagccggatggaacgcctcgtctacgaggtgcggcagaagtgcagaaacatcgaggacatctgcatctcctgcggatctctgaacgtgaccctggagcacccactgttcatcggcggcatgtgccagaactgtaaaaactgttttctggagtgtgcctatcaatacgacgatgacggctaccagagctactgcaccatctgttgcggcggaagagaggtgctgatgtgtggaaataacaactgctgccggtgcttctgcgtggaatgcgtggacctgctggtgggccccggcgccgcccaggccgctattaaggaagatccttggaactgctacatgtgcggccacaagggcacatacggcctgctgagacggagagaggactggcctagcagactgcagatgttcttcgccaataaccacgaccaggagttcgacccccctaaggtgtaccctcccgtccccgccgagaagagaaagcccatccgggtcctgagcctgttcgatggcatcgccaccggtctgctggtgctgaaggacctgggcatccaggtggataggtacattgcctccgaggtgtgcgaggactccatcaccgtgggaatggtgcgtcatcagggcaagatcatgtacgtgggcgacgtgcggagcgtgacacagaagcatatccaggagtggggccctttcgacctggtgatcggcggcagcccttgcaatgacctgagcatcgtgaacccagcccggaagggcctgtacgagggaaccggcagactgttcttcgagttttacagactgctgcacgacgcccggcctaaggaaggcgacgaccggcccttcttttggctgttcgagaatgtggtggccatgggagtcagcgacaagcgggatattagccggttcctggagagcaaccccgtgatgatcgatgccaaggaagtgagcgccgcccaccgggccagatacttctggggcaatctgcctggcatgaacagacccctggccagcaccgtgaacgacaagctggagctgcaggagtgcctggagcacggccggatcgccaagttcagcaaggtgagaaccatcaccacccgaagcaacagcatcaaacaaggcaaggaccagcactttcctgtgttcatgaacgagaaggaggacatcctgtggtgtaccgagatggagagagtgttcgggttcccagtccactacacagatgtcagcaacatgtctagactggccagacagagactgctgggaagaagctggtccgtccctgtgatcagacacctgttcgcccctctgaaggagtacttcgcctgcgtgagcagcggcaacagcaacgccaacagccggggccccagcttctctagcggcctggtgccactgtccctgagagggagccacatgggccccatggagatctacaaaaccgtgagcgcctggaagcggcagcctgtgcgcgtgctgagcctgtttcggaatatcgataaagtcctgaaaagcctgggattcctggagagcggctctggctccggcggtggcaccctgaagtacgtggaggatgtgacaaacgtggtcagacgggatgtggagaagtggggccccttcgatctggtgtacggcagcacccaacccctgggcagctcttgtgaccggtgccctggctggtacatgtttcagttccaccggatcctgcagtacgccctgccgagacaggagtcccagcggccattcttttggattttcatggacaacttgctgctgaccgaggatgaccaggaaactaccactcggttcctgcagaccgaagccgtgaccctgcaggacgtgagaggccgggactaccagaacgccatgcgggtgtggtccaacatccctggactgaaaagcaagcacgcacctctgacccctaaagaagaggagtacctgcaggcccaggtgcggagcagaagcaagctggacgcccctaaggtggatctgctggtgaagaattgcctcctgcccctgagagagtacttcaagtatttcagccagaatagtctgcccctgggaggcagcggcggcggcgccctggtgacatttgaggacgtcgccgtgcggttcacccaggaggaatgggctctgctggatccttctcagaaaatcctgtaccgggacgtgatgagagagacataccggaatctgacctccgtgggcatcaactgggaatgttgggaccttgaagcctgcttcagaagcctgggaagaaacctgagagtgcaggtggtgaagagaaagtgcgagctgaccaacagcggcccctgcgccgagggcggcccaagcagcggcgcccctcctcccagcggcggcagcccagccggctccccaacctctaccgaggagggcacctctgagtccgccacccccgagagcggccctggcacctccaccgagcccagcgagggcagcgcacccggcagccctgccggcagccccacctccacagaggagggaaccagcaccgagcccagcgaaggcagcgccccaggcaccagcaccgagcctagtgagcaggagattaaacggatcaacaagatcagaagaagacttgtgaaagacagcaacaccaagaaggccggcaagacaggccccatgaaaaccctgctggttagagtgatgacacccgatctgagagagcggctggaaaacctgagaaagaagcctgaaaatatcccccagcccatcagcaatacatctagagccaacctgaataagctgctgaccgattacaccgaaatgaagaaggcgatcctgcatgtgtactgggaagagttccagaaggaccctgtgggcctgatgagccgggtggcccagcctgccagcaagaagatcgatcagaacaagctgaaacctgagatggacgagaagggcaacctgaccaccgccggctttgcctgctctcagtgtggccagcccctgttcgtgtacaagctggagcaggtgtctgagaagggcaaggcttacaccaactacttcggacggtgcaatgtggccgagcacgaaaagctgatcctgctggcccagctgaagcccgagaaggatagcgacgaagccgtgacatatagcctgggaaagtttgggcagagggccctggatttctacagcattcatgtgaccaaggagtccacccaccccgtgaagcccctggcccagatcgccggaaacagatacgcctccggacctgtgggaaaggccctgagcgacgcatgtatgggcacaatcgcctccttcctgtctaagtaccaggacatcatcatcgaacaccagaaggtggtgaagggcaaccagaagagactggagagcctgcgggagctggccggcaaggaaaacctggaataccctagcgtgaccctgccacctcagcctcacaccaaggagggcgttgatgcctacaacgaagtgatcgcccgggtgcgaatgtgggtgaacctgaacctgtggcagaagctgaagctaagcagagatgatgccaagcctctgctgagactgaagggattcccttcctttcctctggtcgagagacaggccaacgaagtggactggtgggacatggtgtgtaacgtgaagaagctgatcaacgagaaaaaggaggatggcaaggtgttttggcagaatctggctggctacaagagacaggaagccctgagaccatacctgagcagcgaggaagatcggaagaagggaaagaaattcgctcggtaccagctgggcgacctgctgctgcacctggaaaagaagcacggcgaggactggggaaaggtgtacgacgaggcctgggagcggattgacaagaaagtggaaggcctgagcaagcacatcaagctggaagaggaacggagaagcgaggacgcccagagcaaggccgccctgaccgactggctgcgggctaaggccagcttcgtgatcgagggcctgaaggaggccgacaaggacgagttctgcagatgcgagctgaagctgcagaagtggtacggggacctgcggggaaagcccttcgccatcgaagccgagaacagcatcctggacatcagcggcttcagcaagcagtacaactgtgccttcatctggcagaaggacggcgtgaagaagctgaacctgtacctgatcatcaactacttcaagggcggcaagctgcggttcaagaagatcaaacctgaagccttcgaagccaacagattctacaccgtgatcaacaaaaagagcggcgagatcgtgcccatggaggtgaacttcaacttcgacgaccccaacctgatcatcctgcctctggcctttggcaagagacagggcagagaattcatctggaacgacctgctgtccctggaaaccggcagcctgaagctggccaacggaagagtgatcgagaagacactgtacaacagaagaacccggcaggatgagcctgccctgttcgtggccctgaccttcgagcggcgggaggtcctggactcctccaatatcaaaccaatgaacctgatcggcgtggcaagaggcgaaaacatccccgccgtgatcgccctgaccgaccccgagggctgcccactgagccggtttaaggatagcctgggaaacccaacccacatcctgagaatcggcgagagctataaggagaagcagcggaccatccaggccaagaaggaggtggagcagcggagagccggcggctacagccggaagtacgccagcaaagccaagaatctggcagacgatatggtgagaaacaccgctagagatctgctgtactacgccgtgacccaggatgccatgctgatcttcgccaacctgagccggggcttcggccggcagggcaagcggaccttcatggccgagagacagtacacacggatggaggactggctgaccgccaagctggcctacgagggcctgagcaagacctacctgtccaagacactggcccagtacacctccaagacatgcagcaactgtgggtttaccatcaccagcgccgactacgacagggtgctggagaagctgaagaagacagcaacaggctggatgaccacaattaacggcaaggagctgaaggtggagggccagattacctactacaacagatacaagagacagaacgtagtcaaggacctgtccgtcgagctggatagactgagcgaagaatctgtgaacaacgacatctcctcctggacaaagggcagaagcggagaagctctgagcctcctgaagaaaagattctcccatagacccgtgcaggagaagttcgtgtgcctgaactgcggcttcgagacacacgcagccgagcaagccgccctgaacatcgccagatcctggctgttcctgcggagccaggagtacaagaaataccagacaaacaagacaaccggcaacaccgataagagagccttcgtcgagacctggcagtccttttaccggaagaagcttaaggaggtgtggaaacctgccgtgcggtctggcggatctggcggaggctccctgcaggccagcgtgaccttcgaggacgtggccgtggacttcagcgccgaggagtggaggaggctgaggcccctgcagagggagctgtacagggaggtgatgctggagaactacaggagcctggcctggctgggcctggccgccagcaagcccggcgtgatctgcaggctggagaggggcgaggcccccagggagcccgaccccgacggcccccagagcggctgggccgactgcggcaccggcggcggcccaagcagcggcgcccctcctcccagcggcggcagcccagccggctccccaacctctaccgaggagggcacctctgagtccgccacccccgagagcggccctggcacctccaccgagcccagcgagggcagcgcacccggcagccctgccggcagccccacctccacagaggagggaaccagcaccgagcccagcgaaggcagcgccccaggcaccagcaccgagcctagtgagcaggagattaaacggatcaacaagatcagaagaagacttgtgaaagacagcaacaccaagaaggccggcaagacaggccccatgaaaaccctgctggttagagtgatgacacccgatctgagagagcggctggaaaacctgagaaagaagcctgaaaatatcccccagcccatcagcaatacatctagagccaacctgaataagctgctgaccgattacaccgaaatgaagaaggcgatcctgcatgtgtactgggaagagttccagaaggaccctgtgggcctgatgagccgggtggcccagcctgccagcaagaagatcgatcagaacaagctgaaacctgagatggacgagaagggcaacctgaccaccgccggctttgcctgctctcagtgtggccagcccctgttcgtgtacaagctggagcaggtgtctgagaagggcaaggcttacaccaactacttcggacggtgcaatgtggccgagcacgaaaagctgatcctgctggcccagctgaagcccgagaaggatagcgacgaagccgtgacatatagcctgggaaagtttgggcagagggccctggatttctacagcattcatgtgaccaaggagtccacccaccccgtgaagcccctggcccagatcgccggaaacagatacgcctccggacctgtgggaaaggccctgagcgacgcatgtatgggcacaatcgcctccttcctgtctaagtaccaggacatcatcatcgaacaccagaaggtggtgaagggcaaccagaagagactggagagcctgcgggagctggccggcaaggaaaacctggaataccctagcgtgaccctgccacctcagcctcacaccaaggagggcgttgatgcctacaacgaagtgatcgcccgggtgcgaatgtgggtgaacctgaacctgtggcagaagctgaagctaagcagagatgatgccaagcctctgctgagactgaagggattcccttcctttcctctggtcgagagacaggccaacgaagtggactggtgggacatggtgtgtaacgtgaagaagctgatcaacgagaaaaaggaggatggcaaggtgttttggcagaatctggctggctacaagagacaggaagccctgagaccatacctgagcagcgaggaagatcggaagaagggaaagaaattcgctcggtaccagctgggcgacctgctgctgcacctggaaaagaagcacggcgaggactggggaaaggtgtacgacgaggcctgggagcggattgacaagaaagtggaaggcctgagcaagcacatcaagctggaagaggaacggagaagcgaggacgcccagagcaaggccgccctgaccgactggctgcgggctaaggccagcttcgtgatcgagggcctgaaggaggccgacaaggacgagttctgcagatgcgagctgaagctgcagaagtggtacggggacctgcggggaaagcccttcgccatcgaagccgagaacagcatcctggacatcagcggcttcagcaagcagtacaactgtgccttcatctggcagaaggacggcgtgaagaagctgaacctgtacctgatcatcaactacttcaagggcggcaagctgcggttcaagaagatcaaacctgaagccttcgaagccaacagattctacaccgtgatcaacaaaaagagcggcgagatcgtgcccatggaggtgaacttcaacttcgacgaccccaacctgatcatcctgcctctggcctttggcaagagacagggcagagaattcatctggaacgacctgctgtccctggaaaccggcagcctgaagctggccaacggaagagtgatcgagaagacactgtacaacagaagaacccggcaggatgagcctgccctgttcgtggccctgaccttcgagcggcgggaggtcctggactcctccaatatcaaaccaatgaacctgatcggcgtggcaagaggcgaaaacatccccgccgtgatcgccctgaccgaccccgagggctgcccactgagccggtttaaggatagcctgggaaacccaacccacatcctgagaatcggcgagagctataaggagaagcagcggaccatccaggccaagaaggaggtggagcagcggagagccggcggctacagccggaagtacgccagcaaagccaagaatctggcagacgatatggtgagaaacaccgctagagatctgctgtactacgccgtgacccaggatgccatgctgatcttcgccaacctgagccggggcttcggccggcagggcaagcggaccttcatggccgagagacagtacacacggatggaggactggctgaccgccaagctggcctacgagggcctgagcaagacctacctgtccaagacactggcccagtacacctccaagacatgcagcaactgtgggtttaccatcaccagcgccgactacgacagggtgctggagaagctgaagaagacagcaacaggctggatgaccacaattaacggcaaggagctgaaggtggagggccagattacctactacaacagatacaagagacagaacgtagtcaaggacctgtccgtcgagctggatagactgagcgaagaatctgtgaacaacgacatctcctcctggacaaagggcagaagcggagaagctctgagcctcctgaagaaaagattctcccatagacccgtgcaggagaagttcgtgtgcctgaactgcggcttcgagacacacgcagccgagcaagccgccctgaacatcgccagatcctggctgttcctgcggagccaggagtacaagaaataccagacaaacaagacaaccggcaacaccgataagagagccttcgtcgagacctggcagtccttttaccggaagaagcttaaggaggtgtggaaacctgccgtgcggtctggcggatctggcggaggctcctctgcaggccagcgtgaccttcgaggacgtggccgtggacttcagcgccgaggagtggaggaggctgaggcccctgcagagggagctgtacagggaggtgatgctggagaactacaggagcctggcctggctgggcctggccgccagcaagcccggcgtgatctgcaggctggagaggggcgaggcccccagggagcccgaccccgacggcccccagagcggctgggccgactgcggcaccggcggatctggctccggcagcggccccaagaaaaagagaaaagtctaagctgccttctgcggggcttgccttctggccatgcccttcttctctcccttgcacctgtacctcttggtctttgaataaagcctgagtaggaaggctagcaaaaaaaaaaaaaaaaaaaaaaaaaaaaaaaaaaaaaaaaaaaaaaaaaaaaaaaaaaaaaaaaaaaaaaaaaaaaaaaa

SEQ ID NO: 16813 - RNA, 9485 nt, synthetic construct
  source 1..9485: mol_type = other RNA
aggaaataagagagaaaagaagagtaagaagaaatataagagccaccatggcccctaagaagaagcgtaaagtgagccggatggaacgcctcgtctacgaggtgcggcagaagtgcagaaacatcgaggacatctgcatctcctgcggatctctgaacgtgaccctggagcacccactgttcatcggcggcatgtgccagaactgtaaaaactgttttctggagtgtgcctatcaatacgacgatgacggctaccagagctactgcaccatctgttgcggcggaagagaggtgctgatgtgtggaaataacaactgctgccggtgcttctgcgtggaatgcgtggacctgctggtgggccccggcgccgcccaggccgctattaaggaagatccttggaactgctacatgtgcggccacaagggcacatacggcctgctgagacggagagaggactggcctagcagactgcagatgttcttcgccaataaccacgaccaggagttcgacccccctaaggtgtaccctcccgtccccgccgagaagagaaagcccatccgggtcctgagcctgttcgatggcatcgccaccggtctgctggtgctgaaggacctgggcatccaggtggataggtacattgcctccgaggtgtgcgaggactccatcaccgtgggaatggtgcgtcatcagggcaagatcatgtacgtgggcgacgtgcggagcgtgacacagaagcatatccaggagtggggccctttcgacctggtgatcggcggcagcccttgcaatgacctgagcatcgtgaacccagcccggaagggcctgtacgagggaaccggcagactgttcttcgagttttacagactgctgcacgacgcccggcctaaggaaggcgacgaccggcccttcttttggctgttcgagaatgtggtggccatgggagtcagcgacaagcgggatattagccggttcctggagagcaaccccgtgatgatcgatgccaaggaagtgagcgccgcccaccgggccagatacttctggggcaatctgcctggcatgaacagacccctggccagcaccgtgaacgacaagctggagctgcaggagtgcctggagcacggccggatcgccaagttcagcaaggtgagaaccatcaccacccgaagcaacagcatcaaacaaggcaaggaccagcactttcctgtgttcatgaacgagaaggaggacatcctgtggtgtaccgagatggagagagtgttcgggttcccagtccactacacagatgtcagcaacatgtctagactggccagacagagactgctgggaagaagctggtccgtccctgtgatcagacacctgttcgcccctctgaaggagtacttcgcctgcgtgagcagcggcaacagcaacgccaacagccggggccccagcttctctagcggcctggtgccactgtccctgagagggagccacatgggccccatggagatctacaaaaccgtgagcgcctggaagcggcagcctgtgcgcgtgctgagcctgtttcggaatatcgataaagtcctgaaaagcctgggattcctggagagcggctctggctccggcggtggcaccctgaagtacgtggaggatgtgacaaacgtggtcagacgggatgtggagaagtggggccccttcgatctggtgtacggcagcacccaacccctgggcagctcttgtgaccggtgccctggctggtacatgtttcagttccaccggatcctgcagtacgccctgccgagacaggagtcccagcggccattcttttggattttcatggacaacttgctgctgaccgaggatgaccaggaaactaccactcggttcctgcagaccgaagccgtgaccctgcaggacgtgagaggccgggactaccagaacgccatgcgggtgtggtccaacatccctggactgaaaagcaagcacgcacctctgacccctaaagaagaggagtacctgcaggcccaggtgcggagcagaagcaagctggacgcccctaaggtggatctgctggtgaagaattgcctcctgcccctgagagagtacttcaagtatttcagccagaatagtctgcccctgggaggcagcggcggcggcgccctggtgacatttgaggacgtcgccgtgcggttcacccaggaggaatgggctctgctggatccttctcagaaaatcctgtaccgggacgtgatgagagagacataccggaatctgacctccgtgggcatcaactgggaatgttgggaccttgaagcctgcttcagaagcctgggaagaaacctgagagtgcaggtggtgaagagaaagtgcgagctgaccaacagcggcccctgcgccgagggcggcccaagcagcggcgcccctcctcccagcggcggcagcccagccggctccccaacctctaccgaggagggcacctctgagtccgccacccccgagagcggccctggcacctccaccgagcccagcgagggcagcgcacccggcagccctgccggcagccccacctccacagaggagggaaccagcaccgagcccagcgaaggcagcgccccaggcaccagcaccgagcctagtgagcaggagattaaacggatcaacaagatcagaagaagacttgtgaaagacagcaacaccaagaaggccggcaagacaggccccatgaaaaccctgctggttagagtgatgacacccgatctgagagagcggctggaaaacctgagaaagaagcctgaaaatatcccccagcccatcagcaatacatctagagccaacctgaataagctgctgaccgattacaccgaaatgaagaaggcgatcctgcatgtgtactgggaagagttccagaaggaccctgtgggcctgatgagccgggtggcccagcctgccagcaagaagatcgatcagaacaagctgaaacctgagatggacgagaagggcaacctgaccaccgccggctttgcctgctctcagtgtggccagcccctgttcgtgtacaagctggagcaggtgtctgagaagggcaaggcttacaccaactacttcggacggtgcaatgtggccgagcacgaaaagctgatcctgctggcccagctgaagcccgagaaggatagcgacgaagccgtgacatatagcctgggaaagtttgggcagagggccctggatttctacagcattcatgtgaccaaggagtccacccaccccgtgaagcccctggcccagatcgccggaaacagatacgcctccggacctgtgggaaaggccctgagcgacgcatgtatgggcacaatcgcctccttcctgtctaagtaccaggacatcatcatcgaacaccagaaggtggtgaagggcaaccagaagagactggagagcctgcgggagctggccggcaaggaaaacctggaataccctagcgtgaccctgccacctcagcctcacaccaaggagggcgttgatgcctacaacgaagtgatcgcccgggtgcgaatgtgggtgaacctgaacctgtggcagaagctgaagctaagcagagatgatgccaagcctctgctgagactgaagggattcccttcctttcctctggtcgagagacaggccaacgaagtggactggtgggacatggtgtgtaacgtgaagaagctgatcaacgagaaaaaggaggatggcaaggtgttttggcagaatctggctggctacaagagacaggaagccctgagaccatacctgagcagcgaggaagatcggaagaagggaaagaaattcgctcggtaccagctgggcgacctgctgctgcacctggaaaagaagcacggcgaggactggggaaaggtgtacgacgaggcctgggagcggattgacaagaaagtggaaggcctgagcaagcacatcaagctggaagaggaacggagaagcgaggacgcccagagcaaggccgccctgaccgactggctgcgggctaaggccagcttcgtgatcgagggcctgaaggaggccgacaaggacgagttctgcagatgcgagctgaagctgcagaagtggtacggggacctgcggggaaagcccttcgccatcgaagccgagaacagcatcctggacatcagcggcttcagcaagcagtacaactgtgccttcatctggcagaaggacggcgtgaagaagctgaacctgtacctgatcatcaactacttcaagggcggcaagctgcggttcaagaagatcaaacctgaagccttcgaagccaacagattctacaccgtgatcaacaaaaagagcggcgagatcgtgcccatggaggtgaacttcaacttcgacgaccccaacctgatcatcctgcctctggcctttggcaagagacagggcagagaattcatctggaacgacctgctgtccctggaaaccggcagcctgaagctggccaacggaagagtgatcgagaagacactgtacaacagaagaacccggcaggatgagcctgccctgttcgtggccctgaccttcgagcggcgggaggtcctggactcctccaatatcaaaccaatgaacctgatcggcgtggcaagaggcgaaaacatccccgccgtgatcgccctgaccgaccccgagggctgcccactgagccggtttaaggatagcctgggaaacccaacccacatcctgagaatcggcgagagctataaggagaagcagcggaccatccaggccaagaaggaggtggagcagcggagagccggcggctacagccggaagtacgccagcaaagccaagaatctggcagacgatatggtgagaaacaccgctagagatctgctgtactacgccgtgacccaggatgccatgctgatcttcgccaacctgagccggggcttcggccggcagggcaagcggaccttcatggccgagagacagtacacacggatggaggactggctgaccgccaagctggcctacgagggcctgagcaagacctacctgtccaagacactggcccagtacacctccaagacatgcagcaactgtgggtttaccatcaccagcgccgactacgacagggtgctggagaagctgaagaagacagcaacaggctggatgaccacaattaacggcaaggagctgaaggtggagggccagattacctactacaacagatacaagagacagaacgtagtcaaggacctgtccgtcgagctggatagactgagcgaagaatctgtgaacaacgacatctcctcctggacaaagggcagaagcggagaagctctgagcctcctgaagaaaagattctcccatagacccgtgcaggagaagttcgtgtgcctgaactgcggcttcgagacacacgcagccgagcaagccgccctgaacatcgccagatcctggctgttcctgcggagccaggagtacaagaaataccagacaaacaagacaaccggcaacaccgataagagagccttcgtcgagacctggcagtccttttaccggaagaagcttaaggaggtgtggaaacctgccgtgcggtctggcggatctggcggaggctccagccagggcctggtgaccttcggcgacgtggccgtggtgttcagccaggaggagtgggagtggctgagcagcgagcagaggagcctgtactggaaggtgatgctggacaactacaggaacctggccagcctgggcctgtgcgccagcaagcccgacatgatcaccagcctggagcagggcagggacccctggatgatgaagaggaagatgaggaagggccagaggctggacctgaaggccatgggcggcccaagcagcggcgcccctcctcccagcggcggcagcccagccggctccccaacctctaccgaggagggcacctctgagtccgccacccccgagagcggccctggcacctccaccgagcccagcgagggcagcgcacccggcagccctgccggcagccccacctccacagaggagggaaccagcaccgagcccagcgaaggcagcgccccaggcaccagcaccgagcctagtgagcaggagattaaacggatcaacaagatcagaagaagacttgtgaaagacagcaacaccaagaaggccggcaagacaggccccatgaaaaccctgctggttagagtgatgacacccgatctgagagagcggctggaaaacctgagaaagaagcctgaaaatatcccccagcccatcagcaatacatctagagccaacctgaataagctgctgaccgattacaccgaaatgaagaaggcgatcctgcatgtgtactgggaagagttccagaaggaccctgtgggcctgatgagccgggtggcccagcctgccagcaagaagatcgatcagaacaagctgaaacctgagatggacgagaagggcaacctgaccaccgccggctttgcctgctctcagtgtggccagcccctgttcgtgtacaagctggagcaggtgtctgagaagggcaaggcttacaccaactacttcggacggtgcaatgtggccgagcacgaaaagctgatcctgctggcccagctgaagcccgagaaggatagcgacgaagccgtgacatatagcctgggaaagtttgggcagagggccctggatttctacagcattcatgtgaccaaggagtccacccaccccgtgaagcccctggcccagatcgccggaaacagatacgcctccggacctgtgggaaaggccctgagcgacgcatgtatgggcacaatcgcctccttcctgtctaagtaccaggacatcatcatcgaacaccagaaggtggtgaagggcaaccagaagagactggagagcctgcgggagctggccggcaaggaaaacctggaataccctagcgtgaccctgccacctcagcctcacaccaaggagggcgttgatgcctacaacgaagtgatcgcccgggtgcgaatgtgggtgaacctgaacctgtggcagaagctgaagctaagcagagatgatgccaagcctctgctgagactgaagggattcccttcctttcctctggtcgagagacaggccaacgaagtggactggtgggacatggtgtgtaacgtgaagaagctgatcaacgagaaaaaggaggatggcaaggtgttttggcagaatctggctggctacaagagacaggaagccctgagaccatacctgagcagcgaggaagatcggaagaagggaaagaaattcgctcggtaccagctgggcgacctgctgctgcacctggaaaagaagcacggcgaggactggggaaaggtgtacgacgaggcctgggagcggattgacaagaaagtggaaggcctgagcaagcacatcaagctggaagaggaacggagaagcgaggacgcccagagcaaggccgccctgaccgactggctgcgggctaaggccagcttcgtgatcgagggcctgaaggaggccgacaaggacgagttctgcagatgcgagctgaagctgcagaagtggtacggggacctgcggggaaagcccttcgccatcgaagccgagaacagcatcctggacatcagcggcttcagcaagcagtacaactgtgccttcatctggcagaaggacggcgtgaagaagctgaacctgtacctgatcatcaactacttcaagggcggcaagctgcggttcaagaagatcaaacctgaagccttcgaagccaacagattctacaccgtgatcaacaaaaagagcggcgagatcgtgcccatggaggtgaacttcaacttcgacgaccccaacctgatcatcctgcctctggcctttggcaagagacagggcagagaattcatctggaacgacctgctgtccctggaaaccggcagcctgaagctggccaacggaagagtgatcgagaagacactgtacaacagaagaacccggcaggatgagcctgccctgttcgtggccctgaccttcgagcggcgggaggtcctggactcctccaatatcaaaccaatgaacctgatcggcgtggcaagaggcgaaaacatccccgccgtgatcgccctgaccgaccccgagggctgcccactgagccggtttaaggatagcctgggaaacccaacccacatcctgagaatcggcgagagctataaggagaagcagcggaccatccaggccaagaaggaggtggagcagcggagagccggcggctacagccggaagtacgccagcaaagccaagaatctggcagacgatatggtgagaaacaccgctagagatctgctgtactacgccgtgacccaggatgccatgctgatcttcgccaacctgagccggggcttcggccggcagggcaagcggaccttcatggccgagagacagtacacacggatggaggactggctgaccgccaagctggcctacgagggcctgagcaagacctacctgtccaagacactggcccagtacacctccaagacatgcagcaactgtgggtttaccatcaccagcgccgactacgacagggtgctggagaagctgaagaagacagcaacaggctggatgaccacaattaacggcaaggagctgaaggtggagggccagattacctactacaacagatacaagagacagaacgtagtcaaggacctgtccgtcgagctggatagactgagcgaagaatctgtgaacaacgacatctcctcctggacaaagggcagaagcggagaagctctgagcctcctgaagaaaagattctcccatagacccgtgcaggagaagttcgtgtgcctgaactgcggcttcgagacacacgcagccgagcaagccgccctgaacatcgccagatcctggctgttcctgcggagccaggagtacaagaaataccagacaaacaagacaaccggcaacaccgataagagagccttcgtcgagacctggcagtccttttaccggaagaagcttaaggaggtgtggaaacctgccgtgcggtctggcggatctggcggaggctcctagccagggcctggtgaccttcggcgacgtggccgtggtgttcagccaggaggagtgggagtggctgagcagcgagcagaggagcctgtactggaaggtgatgctggacaactacaggaacctggccagcctgggcctgtgcgccagcaagcccgacatgatcaccagcctggagcagggcagggacccctggatgatgaagaggaagatgaggaagggccagaggctggacctgaaggccatgggatctggctccggcagcggccccaagaaaaagagaaaagtctaagctgccttctgcggggcttgccttctggccatgcccttcttctctcccttgcacctgtacctcttggtctttgaataaagcctgagtaggaaggctagcaaaaaaaaaaaaaaaaaaaaaaaaaaaaaaaaaaaaaaaaaaaaaaaaaaaaaaaaaaaaaaaaaaaaaaaaaaaaaaaa

SEQ ID NO: 16814 - RNA, 9485 nt, synthetic construct
  source 1..9485: mol_type = other RNA
aggaaataagagagaaaagaagagtaagaagaaatataagagccaccatggcccctaagaagaagcgtaaagtgagccggatggaacgcctcgtctacgaggtgcggcagaagtgcagaaacatcgaggacatctgcatctcctgcggatctctgaacgtgaccctggagcacccactgttcatcggcggcatgtgccagaactgtaaaaactgttttctggagtgtgcctatcaatacgacgatgacggctaccagagctactgcaccatctgttgcggcggaagagaggtgctgatgtgtggaaataacaactgctgccggtgcttctgcgtggaatgcgtggacctgctggtgggccccggcgccgcccaggccgctattaaggaagatccttggaactgctacatgtgcggccacaagggcacatacggcctgctgagacggagagaggactggcctagcagactgcagatgttcttcgccaataaccacgaccaggagttcgacccccctaaggtgtaccctcccgtccccgccgagaagagaaagcccatccgggtcctgagcctgttcgatggcatcgccaccggtctgctggtgctgaaggacctgggcatccaggtggataggtacattgcctccgaggtgtgcgaggactccatcaccgtgggaatggtgcgtcatcagggcaagatcatgtacgtgggcgacgtgcggagcgtgacacagaagcatatccaggagtggggccctttcgacctggtgatcggcggcagcccttgcaatgacctgagcatcgtgaacccagcccggaagggcctgtacgagggaaccggcagactgttcttcgagttttacagactgctgcacgacgcccggcctaaggaaggcgacgaccggcccttcttttggctgttcgagaatgtggtggccatgggagtcagcgacaagcgggatattagccggttcctggagagcaaccccgtgatgatcgatgccaaggaagtgagcgccgcccaccgggccagatacttctggggcaatctgcctggcatgaacagacccctggccagcaccgtgaacgacaagctggagctgcaggagtgcctggagcacggccggatcgccaagttcagcaaggtgagaaccatcaccacccgaagcaacagcatcaaacaaggcaaggaccagcactttcctgtgttcatgaacgagaaggaggacatcctgtggtgtaccgagatggagagagtgttcgggttcccagtccactacacagatgtcagcaacatgtctagactggccagacagagactgctgggaagaagctggtccgtccctgtgatcagacacctgttcgcccctctgaaggagtacttcgcctgcgtgagcagcggcaacagcaacgccaacagccggggccccagcttctctagcggcctggtgccactgtccctgagagggagccacatgggccccatggagatctacaaaaccgtgagcgcctggaagcggcagcctgtgcgcgtgctgagcctgtttcggaatatcgataaagtcctgaaaagcctgggattcctggagagcggctctggctccggcggtggcaccctgaagtacgtggaggatgtgacaaacgtggtcagacgggatgtggagaagtggggccccttcgatctggtgtacggcagcacccaacccctgggcagctcttgtgaccggtgccctggctggtacatgtttcagttccaccggatcctgcagtacgccctgccgagacaggagtcccagcggccattcttttggattttcatggacaacttgctgctgaccgaggatgaccaggaaactaccactcggttcctgcagaccgaagccgtgaccctgcaggacgtgagaggccgggactaccagaacgccatgcgggtgtggtccaacatccctggactgaaaagcaagcacgcacctctgacccctaaagaagaggagtacctgcaggcccaggtgcggagcagaagcaagctggacgcccctaaggtggatctgctggtgaagaattgcctcctgcccctgagagagtacttcaagtatttcagccagaatagtctgcccctgggaggcagcggcggcggcgccctggtgacatttgaggacgtcgccgtgcggttcacccaggaggaatgggctctgctggatccttctcagaaaatcctgtaccgggacgtgatgagagagacataccggaatctgacctccgtgggcatcaactgggaatgttgggaccttgaagcctgcttcagaagcctgggaagaaacctgagagtgcaggtggtgaagagaaagtgcgagctgaccaacagcggcccctgcgccgagggcggcccaagcagcggcgcccctcctcccagcggcggcagcccagccggctccccaacctctaccgaggagggcacctctgagtccgccacccccgagagcggccctggcacctccaccgagcccagcgagggcagcgcacccggcagccctgccggcagccccacctccacagaggagggaaccagcaccgagcccagcgaaggcagcgccccaggcaccagcaccgagcctagtgagcaggagattaaacggatcaacaagatcagaagaagacttgtgaaagacagcaacaccaagaaggccggcaagacaggccccatgaaaaccctgctggttagagtgatgacacccgatctgagagagcggctggaaaacctgagaaagaagcctgaaaatatcccccagcccatcagcaatacatctagagccaacctgaataagctgctgaccgattacaccgaaatgaagaaggcgatcctgcatgtgtactgggaagagttccagaaggaccctgtgggcctgatgagccgggtggcccagcctgccagcaagaagatcgatcagaacaagctgaaacctgagatggacgagaagggcaacctgaccaccgccggctttgcctgctctcagtgtggccagcccctgttcgtgtacaagctggagcaggtgtctgagaagggcaaggcttacaccaactacttcggacggtgcaatgtggccgagcacgaaaagctgatcctgctggcccagctgaagcccgagaaggatagcgacgaagccgtgacatatagcctgggaaagtttgggcagagggccctggatttctacagcattcatgtgaccaaggagtccacccaccccgtgaagcccctggcccagatcgccggaaacagatacgcctccggacctgtgggaaaggccctgagcgacgcatgtatgggcacaatcgcctccttcctgtctaagtaccaggacatcatcatcgaacaccagaaggtggtgaagggcaaccagaagagactggagagcctgcgggagctggccggcaaggaaaacctggaataccctagcgtgaccctgccacctcagcctcacaccaaggagggcgttgatgcctacaacgaagtgatcgcccgggtgcgaatgtgggtgaacctgaacctgtggcagaagctgaagctaagcagagatgatgccaagcctctgctgagactgaagggattcccttcctttcctctggtcgagagacaggccaacgaagtggactggtgggacatggtgtgtaacgtgaagaagctgatcaacgagaaaaaggaggatggcaaggtgttttggcagaatctggctggctacaagagacaggaagccctgagaccatacctgagcagcgaggaagatcggaagaagggaaagaaattcgctcggtaccagctgggcgacctgctgctgcacctggaaaagaagcacggcgaggactggggaaaggtgtacgacgaggcctgggagcggattgacaagaaagtggaaggcctgagcaagcacatcaagctggaagaggaacggagaagcgaggacgcccagagcaaggccgccctgaccgactggctgcgggctaaggccagcttcgtgatcgagggcctgaaggaggccgacaaggacgagttctgcagatgcgagctgaagctgcagaagtggtacggggacctgcggggaaagcccttcgccatcgaagccgagaacagcatcctggacatcagcggcttcagcaagcagtacaactgtgccttcatctggcagaaggacggcgtgaagaagctgaacctgtacctgatcatcaactacttcaagggcggcaagctgcggttcaagaagatcaaacctgaagccttcgaagccaacagattctacaccgtgatcaacaaaaagagcggcgagatcgtgcccatggaggtgaacttcaacttcgacgaccccaacctgatcatcctgcctctggcctttggcaagagacagggcagagaattcatctggaacgacctgctgtccctggaaaccggcagcctgaagctggccaacggaagagtgatcgagaagacactgtacaacagaagaacccggcaggatgagcctgccctgttcgtggccctgaccttcgagcggcgggaggtcctggactcctccaatatcaaaccaatgaacctgatcggcgtggcaagaggcgaaaacatccccgccgtgatcgccctgaccgaccccgagggctgcccactgagccggtttaaggatagcctgggaaacccaacccacatcctgagaatcggcgagagctataaggagaagcagcggaccatccaggccaagaaggaggtggagcagcggagagccggcggctacagccggaagtacgccagcaaagccaagaatctggcagacgatatggtgagaaacaccgctagagatctgctgtactacgccgtgacccaggatgccatgctgatcttcgccaacctgagccggggcttcggccggcagggcaagcggaccttcatggccgagagacagtacacacggatggaggactggctgaccgccaagctggcctacgagggcctgagcaagacctacctgtccaagacactggcccagtacacctccaagacatgcagcaactgtgggtttaccatcaccagcgccgactacgacagggtgctggagaagctgaagaagacagcaacaggctggatgaccacaattaacggcaaggagctgaaggtggagggccagattacctactacaacagatacaagagacagaacgtagtcaaggacctgtccgtcgagctggatagactgagcgaagaatctgtgaacaacgacatctcctcctggacaaagggcagaagcggagaagctctgagcctcctgaagaaaagattctcccatagacccgtgcaggagaagttcgtgtgcctgaactgcggcttcgagacacacgcagccgagcaagccgccctgaacatcgccagatcctggctgttcctgcggagccaggagtacaagaaataccagacaaacaagacaaccggcaacaccgataagagagccttcgtcgagacctggcagtccttttaccggaagaagcttaaggaggtgtggaaacctgccgtgcggtctggcggatctggcggaggctccaggcccgagctggtgaccttcgaggacgtggccgtgtacttcagcgagaacgagtggaccagcctggcccccacccagagggtgctgtacagggacgtgatgctggagaactacggcgccgtggccagcctggccgtgcccttccccaagcccgccctgatcagccagctggagaggggcgaggccccctggtgcaaggccccccagggcgccctggacggcgagggccccaggggcatcagcggcggcccaagcagcggcgcccctcctcccagcggcggcagcccagccggctccccaacctctaccgaggagggcacctctgagtccgccacccccgagagcggccctggcacctccaccgagcccagcgagggcagcgcacccggcagccctgccggcagccccacctccacagaggagggaaccagcaccgagcccagcgaaggcagcgccccaggcaccagcaccgagcctagtgagcaggagattaaacggatcaacaagatcagaagaagacttgtgaaagacagcaacaccaagaaggccggcaagacaggccccatgaaaaccctgctggttagagtgatgacacccgatctgagagagcggctggaaaacctgagaaagaagcctgaaaatatcccccagcccatcagcaatacatctagagccaacctgaataagctgctgaccgattacaccgaaatgaagaaggcgatcctgcatgtgtactgggaagagttccagaaggaccctgtgggcctgatgagccgggtggcccagcctgccagcaagaagatcgatcagaacaagctgaaacctgagatggacgagaagggcaacctgaccaccgccggctttgcctgctctcagtgtggccagcccctgttcgtgtacaagctggagcaggtgtctgagaagggcaaggcttacaccaactacttcggacggtgcaatgtggccgagcacgaaaagctgatcctgctggcccagctgaagcccgagaaggatagcgacgaagccgtgacatatagcctgggaaagtttgggcagagggccctggatttctacagcattcatgtgaccaaggagtccacccaccccgtgaagcccctggcccagatcgccggaaacagatacgcctccggacctgtgggaaaggccctgagcgacgcatgtatgggcacaatcgcctccttcctgtctaagtaccaggacatcatcatcgaacaccagaaggtggtgaagggcaaccagaagagactggagagcctgcgggagctggccggcaaggaaaacctggaataccctagcgtgaccctgccacctcagcctcacaccaaggagggcgttgatgcctacaacgaagtgatcgcccgggtgcgaatgtgggtgaacctgaacctgtggcagaagctgaagctaagcagagatgatgccaagcctctgctgagactgaagggattcccttcctttcctctggtcgagagacaggccaacgaagtggactggtgggacatggtgtgtaacgtgaagaagctgatcaacgagaaaaaggaggatggcaaggtgttttggcagaatctggctggctacaagagacaggaagccctgagaccatacctgagcagcgaggaagatcggaagaagggaaagaaattcgctcggtaccagctgggcgacctgctgctgcacctggaaaagaagcacggcgaggactggggaaaggtgtacgacgaggcctgggagcggattgacaagaaagtggaaggcctgagcaagcacatcaagctggaagaggaacggagaagcgaggacgcccagagcaaggccgccctgaccgactggctgcgggctaaggccagcttcgtgatcgagggcctgaaggaggccgacaaggacgagttctgcagatgcgagctgaagctgcagaagtggtacggggacctgcggggaaagcccttcgccatcgaagccgagaacagcatcctggacatcagcggcttcagcaagcagtacaactgtgccttcatctggcagaaggacggcgtgaagaagctgaacctgtacctgatcatcaactacttcaagggcggcaagctgcggttcaagaagatcaaacctgaagccttcgaagccaacagattctacaccgtgatcaacaaaaagagcggcgagatcgtgcccatggaggtgaacttcaacttcgacgaccccaacctgatcatcctgcctctggcctttggcaagagacagggcagagaattcatctggaacgacctgctgtccctggaaaccggcagcctgaagctggccaacggaagagtgatcgagaagacactgtacaacagaagaacccggcaggatgagcctgccctgttcgtggccctgaccttcgagcggcgggaggtcctggactcctccaatatcaaaccaatgaacctgatcggcgtggcaagaggcgaaaacatccccgccgtgatcgccctgaccgaccccgagggctgcccactgagccggtttaaggatagcctgggaaacccaacccacatcctgagaatcggcgagagctataaggagaagcagcggaccatccaggccaagaaggaggtggagcagcggagagccggcggctacagccggaagtacgccagcaaagccaagaatctggcagacgatatggtgagaaacaccgctagagatctgctgtactacgccgtgacccaggatgccatgctgatcttcgccaacctgagccggggcttcggccggcagggcaagcggaccttcatggccgagagacagtacacacggatggaggactggctgaccgccaagctggcctacgagggcctgagcaagacctacctgtccaagacactggcccagtacacctccaagacatgcagcaactgtgggtttaccatcaccagcgccgactacgacagggtgctggagaagctgaagaagacagcaacaggctggatgaccacaattaacggcaaggagctgaaggtggagggccagattacctactacaacagatacaagagacagaacgtagtcaaggacctgtccgtcgagctggatagactgagcgaagaatctgtgaacaacgacatctcctcctggacaaagggcagaagcggagaagctctgagcctcctgaagaaaagattctcccatagacccgtgcaggagaagttcgtgtgcctgaactgcggcttcgagacacacgcagccgagcaagccgccctgaacatcgccagatcctggctgttcctgcggagccaggagtacaagaaataccagacaaacaagacaaccggcaacaccgataagagagccttcgtcgagacctggcagtccttttaccggaagaagcttaaggaggtgtggaaacctgccgtgcggtctggcggatctggcggaggctcctaggcccgagctggtgaccttcgaggacgtggccgtgtacttcagcgagaacgagtggaccagcctggcccccacccagagggtgctgtacagggacgtgatgctggagaactacggcgccgtggccagcctggccgtgcccttccccaagcccgccctgatcagccagctggagaggggcgaggccccctggtgcaaggccccccagggcgccctggacggcgagggccccaggggcatcagcggatctggctccggcagcggccccaagaaaaagagaaaagtctaagctgccttctgcggggcttgccttctggccatgcccttcttctctcccttgcacctgtacctcttggtctttgaataaagcctgagtaggaaggctagcaaaaaaaaaaaaaaaaaaaaaaaaaaaaaaaaaaaaaaaaaaaaaaaaaaaaaaaaaaaaaaaaaaaaaaaaaaaaaaaa

SEQ ID NO: 16815 - RNA, 9485 nt, synthetic construct
  source 1..9485: mol_type = other RNA
aggaaataagagagaaaagaagagtaagaagaaatataagagccaccatggcccctaagaagaagcgtaaagtgagccggatggaacgcctcgtctacgaggtgcggcagaagtgcagaaacatcgaggacatctgcatctcctgcggatctctgaacgtgaccctggagcacccactgttcatcggcggcatgtgccagaactgtaaaaactgttttctggagtgtgcctatcaatacgacgatgacggctaccagagctactgcaccatctgttgcggcggaagagaggtgctgatgtgtggaaataacaactgctgccggtgcttctgcgtggaatgcgtggacctgctggtgggccccggcgccgcccaggccgctattaaggaagatccttggaactgctacatgtgcggccacaagggcacatacggcctgctgagacggagagaggactggcctagcagactgcagatgttcttcgccaataaccacgaccaggagttcgacccccctaaggtgtaccctcccgtccccgccgagaagagaaagcccatccgggtcctgagcctgttcgatggcatcgccaccggtctgctggtgctgaaggacctgggcatccaggtggataggtacattgcctccgaggtgtgcgaggactccatcaccgtgggaatggtgcgtcatcagggcaagatcatgtacgtgggcgacgtgcggagcgtgacacagaagcatatccaggagtggggccctttcgacctggtgatcggcggcagcccttgcaatgacctgagcatcgtgaacccagcccggaagggcctgtacgagggaaccggcagactgttcttcgagttttacagactgctgcacgacgcccggcctaaggaaggcgacgaccggcccttcttttggctgttcgagaatgtggtggccatgggagtcagcgacaagcgggatattagccggttcctggagagcaaccccgtgatgatcgatgccaaggaagtgagcgccgcccaccgggccagatacttctggggcaatctgcctggcatgaacagacccctggccagcaccgtgaacgacaagctggagctgcaggagtgcctggagcacggccggatcgccaagttcagcaaggtgagaaccatcaccacccgaagcaacagcatcaaacaaggcaaggaccagcactttcctgtgttcatgaacgagaaggaggacatcctgtggtgtaccgagatggagagagtgttcgggttcccagtccactacacagatgtcagcaacatgtctagactggccagacagagactgctgggaagaagctggtccgtccctgtgatcagacacctgttcgcccctctgaaggagtacttcgcctgcgtgagcagcggcaacagcaacgccaacagccggggccccagcttctctagcggcctggtgccactgtccctgagagggagccacatgggccccatggagatctacaaaaccgtgagcgcctggaagcggcagcctgtgcgcgtgctgagcctgtttcggaatatcgataaagtcctgaaaagcctgggattcctggagagcggctctggctccggcggtggcaccctgaagtacgtggaggatgtgacaaacgtggtcagacgggatgtggagaagtggggccccttcgatctggtgtacggcagcacccaacccctgggcagctcttgtgaccggtgccctggctggtacatgtttcagttccaccggatcctgcagtacgccctgccgagacaggagtcccagcggccattcttttggattttcatggacaacttgctgctgaccgaggatgaccaggaaactaccactcggttcctgcagaccgaagccgtgaccctgcaggacgtgagaggccgggactaccagaacgccatgcgggtgtggtccaacatccctggactgaaaagcaagcacgcacctctgacccctaaagaagaggagtacctgcaggcccaggtgcggagcagaagcaagctggacgcccctaaggtggatctgctggtgaagaattgcctcctgcccctgagagagtacttcaagtatttcagccagaatagtctgcccctgggaggcagcggcggcggcgccctggtgacatttgaggacgtcgccgtgcggttcacccaggaggaatgggctctgctggatccttctcagaaaatcctgtaccgggacgtgatgagagagacataccggaatctgacctccgtgggcatcaactgggaatgttgggaccttgaagcctgcttcagaagcctgggaagaaacctgagagtgcaggtggtgaagagaaagtgcgagctgaccaacagcggcccctgcgccgagggcggcccaagcagcggcgcccctcctcccagcggcggcagcccagccggctccccaacctctaccgaggagggcacctctgagtccgccacccccgagagcggccctggcacctccaccgagcccagcgagggcagcgcacccggcagccctgccggcagccccacctccacagaggagggaaccagcaccgagcccagcgaaggcagcgccccaggcaccagcaccgagcctagtgagcaggagattaaacggatcaacaagatcagaagaagacttgtgaaagacagcaacaccaagaaggccggcaagacaggccccatgaaaaccctgctggttagagtgatgacacccgatctgagagagcggctggaaaacctgagaaagaagcctgaaaatatcccccagcccatcagcaatacatctagagccaacctgaataagctgctgaccgattacaccgaaatgaagaaggcgatcctgcatgtgtactgggaagagttccagaaggaccctgtgggcctgatgagccgggtggcccagcctgccagcaagaagatcgatcagaacaagctgaaacctgagatggacgagaagggcaacctgaccaccgccggctttgcctgctctcagtgtggccagcccctgttcgtgtacaagctggagcaggtgtctgagaagggcaaggcttacaccaactacttcggacggtgcaatgtggccgagcacgaaaagctgatcctgctggcccagctgaagcccgagaaggatagcgacgaagccgtgacatatagcctgggaaagtttgggcagagggccctggatttctacagcattcatgtgaccaaggagtccacccaccccgtgaagcccctggcccagatcgccggaaacagatacgcctccggacctgtgggaaaggccctgagcgacgcatgtatgggcacaatcgcctccttcctgtctaagtaccaggacatcatcatcgaacaccagaaggtggtgaagggcaaccagaagagactggagagcctgcgggagctggccggcaaggaaaacctggaataccctagcgtgaccctgccacctcagcctcacaccaaggagggcgttgatgcctacaacgaagtgatcgcccgggtgcgaatgtgggtgaacctgaacctgtggcagaagctgaagctaagcagagatgatgccaagcctctgctgagactgaagggattcccttcctttcctctggtcgagagacaggccaacgaagtggactggtgggacatggtgtgtaacgtgaagaagctgatcaacgagaaaaaggaggatggcaaggtgttttggcagaatctggctggctacaagagacaggaagccctgagaccatacctgagcagcgaggaagatcggaagaagggaaagaaattcgctcggtaccagctgggcgacctgctgctgcacctggaaaagaagcacggcgaggactggggaaaggtgtacgacgaggcctgggagcggattgacaagaaagtggaaggcctgagcaagcacatcaagctggaagaggaacggagaagcgaggacgcccagagcaaggccgccctgaccgactggctgcgggctaaggccagcttcgtgatcgagggcctgaaggaggccgacaaggacgagttctgcagatgcgagctgaagctgcagaagtggtacggggacctgcggggaaagcccttcgccatcgaagccgagaacagcatcctggacatcagcggcttcagcaagcagtacaactgtgccttcatctggcagaaggacggcgtgaagaagctgaacctgtacctgatcatcaactacttcaagggcggcaagctgcggttcaagaagatcaaacctgaagccttcgaagccaacagattctacaccgtgatcaacaaaaagagcggcgagatcgtgcccatggaggtgaacttcaacttcgacgaccccaacctgatcatcctgcctctggcctttggcaagagacagggcagagaattcatctggaacgacctgctgtccctggaaaccggcagcctgaagctggccaacggaagagtgatcgagaagacactgtacaacagaagaacccggcaggatgagcctgccctgttcgtggccctgaccttcgagcggcgggaggtcctggactcctccaatatcaaaccaatgaacctgatcggcgtggcaagaggcgaaaacatccccgccgtgatcgccctgaccgaccccgagggctgcccactgagccggtttaaggatagcctgggaaacccaacccacatcctgagaatcggcgagagctataaggagaagcagcggaccatccaggccaagaaggaggtggagcagcggagagccggcggctacagccggaagtacgccagcaaagccaagaatctggcagacgatatggtgagaaacaccgctagagatctgctgtactacgccgtgacccaggatgccatgctgatcttcgccaacctgagccggggcttcggccggcagggcaagcggaccttcatggccgagagacagtacacacggatggaggactggctgaccgccaagctggcctacgagggcctgagcaagacctacctgtccaagacactggcccagtacacctccaagacatgcagcaactgtgggtttaccatcaccagcgccgactacgacagggtgctggagaagctgaagaagacagcaacaggctggatgaccacaattaacggcaaggagctgaaggtggagggccagattacctactacaacagatacaagagacagaacgtagtcaaggacctgtccgtcgagctggatagactgagcgaagaatctgtgaacaacgacatctcctcctggacaaagggcagaagcggagaagctctgagcctcctgaagaaaagattctcccatagacccgtgcaggagaagttcgtgtgcctgaactgcggcttcgagacacacgcagccgagcaagccgccctgaacatcgccagatcctggctgttcctgcggagccaggagtacaagaaataccagacaaacaagacaaccggcaacaccgataagagagccttcgtcgagacctggcagtccttttaccggaagaagcttaaggaggtgtggaaacctgccgtgcggtctggcggatctggcggaggctccttccagggcagcgtgaccttcgaggacgtggccatcgccttcagccagcaggagtgggagagcctggacagcagccagaggggcctgtacagggacgtgatgctggagaactacaggaacctggtgagcatggccggccacagcctgagcaagccccacgtgatcgccctgctggagaggtggaaggagcccaaggtgaccgagaggaaggacggcaggaggtggtgcaccgacctgcagctgggcggcccaagcagcggcgcccctcctcccagcggcggcagcccagccggctccccaacctctaccgaggagggcacctctgagtccgccacccccgagagcggccctggcacctccaccgagcccagcgagggcagcgcacccggcagccctgccggcagccccacctccacagaggagggaaccagcaccgagcccagcgaaggcagcgccccaggcaccagcaccgagcctagtgagcaggagattaaacggatcaacaagatcagaagaagacttgtgaaagacagcaacaccaagaaggccggcaagacaggccccatgaaaaccctgctggttagagtgatgacacccgatctgagagagcggctggaaaacctgagaaagaagcctgaaaatatcccccagcccatcagcaatacatctagagccaacctgaataagctgctgaccgattacaccgaaatgaagaaggcgatcctgcatgtgtactgggaagagttccagaaggaccctgtgggcctgatgagccgggtggcccagcctgccagcaagaagatcgatcagaacaagctgaaacctgagatggacgagaagggcaacctgaccaccgccggctttgcctgctctcagtgtggccagcccctgttcgtgtacaagctggagcaggtgtctgagaagggcaaggcttacaccaactacttcggacggtgcaatgtggccgagcacgaaaagctgatcctgctggcccagctgaagcccgagaaggatagcgacgaagccgtgacatatagcctgggaaagtttgggcagagggccctggatttctacagcattcatgtgaccaaggagtccacccaccccgtgaagcccctggcccagatcgccggaaacagatacgcctccggacctgtgggaaaggccctgagcgacgcatgtatgggcacaatcgcctccttcctgtctaagtaccaggacatcatcatcgaacaccagaaggtggtgaagggcaaccagaagagactggagagcctgcgggagctggccggcaaggaaaacctggaataccctagcgtgaccctgccacctcagcctcacaccaaggagggcgttgatgcctacaacgaagtgatcgcccgggtgcgaatgtgggtgaacctgaacctgtggcagaagctgaagctaagcagagatgatgccaagcctctgctgagactgaagggattcccttcctttcctctggtcgagagacaggccaacgaagtggactggtgggacatggtgtgtaacgtgaagaagctgatcaacgagaaaaaggaggatggcaaggtgttttggcagaatctggctggctacaagagacaggaagccctgagaccatacctgagcagcgaggaagatcggaagaagggaaagaaattcgctcggtaccagctgggcgacctgctgctgcacctggaaaagaagcacggcgaggactggggaaaggtgtacgacgaggcctgggagcggattgacaagaaagtggaaggcctgagcaagcacatcaagctggaagaggaacggagaagcgaggacgcccagagcaaggccgccctgaccgactggctgcgggctaaggccagcttcgtgatcgagggcctgaaggaggccgacaaggacgagttctgcagatgcgagctgaagctgcagaagtggtacggggacctgcggggaaagcccttcgccatcgaagccgagaacagcatcctggacatcagcggcttcagcaagcagtacaactgtgccttcatctggcagaaggacggcgtgaagaagctgaacctgtacctgatcatcaactacttcaagggcggcaagctgcggttcaagaagatcaaacctgaagccttcgaagccaacagattctacaccgtgatcaacaaaaagagcggcgagatcgtgcccatggaggtgaacttcaacttcgacgaccccaacctgatcatcctgcctctggcctttggcaagagacagggcagagaattcatctggaacgacctgctgtccctggaaaccggcagcctgaagctggccaacggaagagtgatcgagaagacactgtacaacagaagaacccggcaggatgagcctgccctgttcgtggccctgaccttcgagcggcgggaggtcctggactcctccaatatcaaaccaatgaacctgatcggcgtggcaagaggcgaaaacatccccgccgtgatcgccctgaccgaccccgagggctgcccactgagccggtttaaggatagcctgggaaacccaacccacatcctgagaatcggcgagagctataaggagaagcagcggaccatccaggccaagaaggaggtggagcagcggagagccggcggctacagccggaagtacgccagcaaagccaagaatctggcagacgatatggtgagaaacaccgctagagatctgctgtactacgccgtgacccaggatgccatgctgatcttcgccaacctgagccggggcttcggccggcagggcaagcggaccttcatggccgagagacagtacacacggatggaggactggctgaccgccaagctggcctacgagggcctgagcaagacctacctgtccaagacactggcccagtacacctccaagacatgcagcaactgtgggtttaccatcaccagcgccgactacgacagggtgctggagaagctgaagaagacagcaacaggctggatgaccacaattaacggcaaggagctgaaggtggagggccagattacctactacaacagatacaagagacagaacgtagtcaaggacctgtccgtcgagctggatagactgagcgaagaatctgtgaacaacgacatctcctcctggacaaagggcagaagcggagaagctctgagcctcctgaagaaaagattctcccatagacccgtgcaggagaagttcgtgtgcctgaactgcggcttcgagacacacgcagccgagcaagccgccctgaacatcgccagatcctggctgttcctgcggagccaggagtacaagaaataccagacaaacaagacaaccggcaacaccgataagagagccttcgtcgagacctggcagtccttttaccggaagaagcttaaggaggtgtggaaacctgccgtgcggtctggcggatctggcggaggctcctttccagggcagcgtgaccttcgaggacgtggccatcgccttcagccagcaggagtgggagagcctggacagcagccagaggggcctgtacagggacgtgatgctggagaactacaggaacctggtgagcatggccggccacagcctgagcaagccccacgtgatcgccctgctggagaggtggaaggagcccaaggtgaccgagaggaaggacggcaggaggtggtgcaccgacctgcagctgggatctggctccggcagcggccccaagaaaaagagaaaagtctaagctgccttctgcggggcttgccttctggccatgcccttcttctctcccttgcacctgtacctcttggtctttgaataaagcctgagtaggaaggctagcaaaaaaaaaaaaaaaaaaaaaaaaaaaaaaaaaaaaaaaaaaaaaaaaaaaaaaaaaaaaaaaaaaaaaaaaaaaaaaaa

SEQ ID NO: 16816 - RNA, 9485 nt, synthetic construct
  source 1..9485: mol_type = other RNA
aggaaataagagagaaaagaagagtaagaagaaatataagagccaccatggcccctaagaagaagcgtaaagtgagccggatggaacgcctcgtctacgaggtgcggcagaagtgcagaaacatcgaggacatctgcatctcctgcggatctctgaacgtgaccctggagcacccactgttcatcggcggcatgtgccagaactgtaaaaactgttttctggagtgtgcctatcaatacgacgatgacggctaccagagctactgcaccatctgttgcggcggaagagaggtgctgatgtgtggaaataacaactgctgccggtgcttctgcgtggaatgcgtggacctgctggtgggccccggcgccgcccaggccgctattaaggaagatccttggaactgctacatgtgcggccacaagggcacatacggcctgctgagacggagagaggactggcctagcagactgcagatgttcttcgccaataaccacgaccaggagttcgacccccctaaggtgtaccctcccgtccccgccgagaagagaaagcccatccgggtcctgagcctgttcgatggcatcgccaccggtctgctggtgctgaaggacctgggcatccaggtggataggtacattgcctccgaggtgtgcgaggactccatcaccgtgggaatggtgcgtcatcagggcaagatcatgtacgtgggcgacgtgcggagcgtgacacagaagcatatccaggagtggggccctttcgacctggtgatcggcggcagcccttgcaatgacctgagcatcgtgaacccagcccggaagggcctgtacgagggaaccggcagactgttcttcgagttttacagactgctgcacgacgcccggcctaaggaaggcgacgaccggcccttcttttggctgttcgagaatgtggtggccatgggagtcagcgacaagcgggatattagccggttcctggagagcaaccccgtgatgatcgatgccaaggaagtgagcgccgcccaccgggccagatacttctggggcaatctgcctggcatgaacagacccctggccagcaccgtgaacgacaagctggagctgcaggagtgcctggagcacggccggatcgccaagttcagcaaggtgagaaccatcaccacccgaagcaacagcatcaaacaaggcaaggaccagcactttcctgtgttcatgaacgagaaggaggacatcctgtggtgtaccgagatggagagagtgttcgggttcccagtccactacacagatgtcagcaacatgtctagactggccagacagagactgctgggaagaagctggtccgtccctgtgatcagacacctgttcgcccctctgaaggagtacttcgcctgcgtgagcagcggcaacagcaacgccaacagccggggccccagcttctctagcggcctggtgccactgtccctgagagggagccacatgggccccatggagatctacaaaaccgtgagcgcctggaagcggcagcctgtgcgcgtgctgagcctgtttcggaatatcgataaagtcctgaaaagcctgggattcctggagagcggctctggctccggcggtggcaccctgaagtacgtggaggatgtgacaaacgtggtcagacgggatgtggagaagtggggccccttcgatctggtgtacggcagcacccaacccctgggcagctcttgtgaccggtgccctggctggtacatgtttcagttccaccggatcctgcagtacgccctgccgagacaggagtcccagcggccattcttttggattttcatggacaacttgctgctgaccgaggatgaccaggaaactaccactcggttcctgcagaccgaagccgtgaccctgcaggacgtgagaggccgggactaccagaacgccatgcgggtgtggtccaacatccctggactgaaaagcaagcacgcacctctgacccctaaagaagaggagtacctgcaggcccaggtgcggagcagaagcaagctggacgcccctaaggtggatctgctggtgaagaattgcctcctgcccctgagagagtacttcaagtatttcagccagaatagtctgcccctgggaggcagcggcggcggcgccctggtgacatttgaggacgtcgccgtgcggttcacccaggaggaatgggctctgctggatccttctcagaaaatcctgtaccgggacgtgatgagagagacataccggaatctgacctccgtgggcatcaactgggaatgttgggaccttgaagcctgcttcagaagcctgggaagaaacctgagagtgcaggtggtgaagagaaagtgcgagctgaccaacagcggcccctgcgccgagggcggcccaagcagcggcgcccctcctcccagcggcggcagcccagccggctccccaacctctaccgaggagggcacctctgagtccgccacccccgagagcggccctggcacctccaccgagcccagcgagggcagcgcacccggcagccctgccggcagccccacctccacagaggagggaaccagcaccgagcccagcgaaggcagcgccccaggcaccagcaccgagcctagtgagcaggagattaaacggatcaacaagatcagaagaagacttgtgaaagacagcaacaccaagaaggccggcaagacaggccccatgaaaaccctgctggttagagtgatgacacccgatctgagagagcggctggaaaacctgagaaagaagcctgaaaatatcccccagcccatcagcaatacatctagagccaacctgaataagctgctgaccgattacaccgaaatgaagaaggcgatcctgcatgtgtactgggaagagttccagaaggaccctgtgggcctgatgagccgggtggcccagcctgccagcaagaagatcgatcagaacaagctgaaacctgagatggacgagaagggcaacctgaccaccgccggctttgcctgctctcagtgtggccagcccctgttcgtgtacaagctggagcaggtgtctgagaagggcaaggcttacaccaactacttcggacggtgcaatgtggccgagcacgaaaagctgatcctgctggcccagctgaagcccgagaaggatagcgacgaagccgtgacatatagcctgggaaagtttgggcagagggccctggatttctacagcattcatgtgaccaaggagtccacccaccccgtgaagcccctggcccagatcgccggaaacagatacgcctccggacctgtgggaaaggccctgagcgacgcatgtatgggcacaatcgcctccttcctgtctaagtaccaggacatcatcatcgaacaccagaaggtggtgaagggcaaccagaagagactggagagcctgcgggagctggccggcaaggaaaacctggaataccctagcgtgaccctgccacctcagcctcacaccaaggagggcgttgatgcctacaacgaagtgatcgcccgggtgcgaatgtgggtgaacctgaacctgtggcagaagctgaagctaagcagagatgatgccaagcctctgctgagactgaagggattcccttcctttcctctggtcgagagacaggccaacgaagtggactggtgggacatggtgtgtaacgtgaagaagctgatcaacgagaaaaaggaggatggcaaggtgttttggcagaatctggctggctacaagagacaggaagccctgagaccatacctgagcagcgaggaagatcggaagaagggaaagaaattcgctcggtaccagctgggcgacctgctgctgcacctggaaaagaagcacggcgaggactggggaaaggtgtacgacgaggcctgggagcggattgacaagaaagtggaaggcctgagcaagcacatcaagctggaagaggaacggagaagcgaggacgcccagagcaaggccgccctgaccgactggctgcgggctaaggccagcttcgtgatcgagggcctgaaggaggccgacaaggacgagttctgcagatgcgagctgaagctgcagaagtggtacggggacctgcggggaaagcccttcgccatcgaagccgagaacagcatcctggacatcagcggcttcagcaagcagtacaactgtgccttcatctggcagaaggacggcgtgaagaagctgaacctgtacctgatcatcaactacttcaagggcggcaagctgcggttcaagaagatcaaacctgaagccttcgaagccaacagattctacaccgtgatcaacaaaaagagcggcgagatcgtgcccatggaggtgaacttcaacttcgacgaccccaacctgatcatcctgcctctggcctttggcaagagacagggcagagaattcatctggaacgacctgctgtccctggaaaccggcagcctgaagctggccaacggaagagtgatcgagaagacactgtacaacagaagaacccggcaggatgagcctgccctgttcgtggccctgaccttcgagcggcgggaggtcctggactcctccaatatcaaaccaatgaacctgatcggcgtggcaagaggcgaaaacatccccgccgtgatcgccctgaccgaccccgagggctgcccactgagccggtttaaggatagcctgggaaacccaacccacatcctgagaatcggcgagagctataaggagaagcagcggaccatccaggccaagaaggaggtggagcagcggagagccggcggctacagccggaagtacgccagcaaagccaagaatctggcagacgatatggtgagaaacaccgctagagatctgctgtactacgccgtgacccaggatgccatgctgatcttcgccaacctgagccggggcttcggccggcagggcaagcggaccttcatggccgagagacagtacacacggatggaggactggctgaccgccaagctggcctacgagggcctgagcaagacctacctgtccaagacactggcccagtacacctccaagacatgcagcaactgtgggtttaccatcaccagcgccgactacgacagggtgctggagaagctgaagaagacagcaacaggctggatgaccacaattaacggcaaggagctgaaggtggagggccagattacctactacaacagatacaagagacagaacgtagtcaaggacctgtccgtcgagctggatagactgagcgaagaatctgtgaacaacgacatctcctcctggacaaagggcagaagcggagaagctctgagcctcctgaagaaaagattctcccatagacccgtgcaggagaagttcgtgtgcctgaactgcggcttcgagacacacgcagccgagcaagccgccctgaacatcgccagatcctggctgttcctgcggagccaggagtacaagaaataccagacaaacaagacaaccggcaacaccgataagagagccttcgtcgagacctggcagtccttttaccggaagaagcttaaggaggtgtggaaacctgccgtgcggtctggcggatctggcggaggctccagcctggagagcgacgtgttcaccgacgtggccatcgtgttcagccaggaggagtgggagcagctggcccccgcccagagggacctgtacagggacgtgatgctggagacctacagcaacctggtgagcctgggcctggccatcgccaagcccgacgtgatcagcttcctggaggagggcaaggagccctgggtggtggagaagaccagcaggggcggcctgtgccccgtgctggagagcaggggcggcccaagcagcggcgcccctcctcccagcggcggcagcccagccggctccccaacctctaccgaggagggcacctctgagtccgccacccccgagagcggccctggcacctccaccgagcccagcgagggcagcgcacccggcagccctgccggcagccccacctccacagaggagggaaccagcaccgagcccagcgaaggcagcgccccaggcaccagcaccgagcctagtgagcaggagattaaacggatcaacaagatcagaagaagacttgtgaaagacagcaacaccaagaaggccggcaagacaggccccatgaaaaccctgctggttagagtgatgacacccgatctgagagagcggctggaaaacctgagaaagaagcctgaaaatatcccccagcccatcagcaatacatctagagccaacctgaataagctgctgaccgattacaccgaaatgaagaaggcgatcctgcatgtgtactgggaagagttccagaaggaccctgtgggcctgatgagccgggtggcccagcctgccagcaagaagatcgatcagaacaagctgaaacctgagatggacgagaagggcaacctgaccaccgccggctttgcctgctctcagtgtggccagcccctgttcgtgtacaagctggagcaggtgtctgagaagggcaaggcttacaccaactacttcggacggtgcaatgtggccgagcacgaaaagctgatcctgctggcccagctgaagcccgagaaggatagcgacgaagccgtgacatatagcctgggaaagtttgggcagagggccctggatttctacagcattcatgtgaccaaggagtccacccaccccgtgaagcccctggcccagatcgccggaaacagatacgcctccggacctgtgggaaaggccctgagcgacgcatgtatgggcacaatcgcctccttcctgtctaagtaccaggacatcatcatcgaacaccagaaggtggtgaagggcaaccagaagagactggagagcctgcgggagctggccggcaaggaaaacctggaataccctagcgtgaccctgccacctcagcctcacaccaaggagggcgttgatgcctacaacgaagtgatcgcccgggtgcgaatgtgggtgaacctgaacctgtggcagaagctgaagctaagcagagatgatgccaagcctctgctgagactgaagggattcccttcctttcctctggtcgagagacaggccaacgaagtggactggtgggacatggtgtgtaacgtgaagaagctgatcaacgagaaaaaggaggatggcaaggtgttttggcagaatctggctggctacaagagacaggaagccctgagaccatacctgagcagcgaggaagatcggaagaagggaaagaaattcgctcggtaccagctgggcgacctgctgctgcacctggaaaagaagcacggcgaggactggggaaaggtgtacgacgaggcctgggagcggattgacaagaaagtggaaggcctgagcaagcacatcaagctggaagaggaacggagaagcgaggacgcccagagcaaggccgccctgaccgactggctgcgggctaaggccagcttcgtgatcgagggcctgaaggaggccgacaaggacgagttctgcagatgcgagctgaagctgcagaagtggtacggggacctgcggggaaagcccttcgccatcgaagccgagaacagcatcctggacatcagcggcttcagcaagcagtacaactgtgccttcatctggcagaaggacggcgtgaagaagctgaacctgtacctgatcatcaactacttcaagggcggcaagctgcggttcaagaagatcaaacctgaagccttcgaagccaacagattctacaccgtgatcaacaaaaagagcggcgagatcgtgcccatggaggtgaacttcaacttcgacgaccccaacctgatcatcctgcctctggcctttggcaagagacagggcagagaattcatctggaacgacctgctgtccctggaaaccggcagcctgaagctggccaacggaagagtgatcgagaagacactgtacaacagaagaacccggcaggatgagcctgccctgttcgtggccctgaccttcgagcggcgggaggtcctggactcctccaatatcaaaccaatgaacctgatcggcgtggcaagaggcgaaaacatccccgccgtgatcgccctgaccgaccccgagggctgcccactgagccggtttaaggatagcctgggaaacccaacccacatcctgagaatcggcgagagctataaggagaagcagcggaccatccaggccaagaaggaggtggagcagcggagagccggcggctacagccggaagtacgccagcaaagccaagaatctggcagacgatatggtgagaaacaccgctagagatctgctgtactacgccgtgacccaggatgccatgctgatcttcgccaacctgagccggggcttcggccggcagggcaagcggaccttcatggccgagagacagtacacacggatggaggactggctgaccgccaagctggcctacgagggcctgagcaagacctacctgtccaagacactggcccagtacacctccaagacatgcagcaactgtgggtttaccatcaccagcgccgactacgacagggtgctggagaagctgaagaagacagcaacaggctggatgaccacaattaacggcaaggagctgaaggtggagggccagattacctactacaacagatacaagagacagaacgtagtcaaggacctgtccgtcgagctggatagactgagcgaagaatctgtgaacaacgacatctcctcctggacaaagggcagaagcggagaagctctgagcctcctgaagaaaagattctcccatagacccgtgcaggagaagttcgtgtgcctgaactgcggcttcgagacacacgcagccgagcaagccgccctgaacatcgccagatcctggctgttcctgcggagccaggagtacaagaaataccagacaaacaagacaaccggcaacaccgataagagagccttcgtcgagacctggcagtccttttaccggaagaagcttaaggaggtgtggaaacctgccgtgcggtctggcggatctggcggaggctcctagcctggagagcgacgtgttcaccgacgtggccatcgtgttcagccaggaggagtgggagcagctggcccccgcccagagggacctgtacagggacgtgatgctggagacctacagcaacctggtgagcctgggcctggccatcgccaagcccgacgtgatcagcttcctggaggagggcaaggagccctgggtggtggagaagaccagcaggggcggcctgtgccccgtgctggagagcaggggatctggctccggcagcggccccaagaaaaagagaaaagtctaagctgccttctgcggggcttgccttctggccatgcccttcttctctcccttgcacctgtacctcttggtctttgaataaagcctgagtaggaaggctagcaaaaaaaaaaaaaaaaaaaaaaaaaaaaaaaaaaaaaaaaaaaaaaaaaaaaaaaaaaaaaaaaaaaaaaaaaaaaaaaa

SEQ ID NO: 16817 - RNA, 9485 nt, synthetic construct
  source 1..9485: mol_type = other RNA
aggaaataagagagaaaagaagagtaagaagaaatataagagccaccatggcccctaagaagaagcgtaaagtgagccggatggaacgcctcgtctacgaggtgcggcagaagtgcagaaacatcgaggacatctgcatctcctgcggatctctgaacgtgaccctggagcacccactgttcatcggcggcatgtgccagaactgtaaaaactgttttctggagtgtgcctatcaatacgacgatgacggctaccagagctactgcaccatctgttgcggcggaagagaggtgctgatgtgtggaaataacaactgctgccggtgcttctgcgtggaatgcgtggacctgctggtgggccccggcgccgcccaggccgctattaaggaagatccttggaactgctacatgtgcggccacaagggcacatacggcctgctgagacggagagaggactggcctagcagactgcagatgttcttcgccaataaccacgaccaggagttcgacccccctaaggtgtaccctcccgtccccgccgagaagagaaagcccatccgggtcctgagcctgttcgatggcatcgccaccggtctgctggtgctgaaggacctgggcatccaggtggataggtacattgcctccgaggtgtgcgaggactccatcaccgtgggaatggtgcgtcatcagggcaagatcatgtacgtgggcgacgtgcggagcgtgacacagaagcatatccaggagtggggccctttcgacctggtgatcggcggcagcccttgcaatgacctgagcatcgtgaacccagcccggaagggcctgtacgagggaaccggcagactgttcttcgagttttacagactgctgcacgacgcccggcctaaggaaggcgacgaccggcccttcttttggctgttcgagaatgtggtggccatgggagtcagcgacaagcgggatattagccggttcctggagagcaaccccgtgatgatcgatgccaaggaagtgagcgccgcccaccgggccagatacttctggggcaatctgcctggcatgaacagacccctggccagcaccgtgaacgacaagctggagctgcaggagtgcctggagcacggccggatcgccaagttcagcaaggtgagaaccatcaccacccgaagcaacagcatcaaacaaggcaaggaccagcactttcctgtgttcatgaacgagaaggaggacatcctgtggtgtaccgagatggagagagtgttcgggttcccagtccactacacagatgtcagcaacatgtctagactggccagacagagactgctgggaagaagctggtccgtccctgtgatcagacacctgttcgcccctctgaaggagtacttcgcctgcgtgagcagcggcaacagcaacgccaacagccggggccccagcttctctagcggcctggtgccactgtccctgagagggagccacatgggccccatggagatctacaaaaccgtgagcgcctggaagcggcagcctgtgcgcgtgctgagcctgtttcggaatatcgataaagtcctgaaaagcctgggattcctggagagcggctctggctccggcggtggcaccctgaagtacgtggaggatgtgacaaacgtggtcagacgggatgtggagaagtggggccccttcgatctggtgtacggcagcacccaacccctgggcagctcttgtgaccggtgccctggctggtacatgtttcagttccaccggatcctgcagtacgccctgccgagacaggagtcccagcggccattcttttggattttcatggacaacttgctgctgaccgaggatgaccaggaaactaccactcggttcctgcagaccgaagccgtgaccctgcaggacgtgagaggccgggactaccagaacgccatgcgggtgtggtccaacatccctggactgaaaagcaagcacgcacctctgacccctaaagaagaggagtacctgcaggcccaggtgcggagcagaagcaagctggacgcccctaaggtggatctgctggtgaagaattgcctcctgcccctgagagagtacttcaagtatttcagccagaatagtctgcccctgggaggcagcggcggcggcgccctggtgacatttgaggacgtcgccgtgcggttcacccaggaggaatgggctctgctggatccttctcagaaaatcctgtaccgggacgtgatgagagagacataccggaatctgacctccgtgggcatcaactgggaatgttgggaccttgaagcctgcttcagaagcctgggaagaaacctgagagtgcaggtggtgaagagaaagtgcgagctgaccaacagcggcccctgcgccgagggcggcccaagcagcggcgcccctcctcccagcggcggcagcccagccggctccccaacctctaccgaggagggcacctctgagtccgccacccccgagagcggccctggcacctccaccgagcccagcgagggcagcgcacccggcagccctgccggcagccccacctccacagaggagggaaccagcaccgagcccagcgaaggcagcgccccaggcaccagcaccgagcctagtgagcaggagattaaacggatcaacaagatcagaagaagacttgtgaaagacagcaacaccaagaaggccggcaagacaggccccatgaaaaccctgctggttagagtgatgacacccgatctgagagagcggctggaaaacctgagaaagaagcctgaaaatatcccccagcccatcagcaatacatctagagccaacctgaataagctgctgaccgattacaccgaaatgaagaaggcgatcctgcatgtgtactgggaagagttccagaaggaccctgtgggcctgatgagccgggtggcccagcctgccagcaagaagatcgatcagaacaagctgaaacctgagatggacgagaagggcaacctgaccaccgccggctttgcctgctctcagtgtggccagcccctgttcgtgtacaagctggagcaggtgtctgagaagggcaaggcttacaccaactacttcggacggtgcaatgtggccgagcacgaaaagctgatcctgctggcccagctgaagcccgagaaggatagcgacgaagccgtgacatatagcctgggaaagtttgggcagagggccctggatttctacagcattcatgtgaccaaggagtccacccaccccgtgaagcccctggcccagatcgccggaaacagatacgcctccggacctgtgggaaaggccctgagcgacgcatgtatgggcacaatcgcctccttcctgtctaagtaccaggacatcatcatcgaacaccagaaggtggtgaagggcaaccagaagagactggagagcctgcgggagctggccggcaaggaaaacctggaataccctagcgtgaccctgccacctcagcctcacaccaaggagggcgttgatgcctacaacgaagtgatcgcccgggtgcgaatgtgggtgaacctgaacctgtggcagaagctgaagctaagcagagatgatgccaagcctctgctgagactgaagggattcccttcctttcctctggtcgagagacaggccaacgaagtggactggtgggacatggtgtgtaacgtgaagaagctgatcaacgagaaaaaggaggatggcaaggtgttttggcagaatctggctggctacaagagacaggaagccctgagaccatacctgagcagcgaggaagatcggaagaagggaaagaaattcgctcggtaccagctgggcgacctgctgctgcacctggaaaagaagcacggcgaggactggggaaaggtgtacgacgaggcctgggagcggattgacaagaaagtggaaggcctgagcaagcacatcaagctggaagaggaacggagaagcgaggacgcccagagcaaggccgccctgaccgactggctgcgggctaaggccagcttcgtgatcgagggcctgaaggaggccgacaaggacgagttctgcagatgcgagctgaagctgcagaagtggtacggggacctgcggggaaagcccttcgccatcgaagccgagaacagcatcctggacatcagcggcttcagcaagcagtacaactgtgccttcatctggcagaaggacggcgtgaagaagctgaacctgtacctgatcatcaactacttcaagggcggcaagctgcggttcaagaagatcaaacctgaagccttcgaagccaacagattctacaccgtgatcaacaaaaagagcggcgagatcgtgcccatggaggtgaacttcaacttcgacgaccccaacctgatcatcctgcctctggcctttggcaagagacagggcagagaattcatctggaacgacctgctgtccctggaaaccggcagcctgaagctggccaacggaagagtgatcgagaagacactgtacaacagaagaacccggcaggatgagcctgccctgttcgtggccctgaccttcgagcggcgggaggtcctggactcctccaatatcaaaccaatgaacctgatcggcgtggcaagaggcgaaaacatccccgccgtgatcgccctgaccgaccccgagggctgcccactgagccggtttaaggatagcctgggaaacccaacccacatcctgagaatcggcgagagctataaggagaagcagcggaccatccaggccaagaaggaggtggagcagcggagagccggcggctacagccggaagtacgccagcaaagccaagaatctggcagacgatatggtgagaaacaccgctagagatctgctgtactacgccgtgacccaggatgccatgctgatcttcgccaacctgagccggggcttcggccggcagggcaagcggaccttcatggccgagagacagtacacacggatggaggactggctgaccgccaagctggcctacgagggcctgagcaagacctacctgtccaagacactggcccagtacacctccaagacatgcagcaactgtgggtttaccatcaccagcgccgactacgacagggtgctggagaagctgaagaagacagcaacaggctggatgaccacaattaacggcaaggagctgaaggtggagggccagattacctactacaacagatacaagagacagaacgtagtcaaggacctgtccgtcgagctggatagactgagcgaagaatctgtgaacaacgacatctcctcctggacaaagggcagaagcggagaagctctgagcctcctgaagaaaagattctcccatagacccgtgcaggagaagttcgtgtgcctgaactgcggcttcgagacacacgcagccgagcaagccgccctgaacatcgccagatcctggctgttcctgcggagccaggagtacaagaaataccagacaaacaagacaaccggcaacaccgataagagagccttcgtcgagacctggcagtccttttaccggaagaagcttaaggaggtgtggaaacctgccgtgcggtctggcggatctggcggaggctccctgctggagagcgtgaccttcggcgacgtggccgtggtgttcagcagggacgagtggctgcacctggacgccgcccagaggagcctgtacagggaggtgatgctggagaactacagcgccctggtgagcctgggcatccccctgagcatccccaagctgatctgccagctgcagcagggcgaggacccctgcatggtggagagggagatcccccaggacgtgtgcctgggcttcaagacctggggcggcccaagcagcggcgcccctcctcccagcggcggcagcccagccggctccccaacctctaccgaggagggcacctctgagtccgccacccccgagagcggccctggcacctccaccgagcccagcgagggcagcgcacccggcagccctgccggcagccccacctccacagaggagggaaccagcaccgagcccagcgaaggcagcgccccaggcaccagcaccgagcctagtgagcaggagattaaacggatcaacaagatcagaagaagacttgtgaaagacagcaacaccaagaaggccggcaagacaggccccatgaaaaccctgctggttagagtgatgacacccgatctgagagagcggctggaaaacctgagaaagaagcctgaaaatatcccccagcccatcagcaatacatctagagccaacctgaataagctgctgaccgattacaccgaaatgaagaaggcgatcctgcatgtgtactgggaagagttccagaaggaccctgtgggcctgatgagccgggtggcccagcctgccagcaagaagatcgatcagaacaagctgaaacctgagatggacgagaagggcaacctgaccaccgccggctttgcctgctctcagtgtggccagcccctgttcgtgtacaagctggagcaggtgtctgagaagggcaaggcttacaccaactacttcggacggtgcaatgtggccgagcacgaaaagctgatcctgctggcccagctgaagcccgagaaggatagcgacgaagccgtgacatatagcctgggaaagtttgggcagagggccctggatttctacagcattcatgtgaccaaggagtccacccaccccgtgaagcccctggcccagatcgccggaaacagatacgcctccggacctgtgggaaaggccctgagcgacgcatgtatgggcacaatcgcctccttcctgtctaagtaccaggacatcatcatcgaacaccagaaggtggtgaagggcaaccagaagagactggagagcctgcgggagctggccggcaaggaaaacctggaataccctagcgtgaccctgccacctcagcctcacaccaaggagggcgttgatgcctacaacgaagtgatcgcccgggtgcgaatgtgggtgaacctgaacctgtggcagaagctgaagctaagcagagatgatgccaagcctctgctgagactgaagggattcccttcctttcctctggtcgagagacaggccaacgaagtggactggtgggacatggtgtgtaacgtgaagaagctgatcaacgagaaaaaggaggatggcaaggtgttttggcagaatctggctggctacaagagacaggaagccctgagaccatacctgagcagcgaggaagatcggaagaagggaaagaaattcgctcggtaccagctgggcgacctgctgctgcacctggaaaagaagcacggcgaggactggggaaaggtgtacgacgaggcctgggagcggattgacaagaaagtggaaggcctgagcaagcacatcaagctggaagaggaacggagaagcgaggacgcccagagcaaggccgccctgaccgactggctgcgggctaaggccagcttcgtgatcgagggcctgaaggaggccgacaaggacgagttctgcagatgcgagctgaagctgcagaagtggtacggggacctgcggggaaagcccttcgccatcgaagccgagaacagcatcctggacatcagcggcttcagcaagcagtacaactgtgccttcatctggcagaaggacggcgtgaagaagctgaacctgtacctgatcatcaactacttcaagggcggcaagctgcggttcaagaagatcaaacctgaagccttcgaagccaacagattctacaccgtgatcaacaaaaagagcggcgagatcgtgcccatggaggtgaacttcaacttcgacgaccccaacctgatcatcctgcctctggcctttggcaagagacagggcagagaattcatctggaacgacctgctgtccctggaaaccggcagcctgaagctggccaacggaagagtgatcgagaagacactgtacaacagaagaacccggcaggatgagcctgccctgttcgtggccctgaccttcgagcggcgggaggtcctggactcctccaatatcaaaccaatgaacctgatcggcgtggcaagaggcgaaaacatccccgccgtgatcgccctgaccgaccccgagggctgcccactgagccggtttaaggatagcctgggaaacccaacccacatcctgagaatcggcgagagctataaggagaagcagcggaccatccaggccaagaaggaggtggagcagcggagagccggcggctacagccggaagtacgccagcaaagccaagaatctggcagacgatatggtgagaaacaccgctagagatctgctgtactacgccgtgacccaggatgccatgctgatcttcgccaacctgagccggggcttcggccggcagggcaagcggaccttcatggccgagagacagtacacacggatggaggactggctgaccgccaagctggcctacgagggcctgagcaagacctacctgtccaagacactggcccagtacacctccaagacatgcagcaactgtgggtttaccatcaccagcgccgactacgacagggtgctggagaagctgaagaagacagcaacaggctggatgaccacaattaacggcaaggagctgaaggtggagggccagattacctactacaacagatacaagagacagaacgtagtcaaggacctgtccgtcgagctggatagactgagcgaagaatctgtgaacaacgacatctcctcctggacaaagggcagaagcggagaagctctgagcctcctgaagaaaagattctcccatagacccgtgcaggagaagttcgtgtgcctgaactgcggcttcgagacacacgcagccgagcaagccgccctgaacatcgccagatcctggctgttcctgcggagccaggagtacaagaaataccagacaaacaagacaaccggcaacaccgataagagagccttcgtcgagacctggcagtccttttaccggaagaagcttaaggaggtgtggaaacctgccgtgcggtctggcggatctggcggaggctcctctgctggagagcgtgaccttcggcgacgtggccgtggtgttcagcagggacgagtggctgcacctggacgccgcccagaggagcctgtacagggaggtgatgctggagaactacagcgccctggtgagcctgggcatccccctgagcatccccaagctgatctgccagctgcagcagggcgaggacccctgcatggtggagagggagatcccccaggacgtgtgcctgggcttcaagacctggggatctggctccggcagcggccccaagaaaaagagaaaagtctaagctgccttctgcggggcttgccttctggccatgcccttcttctctcccttgcacctgtacctcttggtctttgaataaagcctgagtaggaaggctagcaaaaaaaaaaaaaaaaaaaaaaaaaaaaaaaaaaaaaaaaaaaaaaaaaaaaaaaaaaaaaaaaaaaaaaaaaaaaaaaa

SEQ ID NO: 16818 - RNA, 9485 nt, synthetic construct
  source 1..9485: mol_type = other RNA
aggaaataagagagaaaagaagagtaagaagaaatataagagccaccatggcccctaagaagaagcgtaaagtgagccggatggaacgcctcgtctacgaggtgcggcagaagtgcagaaacatcgaggacatctgcatctcctgcggatctctgaacgtgaccctggagcacccactgttcatcggcggcatgtgccagaactgtaaaaactgttttctggagtgtgcctatcaatacgacgatgacggctaccagagctactgcaccatctgttgcggcggaagagaggtgctgatgtgtggaaataacaactgctgccggtgcttctgcgtggaatgcgtggacctgctggtgggccccggcgccgcccaggccgctattaaggaagatccttggaactgctacatgtgcggccacaagggcacatacggcctgctgagacggagagaggactggcctagcagactgcagatgttcttcgccaataaccacgaccaggagttcgacccccctaaggtgtaccctcccgtccccgccgagaagagaaagcccatccgggtcctgagcctgttcgatggcatcgccaccggtctgctggtgctgaaggacctgggcatccaggtggataggtacattgcctccgaggtgtgcgaggactccatcaccgtgggaatggtgcgtcatcagggcaagatcatgtacgtgggcgacgtgcggagcgtgacacagaagcatatccaggagtggggccctttcgacctggtgatcggcggcagcccttgcaatgacctgagcatcgtgaacccagcccggaagggcctgtacgagggaaccggcagactgttcttcgagttttacagactgctgcacgacgcccggcctaaggaaggcgacgaccggcccttcttttggctgttcgagaatgtggtggccatgggagtcagcgacaagcgggatattagccggttcctggagagcaaccccgtgatgatcgatgccaaggaagtgagcgccgcccaccgggccagatacttctggggcaatctgcctggcatgaacagacccctggccagcaccgtgaacgacaagctggagctgcaggagtgcctggagcacggccggatcgccaagttcagcaaggtgagaaccatcaccacccgaagcaacagcatcaaacaaggcaaggaccagcactttcctgtgttcatgaacgagaaggaggacatcctgtggtgtaccgagatggagagagtgttcgggttcccagtccactacacagatgtcagcaacatgtctagactggccagacagagactgctgggaagaagctggtccgtccctgtgatcagacacctgttcgcccctctgaaggagtacttcgcctgcgtgagcagcggcaacagcaacgccaacagccggggccccagcttctctagcggcctggtgccactgtccctgagagggagccacatgggccccatggagatctacaaaaccgtgagcgcctggaagcggcagcctgtgcgcgtgctgagcctgtttcggaatatcgataaagtcctgaaaagcctgggattcctggagagcggctctggctccggcggtggcaccctgaagtacgtggaggatgtgacaaacgtggtcagacgggatgtggagaagtggggccccttcgatctggtgtacggcagcacccaacccctgggcagctcttgtgaccggtgccctggctggtacatgtttcagttccaccggatcctgcagtacgccctgccgagacaggagtcccagcggccattcttttggattttcatggacaacttgctgctgaccgaggatgaccaggaaactaccactcggttcctgcagaccgaagccgtgaccctgcaggacgtgagaggccgggactaccagaacgccatgcgggtgtggtccaacatccctggactgaaaagcaagcacgcacctctgacccctaaagaagaggagtacctgcaggcccaggtgcggagcagaagcaagctggacgcccctaaggtggatctgctggtgaagaattgcctcctgcccctgagagagtacttcaagtatttcagccagaatagtctgcccctgggaggcagcggcggcggcgccctggtgacatttgaggacgtcgccgtgcggttcacccaggaggaatgggctctgctggatccttctcagaaaatcctgtaccgggacgtgatgagagagacataccggaatctgacctccgtgggcatcaactgggaatgttgggaccttgaagcctgcttcagaagcctgggaagaaacctgagagtgcaggtggtgaagagaaagtgcgagctgaccaacagcggcccctgcgccgagggcggcccaagcagcggcgcccctcctcccagcggcggcagcccagccggctccccaacctctaccgaggagggcacctctgagtccgccacccccgagagcggccctggcacctccaccgagcccagcgagggcagcgcacccggcagccctgccggcagccccacctccacagaggagggaaccagcaccgagcccagcgaaggcagcgccccaggcaccagcaccgagcctagtgagcaggagattaaacggatcaacaagatcagaagaagacttgtgaaagacagcaacaccaagaaggccggcaagacaggccccatgaaaaccctgctggttagagtgatgacacccgatctgagagagcggctggaaaacctgagaaagaagcctgaaaatatcccccagcccatcagcaatacatctagagccaacctgaataagctgctgaccgattacaccgaaatgaagaaggcgatcctgcatgtgtactgggaagagttccagaaggaccctgtgggcctgatgagccgggtggcccagcctgccagcaagaagatcgatcagaacaagctgaaacctgagatggacgagaagggcaacctgaccaccgccggctttgcctgctctcagtgtggccagcccctgttcgtgtacaagctggagcaggtgtctgagaagggcaaggcttacaccaactacttcggacggtgcaatgtggccgagcacgaaaagctgatcctgctggcccagctgaagcccgagaaggatagcgacgaagccgtgacatatagcctgggaaagtttgggcagagggccctggatttctacagcattcatgtgaccaaggagtccacccaccccgtgaagcccctggcccagatcgccggaaacagatacgcctccggacctgtgggaaaggccctgagcgacgcatgtatgggcacaatcgcctccttcctgtctaagtaccaggacatcatcatcgaacaccagaaggtggtgaagggcaaccagaagagactggagagcctgcgggagctggccggcaaggaaaacctggaataccctagcgtgaccctgccacctcagcctcacaccaaggagggcgttgatgcctacaacgaagtgatcgcccgggtgcgaatgtgggtgaacctgaacctgtggcagaagctgaagctaagcagagatgatgccaagcctctgctgagactgaagggattcccttcctttcctctggtcgagagacaggccaacgaagtggactggtgggacatggtgtgtaacgtgaagaagctgatcaacgagaaaaaggaggatggcaaggtgttttggcagaatctggctggctacaagagacaggaagccctgagaccatacctgagcagcgaggaagatcggaagaagggaaagaaattcgctcggtaccagctgggcgacctgctgctgcacctggaaaagaagcacggcgaggactggggaaaggtgtacgacgaggcctgggagcggattgacaagaaagtggaaggcctgagcaagcacatcaagctggaagaggaacggagaagcgaggacgcccagagcaaggccgccctgaccgactggctgcgggctaaggccagcttcgtgatcgagggcctgaaggaggccgacaaggacgagttctgcagatgcgagctgaagctgcagaagtggtacggggacctgcggggaaagcccttcgccatcgaagccgagaacagcatcctggacatcagcggcttcagcaagcagtacaactgtgccttcatctggcagaaggacggcgtgaagaagctgaacctgtacctgatcatcaactacttcaagggcggcaagctgcggttcaagaagatcaaacctgaagccttcgaagccaacagattctacaccgtgatcaacaaaaagagcggcgagatcgtgcccatggaggtgaacttcaacttcgacgaccccaacctgatcatcctgcctctggcctttggcaagagacagggcagagaattcatctggaacgacctgctgtccctggaaaccggcagcctgaagctggccaacggaagagtgatcgagaagacactgtacaacagaagaacccggcaggatgagcctgccctgttcgtggccctgaccttcgagcggcgggaggtcctggactcctccaatatcaaaccaatgaacctgatcggcgtggcaagaggcgaaaacatccccgccgtgatcgccctgaccgaccccgagggctgcccactgagccggtttaaggatagcctgggaaacccaacccacatcctgagaatcggcgagagctataaggagaagcagcggaccatccaggccaagaaggaggtggagcagcggagagccggcggctacagccggaagtacgccagcaaagccaagaatctggcagacgatatggtgagaaacaccgctagagatctgctgtactacgccgtgacccaggatgccatgctgatcttcgccaacctgagccggggcttcggccggcagggcaagcggaccttcatggccgagagacagtacacacggatggaggactggctgaccgccaagctggcctacgagggcctgagcaagacctacctgtccaagacactggcccagtacacctccaagacatgcagcaactgtgggtttaccatcaccagcgccgactacgacagggtgctggagaagctgaagaagacagcaacaggctggatgaccacaattaacggcaaggagctgaaggtggagggccagattacctactacaacagatacaagagacagaacgtagtcaaggacctgtccgtcgagctggatagactgagcgaagaatctgtgaacaacgacatctcctcctggacaaagggcagaagcggagaagctctgagcctcctgaagaaaagattctcccatagacccgtgcaggagaagttcgtgtgcctgaactgcggcttcgagacacacgcagccgagcaagccgccctgaacatcgccagatcctggctgttcctgcggagccaggagtacaagaaataccagacaaacaagacaaccggcaacaccgataagagagccttcgtcgagacctggcagtccttttaccggaagaagcttaaggaggtgtggaaacctgccgtgcggtctggcggatctggcggaggctccagccagggcagggtgaccttcgaggacgtgaccgtgaacttcaccaagggcgagtggcagaggctgaaccccgagcagaggaacctgtacagggacgtgatgctggagaactacagcaacctggtgagcgtgggcagggaggagaccaccaagcccaacgtgatcctgaggctggagcagggcaaggagccctggctggtggaggaggaggtgctgggcagcggcaggcccgagaagaacggcggcggcccaagcagcggcgcccctcctcccagcggcggcagcccagccggctccccaacctctaccgaggagggcacctctgagtccgccacccccgagagcggccctggcacctccaccgagcccagcgagggcagcgcacccggcagccctgccggcagccccacctccacagaggagggaaccagcaccgagcccagcgaaggcagcgccccaggcaccagcaccgagcctagtgagcaggagattaaacggatcaacaagatcagaagaagacttgtgaaagacagcaacaccaagaaggccggcaagacaggccccatgaaaaccctgctggttagagtgatgacacccgatctgagagagcggctggaaaacctgagaaagaagcctgaaaatatcccccagcccatcagcaatacatctagagccaacctgaataagctgctgaccgattacaccgaaatgaagaaggcgatcctgcatgtgtactgggaagagttccagaaggaccctgtgggcctgatgagccgggtggcccagcctgccagcaagaagatcgatcagaacaagctgaaacctgagatggacgagaagggcaacctgaccaccgccggctttgcctgctctcagtgtggccagcccctgttcgtgtacaagctggagcaggtgtctgagaagggcaaggcttacaccaactacttcggacggtgcaatgtggccgagcacgaaaagctgatcctgctggcccagctgaagcccgagaaggatagcgacgaagccgtgacatatagcctgggaaagtttgggcagagggccctggatttctacagcattcatgtgaccaaggagtccacccaccccgtgaagcccctggcccagatcgccggaaacagatacgcctccggacctgtgggaaaggccctgagcgacgcatgtatgggcacaatcgcctccttcctgtctaagtaccaggacatcatcatcgaacaccagaaggtggtgaagggcaaccagaagagactggagagcctgcgggagctggccggcaaggaaaacctggaataccctagcgtgaccctgccacctcagcctcacaccaaggagggcgttgatgcctacaacgaagtgatcgcccgggtgcgaatgtgggtgaacctgaacctgtggcagaagctgaagctaagcagagatgatgccaagcctctgctgagactgaagggattcccttcctttcctctggtcgagagacaggccaacgaagtggactggtgggacatggtgtgtaacgtgaagaagctgatcaacgagaaaaaggaggatggcaaggtgttttggcagaatctggctggctacaagagacaggaagccctgagaccatacctgagcagcgaggaagatcggaagaagggaaagaaattcgctcggtaccagctgggcgacctgctgctgcacctggaaaagaagcacggcgaggactggggaaaggtgtacgacgaggcctgggagcggattgacaagaaagtggaaggcctgagcaagcacatcaagctggaagaggaacggagaagcgaggacgcccagagcaaggccgccctgaccgactggctgcgggctaaggccagcttcgtgatcgagggcctgaaggaggccgacaaggacgagttctgcagatgcgagctgaagctgcagaagtggtacggggacctgcggggaaagcccttcgccatcgaagccgagaacagcatcctggacatcagcggcttcagcaagcagtacaactgtgccttcatctggcagaaggacggcgtgaagaagctgaacctgtacctgatcatcaactacttcaagggcggcaagctgcggttcaagaagatcaaacctgaagccttcgaagccaacagattctacaccgtgatcaacaaaaagagcggcgagatcgtgcccatggaggtgaacttcaacttcgacgaccccaacctgatcatcctgcctctggcctttggcaagagacagggcagagaattcatctggaacgacctgctgtccctggaaaccggcagcctgaagctggccaacggaagagtgatcgagaagacactgtacaacagaagaacccggcaggatgagcctgccctgttcgtggccctgaccttcgagcggcgggaggtcctggactcctccaatatcaaaccaatgaacctgatcggcgtggcaagaggcgaaaacatccccgccgtgatcgccctgaccgaccccgagggctgcccactgagccggtttaaggatagcctgggaaacccaacccacatcctgagaatcggcgagagctataaggagaagcagcggaccatccaggccaagaaggaggtggagcagcggagagccggcggctacagccggaagtacgccagcaaagccaagaatctggcagacgatatggtgagaaacaccgctagagatctgctgtactacgccgtgacccaggatgccatgctgatcttcgccaacctgagccggggcttcggccggcagggcaagcggaccttcatggccgagagacagtacacacggatggaggactggctgaccgccaagctggcctacgagggcctgagcaagacctacctgtccaagacactggcccagtacacctccaagacatgcagcaactgtgggtttaccatcaccagcgccgactacgacagggtgctggagaagctgaagaagacagcaacaggctggatgaccacaattaacggcaaggagctgaaggtggagggccagattacctactacaacagatacaagagacagaacgtagtcaaggacctgtccgtcgagctggatagactgagcgaagaatctgtgaacaacgacatctcctcctggacaaagggcagaagcggagaagctctgagcctcctgaagaaaagattctcccatagacccgtgcaggagaagttcgtgtgcctgaactgcggcttcgagacacacgcagccgagcaagccgccctgaacatcgccagatcctggctgttcctgcggagccaggagtacaagaaataccagacaaacaagacaaccggcaacaccgataagagagccttcgtcgagacctggcagtccttttaccggaagaagcttaaggaggtgtggaaacctgccgtgcggtctggcggatctggcggaggctcctagccagggcagggtgaccttcgaggacgtgaccgtgaacttcaccaagggcgagtggcagaggctgaaccccgagcagaggaacctgtacagggacgtgatgctggagaactacagcaacctggtgagcgtgggcagggaggagaccaccaagcccaacgtgatcctgaggctggagcagggcaaggagccctggctggtggaggaggaggtgctgggcagcggcaggcccgagaagaacggcggatctggctccggcagcggccccaagaaaaagagaaaagtctaagctgccttctgcggggcttgccttctggccatgcccttcttctctcccttgcacctgtacctcttggtctttgaataaagcctgagtaggaaggctagcaaaaaaaaaaaaaaaaaaaaaaaaaaaaaaaaaaaaaaaaaaaaaaaaaaaaaaaaaaaaaaaaaaaaaaaaaaaaaaaa

SEQ ID NO: 16819 - RNA, 9485 nt, synthetic construct
  source 1..9485: mol_type = other RNA
aggaaataagagagaaaagaagagtaagaagaaatataagagccaccatggcccctaagaagaagcgtaaagtgagccggatggaacgcctcgtctacgaggtgcggcagaagtgcagaaacatcgaggacatctgcatctcctgcggatctctgaacgtgaccctggagcacccactgttcatcggcggcatgtgccagaactgtaaaaactgttttctggagtgtgcctatcaatacgacgatgacggctaccagagctactgcaccatctgttgcggcggaagagaggtgctgatgtgtggaaataacaactgctgccggtgcttctgcgtggaatgcgtggacctgctggtgggccccggcgccgcccaggccgctattaaggaagatccttggaactgctacatgtgcggccacaagggcacatacggcctgctgagacggagagaggactggcctagcagactgcagatgttcttcgccaataaccacgaccaggagttcgacccccctaaggtgtaccctcccgtccccgccgagaagagaaagcccatccgggtcctgagcctgttcgatggcatcgccaccggtctgctggtgctgaaggacctgggcatccaggtggataggtacattgcctccgaggtgtgcgaggactccatcaccgtgggaatggtgcgtcatcagggcaagatcatgtacgtgggcgacgtgcggagcgtgacacagaagcatatccaggagtggggccctttcgacctggtgatcggcggcagcccttgcaatgacctgagcatcgtgaacccagcccggaagggcctgtacgagggaaccggcagactgttcttcgagttttacagactgctgcacgacgcccggcctaaggaaggcgacgaccggcccttcttttggctgttcgagaatgtggtggccatgggagtcagcgacaagcgggatattagccggttcctggagagcaaccccgtgatgatcgatgccaaggaagtgagcgccgcccaccgggccagatacttctggggcaatctgcctggcatgaacagacccctggccagcaccgtgaacgacaagctggagctgcaggagtgcctggagcacggccggatcgccaagttcagcaaggtgagaaccatcaccacccgaagcaacagcatcaaacaaggcaaggaccagcactttcctgtgttcatgaacgagaaggaggacatcctgtggtgtaccgagatggagagagtgttcgggttcccagtccactacacagatgtcagcaacatgtctagactggccagacagagactgctgggaagaagctggtccgtccctgtgatcagacacctgttcgcccctctgaaggagtacttcgcctgcgtgagcagcggcaacagcaacgccaacagccggggccccagcttctctagcggcctggtgccactgtccctgagagggagccacatgggccccatggagatctacaaaaccgtgagcgcctggaagcggcagcctgtgcgcgtgctgagcctgtttcggaatatcgataaagtcctgaaaagcctgggattcctggagagcggctctggctccggcggtggcaccctgaagtacgtggaggatgtgacaaacgtggtcagacgggatgtggagaagtggggccccttcgatctggtgtacggcagcacccaacccctgggcagctcttgtgaccggtgccctggctggtacatgtttcagttccaccggatcctgcagtacgccctgccgagacaggagtcccagcggccattcttttggattttcatggacaacttgctgctgaccgaggatgaccaggaaactaccactcggttcctgcagaccgaagccgtgaccctgcaggacgtgagaggccgggactaccagaacgccatgcgggtgtggtccaacatccctggactgaaaagcaagcacgcacctctgacccctaaagaagaggagtacctgcaggcccaggtgcggagcagaagcaagctggacgcccctaaggtggatctgctggtgaagaattgcctcctgcccctgagagagtacttcaagtatttcagccagaatagtctgcccctgggaggcagcggcggcggcgccctggtgacatttgaggacgtcgccgtgcggttcacccaggaggaatgggctctgctggatccttctcagaaaatcctgtaccgggacgtgatgagagagacataccggaatctgacctccgtgggcatcaactgggaatgttgggaccttgaagcctgcttcagaagcctgggaagaaacctgagagtgcaggtggtgaagagaaagtgcgagctgaccaacagcggcccctgcgccgagggcggcccaagcagcggcgcccctcctcccagcggcggcagcccagccggctccccaacctctaccgaggagggcacctctgagtccgccacccccgagagcggccctggcacctccaccgagcccagcgagggcagcgcacccggcagccctgccggcagccccacctccacagaggagggaaccagcaccgagcccagcgaaggcagcgccccaggcaccagcaccgagcctagtgagcaggagattaaacggatcaacaagatcagaagaagacttgtgaaagacagcaacaccaagaaggccggcaagacaggccccatgaaaaccctgctggttagagtgatgacacccgatctgagagagcggctggaaaacctgagaaagaagcctgaaaatatcccccagcccatcagcaatacatctagagccaacctgaataagctgctgaccgattacaccgaaatgaagaaggcgatcctgcatgtgtactgggaagagttccagaaggaccctgtgggcctgatgagccgggtggcccagcctgccagcaagaagatcgatcagaacaagctgaaacctgagatggacgagaagggcaacctgaccaccgccggctttgcctgctctcagtgtggccagcccctgttcgtgtacaagctggagcaggtgtctgagaagggcaaggcttacaccaactacttcggacggtgcaatgtggccgagcacgaaaagctgatcctgctggcccagctgaagcccgagaaggatagcgacgaagccgtgacatatagcctgggaaagtttgggcagagggccctggatttctacagcattcatgtgaccaaggagtccacccaccccgtgaagcccctggcccagatcgccggaaacagatacgcctccggacctgtgggaaaggccctgagcgacgcatgtatgggcacaatcgcctccttcctgtctaagtaccaggacatcatcatcgaacaccagaaggtggtgaagggcaaccagaagagactggagagcctgcgggagctggccggcaaggaaaacctggaataccctagcgtgaccctgccacctcagcctcacaccaaggagggcgttgatgcctacaacgaagtgatcgcccgggtgcgaatgtgggtgaacctgaacctgtggcagaagctgaagctaagcagagatgatgccaagcctctgctgagactgaagggattcccttcctttcctctggtcgagagacaggccaacgaagtggactggtgggacatggtgtgtaacgtgaagaagctgatcaacgagaaaaaggaggatggcaaggtgttttggcagaatctggctggctacaagagacaggaagccctgagaccatacctgagcagcgaggaagatcggaagaagggaaagaaattcgctcggtaccagctgggcgacctgctgctgcacctggaaaagaagcacggcgaggactggggaaaggtgtacgacgaggcctgggagcggattgacaagaaagtggaaggcctgagcaagcacatcaagctggaagaggaacggagaagcgaggacgcccagagcaaggccgccctgaccgactggctgcgggctaaggccagcttcgtgatcgagggcctgaaggaggccgacaaggacgagttctgcagatgcgagctgaagctgcagaagtggtacggggacctgcggggaaagcccttcgccatcgaagccgagaacagcatcctggacatcagcggcttcagcaagcagtacaactgtgccttcatctggcagaaggacggcgtgaagaagctgaacctgtacctgatcatcaactacttcaagggcggcaagctgcggttcaagaagatcaaacctgaagccttcgaagccaacagattctacaccgtgatcaacaaaaagagcggcgagatcgtgcccatggaggtgaacttcaacttcgacgaccccaacctgatcatcctgcctctggcctttggcaagagacagggcagagaattcatctggaacgacctgctgtccctggaaaccggcagcctgaagctggccaacggaagagtgatcgagaagacactgtacaacagaagaacccggcaggatgagcctgccctgttcgtggccctgaccttcgagcggcgggaggtcctggactcctccaatatcaaaccaatgaacctgatcggcgtggcaagaggcgaaaacatccccgccgtgatcgccctgaccgaccccgagggctgcccactgagccggtttaaggatagcctgggaaacccaacccacatcctgagaatcggcgagagctataaggagaagcagcggaccatccaggccaagaaggaggtggagcagcggagagccggcggctacagccggaagtacgccagcaaagccaagaatctggcagacgatatggtgagaaacaccgctagagatctgctgtactacgccgtgacccaggatgccatgctgatcttcgccaacctgagccggggcttcggccggcagggcaagcggaccttcatggccgagagacagtacacacggatggaggactggctgaccgccaagctggcctacgagggcctgagcaagacctacctgtccaagacactggcccagtacacctccaagacatgcagcaactgtgggtttaccatcaccagcgccgactacgacagggtgctggagaagctgaagaagacagcaacaggctggatgaccacaattaacggcaaggagctgaaggtggagggccagattacctactacaacagatacaagagacagaacgtagtcaaggacctgtccgtcgagctggatagactgagcgaagaatctgtgaacaacgacatctcctcctggacaaagggcagaagcggagaagctctgagcctcctgaagaaaagattctcccatagacccgtgcaggagaagttcgtgtgcctgaactgcggcttcgagacacacgcagccgagcaagccgccctgaacatcgccagatcctggctgttcctgcggagccaggagtacaagaaataccagacaaacaagacaaccggcaacaccgataagagagccttcgtcgagacctggcagtccttttaccggaagaagcttaaggaggtgtggaaacctgccgtgcggtctggcggatctggcggaggctccgccctgaggagcgtgatgttcagcgacgtgagcatcgacttcagccccgaggagtgggagtacctggacctggagcagaaggacctgtacagggacgtgatgctggagaactacagcaacctggtgagcctgggctgcttcatcagcaagcccgacgtgatcagcctgctggagcagggcaaggagccctggaaggtggtgaggaagggcaggaggcagtaccccgacctggagaccaagtacggcggcccaagcagcggcgcccctcctcccagcggcggcagcccagccggctccccaacctctaccgaggagggcacctctgagtccgccacccccgagagcggccctggcacctccaccgagcccagcgagggcagcgcacccggcagccctgccggcagccccacctccacagaggagggaaccagcaccgagcccagcgaaggcagcgccccaggcaccagcaccgagcctagtgagcaggagattaaacggatcaacaagatcagaagaagacttgtgaaagacagcaacaccaagaaggccggcaagacaggccccatgaaaaccctgctggttagagtgatgacacccgatctgagagagcggctggaaaacctgagaaagaagcctgaaaatatcccccagcccatcagcaatacatctagagccaacctgaataagctgctgaccgattacaccgaaatgaagaaggcgatcctgcatgtgtactgggaagagttccagaaggaccctgtgggcctgatgagccgggtggcccagcctgccagcaagaagatcgatcagaacaagctgaaacctgagatggacgagaagggcaacctgaccaccgccggctttgcctgctctcagtgtggccagcccctgttcgtgtacaagctggagcaggtgtctgagaagggcaaggcttacaccaactacttcggacggtgcaatgtggccgagcacgaaaagctgatcctgctggcccagctgaagcccgagaaggatagcgacgaagccgtgacatatagcctgggaaagtttgggcagagggccctggatttctacagcattcatgtgaccaaggagtccacccaccccgtgaagcccctggcccagatcgccggaaacagatacgcctccggacctgtgggaaaggccctgagcgacgcatgtatgggcacaatcgcctccttcctgtctaagtaccaggacatcatcatcgaacaccagaaggtggtgaagggcaaccagaagagactggagagcctgcgggagctggccggcaaggaaaacctggaataccctagcgtgaccctgccacctcagcctcacaccaaggagggcgttgatgcctacaacgaagtgatcgcccgggtgcgaatgtgggtgaacctgaacctgtggcagaagctgaagctaagcagagatgatgccaagcctctgctgagactgaagggattcccttcctttcctctggtcgagagacaggccaacgaagtggactggtgggacatggtgtgtaacgtgaagaagctgatcaacgagaaaaaggaggatggcaaggtgttttggcagaatctggctggctacaagagacaggaagccctgagaccatacctgagcagcgaggaagatcggaagaagggaaagaaattcgctcggtaccagctgggcgacctgctgctgcacctggaaaagaagcacggcgaggactggggaaaggtgtacgacgaggcctgggagcggattgacaagaaagtggaaggcctgagcaagcacatcaagctggaagaggaacggagaagcgaggacgcccagagcaaggccgccctgaccgactggctgcgggctaaggccagcttcgtgatcgagggcctgaaggaggccgacaaggacgagttctgcagatgcgagctgaagctgcagaagtggtacggggacctgcggggaaagcccttcgccatcgaagccgagaacagcatcctggacatcagcggcttcagcaagcagtacaactgtgccttcatctggcagaaggacggcgtgaagaagctgaacctgtacctgatcatcaactacttcaagggcggcaagctgcggttcaagaagatcaaacctgaagccttcgaagccaacagattctacaccgtgatcaacaaaaagagcggcgagatcgtgcccatggaggtgaacttcaacttcgacgaccccaacctgatcatcctgcctctggcctttggcaagagacagggcagagaattcatctggaacgacctgctgtccctggaaaccggcagcctgaagctggccaacggaagagtgatcgagaagacactgtacaacagaagaacccggcaggatgagcctgccctgttcgtggccctgaccttcgagcggcgggaggtcctggactcctccaatatcaaaccaatgaacctgatcggcgtggcaagaggcgaaaacatccccgccgtgatcgccctgaccgaccccgagggctgcccactgagccggtttaaggatagcctgggaaacccaacccacatcctgagaatcggcgagagctataaggagaagcagcggaccatccaggccaagaaggaggtggagcagcggagagccggcggctacagccggaagtacgccagcaaagccaagaatctggcagacgatatggtgagaaacaccgctagagatctgctgtactacgccgtgacccaggatgccatgctgatcttcgccaacctgagccggggcttcggccggcagggcaagcggaccttcatggccgagagacagtacacacggatggaggactggctgaccgccaagctggcctacgagggcctgagcaagacctacctgtccaagacactggcccagtacacctccaagacatgcagcaactgtgggtttaccatcaccagcgccgactacgacagggtgctggagaagctgaagaagacagcaacaggctggatgaccacaattaacggcaaggagctgaaggtggagggccagattacctactacaacagatacaagagacagaacgtagtcaaggacctgtccgtcgagctggatagactgagcgaagaatctgtgaacaacgacatctcctcctggacaaagggcagaagcggagaagctctgagcctcctgaagaaaagattctcccatagacccgtgcaggagaagttcgtgtgcctgaactgcggcttcgagacacacgcagccgagcaagccgccctgaacatcgccagatcctggctgttcctgcggagccaggagtacaagaaataccagacaaacaagacaaccggcaacaccgataagagagccttcgtcgagacctggcagtccttttaccggaagaagcttaaggaggtgtggaaacctgccgtgcggtctggcggatctggcggaggctcctgccctgaggagcgtgatgttcagcgacgtgagcatcgacttcagccccgaggagtgggagtacctggacctggagcagaaggacctgtacagggacgtgatgctggagaactacagcaacctggtgagcctgggctgcttcatcagcaagcccgacgtgatcagcctgctggagcagggcaaggagccctggaaggtggtgaggaagggcaggaggcagtaccccgacctggagaccaagtacggatctggctccggcagcggccccaagaaaaagagaaaagtctaagctgccttctgcggggcttgccttctggccatgcccttcttctctcccttgcacctgtacctcttggtctttgaataaagcctgagtaggaaggctagcaaaaaaaaaaaaaaaaaaaaaaaaaaaaaaaaaaaaaaaaaaaaaaaaaaaaaaaaaaaaaaaaaaaaaaaaaaaaaaaa

SEQ ID NO: 16820 - RNA, 9485 nt, synthetic construct
  source 1..9485: mol_type = other RNA
aggaaataagagagaaaagaagagtaagaagaaatataagagccaccatggcccctaagaagaagcgtaaagtgagccggatggaacgcctcgtctacgaggtgcggcagaagtgcagaaacatcgaggacatctgcatctcctgcggatctctgaacgtgaccctggagcacccactgttcatcggcggcatgtgccagaactgtaaaaactgttttctggagtgtgcctatcaatacgacgatgacggctaccagagctactgcaccatctgttgcggcggaagagaggtgctgatgtgtggaaataacaactgctgccggtgcttctgcgtggaatgcgtggacctgctggtgggccccggcgccgcccaggccgctattaaggaagatccttggaactgctacatgtgcggccacaagggcacatacggcctgctgagacggagagaggactggcctagcagactgcagatgttcttcgccaataaccacgaccaggagttcgacccccctaaggtgtaccctcccgtccccgccgagaagagaaagcccatccgggtcctgagcctgttcgatggcatcgccaccggtctgctggtgctgaaggacctgggcatccaggtggataggtacattgcctccgaggtgtgcgaggactccatcaccgtgggaatggtgcgtcatcagggcaagatcatgtacgtgggcgacgtgcggagcgtgacacagaagcatatccaggagtggggccctttcgacctggtgatcggcggcagcccttgcaatgacctgagcatcgtgaacccagcccggaagggcctgtacgagggaaccggcagactgttcttcgagttttacagactgctgcacgacgcccggcctaaggaaggcgacgaccggcccttcttttggctgttcgagaatgtggtggccatgggagtcagcgacaagcgggatattagccggttcctggagagcaaccccgtgatgatcgatgccaaggaagtgagcgccgcccaccgggccagatacttctggggcaatctgcctggcatgaacagacccctggccagcaccgtgaacgacaagctggagctgcaggagtgcctggagcacggccggatcgccaagttcagcaaggtgagaaccatcaccacccgaagcaacagcatcaaacaaggcaaggaccagcactttcctgtgttcatgaacgagaaggaggacatcctgtggtgtaccgagatggagagagtgttcgggttcccagtccactacacagatgtcagcaacatgtctagactggccagacagagactgctgggaagaagctggtccgtccctgtgatcagacacctgttcgcccctctgaaggagtacttcgcctgcgtgagcagcggcaacagcaacgccaacagccggggccccagcttctctagcggcctggtgccactgtccctgagagggagccacatgggccccatggagatctacaaaaccgtgagcgcctggaagcggcagcctgtgcgcgtgctgagcctgtttcggaatatcgataaagtcctgaaaagcctgggattcctggagagcggctctggctccggcggtggcaccctgaagtacgtggaggatgtgacaaacgtggtcagacgggatgtggagaagtggggccccttcgatctggtgtacggcagcacccaacccctgggcagctcttgtgaccggtgccctggctggtacatgtttcagttccaccggatcctgcagtacgccctgccgagacaggagtcccagcggccattcttttggattttcatggacaacttgctgctgaccgaggatgaccaggaaactaccactcggttcctgcagaccgaagccgtgaccctgcaggacgtgagaggccgggactaccagaacgccatgcgggtgtggtccaacatccctggactgaaaagcaagcacgcacctctgacccctaaagaagaggagtacctgcaggcccaggtgcggagcagaagcaagctggacgcccctaaggtggatctgctggtgaagaattgcctcctgcccctgagagagtacttcaagtatttcagccagaatagtctgcccctgggaggcagcggcggcggcgccctggtgacatttgaggacgtcgccgtgcggttcacccaggaggaatgggctctgctggatccttctcagaaaatcctgtaccgggacgtgatgagagagacataccggaatctgacctccgtgggcatcaactgggaatgttgggaccttgaagcctgcttcagaagcctgggaagaaacctgagagtgcaggtggtgaagagaaagtgcgagctgaccaacagcggcccctgcgccgagggcggcccaagcagcggcgcccctcctcccagcggcggcagcccagccggctccccaacctctaccgaggagggcacctctgagtccgccacccccgagagcggccctggcacctccaccgagcccagcgagggcagcgcacccggcagccctgccggcagccccacctccacagaggagggaaccagcaccgagcccagcgaaggcagcgccccaggcaccagcaccgagcctagtgagcaggagattaaacggatcaacaagatcagaagaagacttgtgaaagacagcaacaccaagaaggccggcaagacaggccccatgaaaaccctgctggttagagtgatgacacccgatctgagagagcggctggaaaacctgagaaagaagcctgaaaatatcccccagcccatcagcaatacatctagagccaacctgaataagctgctgaccgattacaccgaaatgaagaaggcgatcctgcatgtgtactgggaagagttccagaaggaccctgtgggcctgatgagccgggtggcccagcctgccagcaagaagatcgatcagaacaagctgaaacctgagatggacgagaagggcaacctgaccaccgccggctttgcctgctctcagtgtggccagcccctgttcgtgtacaagctggagcaggtgtctgagaagggcaaggcttacaccaactacttcggacggtgcaatgtggccgagcacgaaaagctgatcctgctggcccagctgaagcccgagaaggatagcgacgaagccgtgacatatagcctgggaaagtttgggcagagggccctggatttctacagcattcatgtgaccaaggagtccacccaccccgtgaagcccctggcccagatcgccggaaacagatacgcctccggacctgtgggaaaggccctgagcgacgcatgtatgggcacaatcgcctccttcctgtctaagtaccaggacatcatcatcgaacaccagaaggtggtgaagggcaaccagaagagactggagagcctgcgggagctggccggcaaggaaaacctggaataccctagcgtgaccctgccacctcagcctcacaccaaggagggcgttgatgcctacaacgaagtgatcgcccgggtgcgaatgtgggtgaacctgaacctgtggcagaagctgaagctaagcagagatgatgccaagcctctgctgagactgaagggattcccttcctttcctctggtcgagagacaggccaacgaagtggactggtgggacatggtgtgtaacgtgaagaagctgatcaacgagaaaaaggaggatggcaaggtgttttggcagaatctggctggctacaagagacaggaagccctgagaccatacctgagcagcgaggaagatcggaagaagggaaagaaattcgctcggtaccagctgggcgacctgctgctgcacctggaaaagaagcacggcgaggactggggaaaggtgtacgacgaggcctgggagcggattgacaagaaagtggaaggcctgagcaagcacatcaagctggaagaggaacggagaagcgaggacgcccagagcaaggccgccctgaccgactggctgcgggctaaggccagcttcgtgatcgagggcctgaaggaggccgacaaggacgagttctgcagatgcgagctgaagctgcagaagtggtacggggacctgcggggaaagcccttcgccatcgaagccgagaacagcatcctggacatcagcggcttcagcaagcagtacaactgtgccttcatctggcagaaggacggcgtgaagaagctgaacctgtacctgatcatcaactacttcaagggcggcaagctgcggttcaagaagatcaaacctgaagccttcgaagccaacagattctacaccgtgatcaacaaaaagagcggcgagatcgtgcccatggaggtgaacttcaacttcgacgaccccaacctgatcatcctgcctctggcctttggcaagagacagggcagagaattcatctggaacgacctgctgtccctggaaaccggcagcctgaagctggccaacggaagagtgatcgagaagacactgtacaacagaagaacccggcaggatgagcctgccctgttcgtggccctgaccttcgagcggcgggaggtcctggactcctccaatatcaaaccaatgaacctgatcggcgtggcaagaggcgaaaacatccccgccgtgatcgccctgaccgaccccgagggctgcccactgagccggtttaaggatagcctgggaaacccaacccacatcctgagaatcggcgagagctataaggagaagcagcggaccatccaggccaagaaggaggtggagcagcggagagccggcggctacagccggaagtacgccagcaaagccaagaatctggcagacgatatggtgagaaacaccgctagagatctgctgtactacgccgtgacccaggatgccatgctgatcttcgccaacctgagccggggcttcggccggcagggcaagcggaccttcatggccgagagacagtacacacggatggaggactggctgaccgccaagctggcctacgagggcctgagcaagacctacctgtccaagacactggcccagtacacctccaagacatgcagcaactgtgggtttaccatcaccagcgccgactacgacagggtgctggagaagctgaagaagacagcaacaggctggatgaccacaattaacggcaaggagctgaaggtggagggccagattacctactacaacagatacaagagacagaacgtagtcaaggacctgtccgtcgagctggatagactgagcgaagaatctgtgaacaacgacatctcctcctggacaaagggcagaagcggagaagctctgagcctcctgaagaaaagattctcccatagacccgtgcaggagaagttcgtgtgcctgaactgcggcttcgagacacacgcagccgagcaagccgccctgaacatcgccagatcctggctgttcctgcggagccaggagtacaagaaataccagacaaacaagacaaccggcaacaccgataagagagccttcgtcgagacctggcagtccttttaccggaagaagcttaaggaggtgtggaaacctgccgtgcggtctggcggatctggcggaggctccgagcaggacgccgtgacctacgaggacgtgcacgtgaacttcacccacgaggagtgggccctgctggaccccagccagaagagcctgtacaaggacgtgatgatggagacctactggaacctgacctgcatcggctacaagtgggaggaccacaacatcgaggagcactgccagagctgcaggaggaacggcagcaggtgcgtgatctgccacagcggccacaacccctgcgagcacaagggcggcggcccaagcagcggcgcccctcctcccagcggcggcagcccagccggctccccaacctctaccgaggagggcacctctgagtccgccacccccgagagcggccctggcacctccaccgagcccagcgagggcagcgcacccggcagccctgccggcagccccacctccacagaggagggaaccagcaccgagcccagcgaaggcagcgccccaggcaccagcaccgagcctagtgagcaggagattaaacggatcaacaagatcagaagaagacttgtgaaagacagcaacaccaagaaggccggcaagacaggccccatgaaaaccctgctggttagagtgatgacacccgatctgagagagcggctggaaaacctgagaaagaagcctgaaaatatcccccagcccatcagcaatacatctagagccaacctgaataagctgctgaccgattacaccgaaatgaagaaggcgatcctgcatgtgtactgggaagagttccagaaggaccctgtgggcctgatgagccgggtggcccagcctgccagcaagaagatcgatcagaacaagctgaaacctgagatggacgagaagggcaacctgaccaccgccggctttgcctgctctcagtgtggccagcccctgttcgtgtacaagctggagcaggtgtctgagaagggcaaggcttacaccaactacttcggacggtgcaatgtggccgagcacgaaaagctgatcctgctggcccagctgaagcccgagaaggatagcgacgaagccgtgacatatagcctgggaaagtttgggcagagggccctggatttctacagcattcatgtgaccaaggagtccacccaccccgtgaagcccctggcccagatcgccggaaacagatacgcctccggacctgtgggaaaggccctgagcgacgcatgtatgggcacaatcgcctccttcctgtctaagtaccaggacatcatcatcgaacaccagaaggtggtgaagggcaaccagaagagactggagagcctgcgggagctggccggcaaggaaaacctggaataccctagcgtgaccctgccacctcagcctcacaccaaggagggcgttgatgcctacaacgaagtgatcgcccgggtgcgaatgtgggtgaacctgaacctgtggcagaagctgaagctaagcagagatgatgccaagcctctgctgagactgaagggattcccttcctttcctctggtcgagagacaggccaacgaagtggactggtgggacatggtgtgtaacgtgaagaagctgatcaacgagaaaaaggaggatggcaaggtgttttggcagaatctggctggctacaagagacaggaagccctgagaccatacctgagcagcgaggaagatcggaagaagggaaagaaattcgctcggtaccagctgggcgacctgctgctgcacctggaaaagaagcacggcgaggactggggaaaggtgtacgacgaggcctgggagcggattgacaagaaagtggaaggcctgagcaagcacatcaagctggaagaggaacggagaagcgaggacgcccagagcaaggccgccctgaccgactggctgcgggctaaggccagcttcgtgatcgagggcctgaaggaggccgacaaggacgagttctgcagatgcgagctgaagctgcagaagtggtacggggacctgcggggaaagcccttcgccatcgaagccgagaacagcatcctggacatcagcggcttcagcaagcagtacaactgtgccttcatctggcagaaggacggcgtgaagaagctgaacctgtacctgatcatcaactacttcaagggcggcaagctgcggttcaagaagatcaaacctgaagccttcgaagccaacagattctacaccgtgatcaacaaaaagagcggcgagatcgtgcccatggaggtgaacttcaacttcgacgaccccaacctgatcatcctgcctctggcctttggcaagagacagggcagagaattcatctggaacgacctgctgtccctggaaaccggcagcctgaagctggccaacggaagagtgatcgagaagacactgtacaacagaagaacccggcaggatgagcctgccctgttcgtggccctgaccttcgagcggcgggaggtcctggactcctccaatatcaaaccaatgaacctgatcggcgtggcaagaggcgaaaacatccccgccgtgatcgccctgaccgaccccgagggctgcccactgagccggtttaaggatagcctgggaaacccaacccacatcctgagaatcggcgagagctataaggagaagcagcggaccatccaggccaagaaggaggtggagcagcggagagccggcggctacagccggaagtacgccagcaaagccaagaatctggcagacgatatggtgagaaacaccgctagagatctgctgtactacgccgtgacccaggatgccatgctgatcttcgccaacctgagccggggcttcggccggcagggcaagcggaccttcatggccgagagacagtacacacggatggaggactggctgaccgccaagctggcctacgagggcctgagcaagacctacctgtccaagacactggcccagtacacctccaagacatgcagcaactgtgggtttaccatcaccagcgccgactacgacagggtgctggagaagctgaagaagacagcaacaggctggatgaccacaattaacggcaaggagctgaaggtggagggccagattacctactacaacagatacaagagacagaacgtagtcaaggacctgtccgtcgagctggatagactgagcgaagaatctgtgaacaacgacatctcctcctggacaaagggcagaagcggagaagctctgagcctcctgaagaaaagattctcccatagacccgtgcaggagaagttcgtgtgcctgaactgcggcttcgagacacacgcagccgagcaagccgccctgaacatcgccagatcctggctgttcctgcggagccaggagtacaagaaataccagacaaacaagacaaccggcaacaccgataagagagccttcgtcgagacctggcagtccttttaccggaagaagcttaaggaggtgtggaaacctgccgtgcggtctggcggatctggcggaggctcctgagcaggacgccgtgacctacgaggacgtgcacgtgaacttcacccacgaggagtgggccctgctggaccccagccagaagagcctgtacaaggacgtgatgatggagacctactggaacctgacctgcatcggctacaagtgggaggaccacaacatcgaggagcactgccagagctgcaggaggaacggcagcaggtgcgtgatctgccacagcggccacaacccctgcgagcacaagggcggatctggctccggcagcggccccaagaaaaagagaaaagtctaagctgccttctgcggggcttgccttctggccatgcccttcttctctcccttgcacctgtacctcttggtctttgaataaagcctgagtaggaaggctagcaaaaaaaaaaaaaaaaaaaaaaaaaaaaaaaaaaaaaaaaaaaaaaaaaaaaaaaaaaaaaaaaaaaaaaaaaaaaaaaa

SEQ ID NO: 16821 - RNA, 9485 nt, synthetic construct
  source 1..9485: mol_type = other RNA
aggaaataagagagaaaagaagagtaagaagaaatataagagccaccatggcccctaagaagaagcgtaaagtgagccggatggaacgcctcgtctacgaggtgcggcagaagtgcagaaacatcgaggacatctgcatctcctgcggatctctgaacgtgaccctggagcacccactgttcatcggcggcatgtgccagaactgtaaaaactgttttctggagtgtgcctatcaatacgacgatgacggctaccagagctactgcaccatctgttgcggcggaagagaggtgctgatgtgtggaaataacaactgctgccggtgcttctgcgtggaatgcgtggacctgctggtgggccccggcgccgcccaggccgctattaaggaagatccttggaactgctacatgtgcggccacaagggcacatacggcctgctgagacggagagaggactggcctagcagactgcagatgttcttcgccaataaccacgaccaggagttcgacccccctaaggtgtaccctcccgtccccgccgagaagagaaagcccatccgggtcctgagcctgttcgatggcatcgccaccggtctgctggtgctgaaggacctgggcatccaggtggataggtacattgcctccgaggtgtgcgaggactccatcaccgtgggaatggtgcgtcatcagggcaagatcatgtacgtgggcgacgtgcggagcgtgacacagaagcatatccaggagtggggccctttcgacctggtgatcggcggcagcccttgcaatgacctgagcatcgtgaacccagcccggaagggcctgtacgagggaaccggcagactgttcttcgagttttacagactgctgcacgacgcccggcctaaggaaggcgacgaccggcccttcttttggctgttcgagaatgtggtggccatgggagtcagcgacaagcgggatattagccggttcctggagagcaaccccgtgatgatcgatgccaaggaagtgagcgccgcccaccgggccagatacttctggggcaatctgcctggcatgaacagacccctggccagcaccgtgaacgacaagctggagctgcaggagtgcctggagcacggccggatcgccaagttcagcaaggtgagaaccatcaccacccgaagcaacagcatcaaacaaggcaaggaccagcactttcctgtgttcatgaacgagaaggaggacatcctgtggtgtaccgagatggagagagtgttcgggttcccagtccactacacagatgtcagcaacatgtctagactggccagacagagactgctgggaagaagctggtccgtccctgtgatcagacacctgttcgcccctctgaaggagtacttcgcctgcgtgagcagcggcaacagcaacgccaacagccggggccccagcttctctagcggcctggtgccactgtccctgagagggagccacatgggccccatggagatctacaaaaccgtgagcgcctggaagcggcagcctgtgcgcgtgctgagcctgtttcggaatatcgataaagtcctgaaaagcctgggattcctggagagcggctctggctccggcggtggcaccctgaagtacgtggaggatgtgacaaacgtggtcagacgggatgtggagaagtggggccccttcgatctggtgtacggcagcacccaacccctgggcagctcttgtgaccggtgccctggctggtacatgtttcagttccaccggatcctgcagtacgccctgccgagacaggagtcccagcggccattcttttggattttcatggacaacttgctgctgaccgaggatgaccaggaaactaccactcggttcctgcagaccgaagccgtgaccctgcaggacgtgagaggccgggactaccagaacgccatgcgggtgtggtccaacatccctggactgaaaagcaagcacgcacctctgacccctaaagaagaggagtacctgcaggcccaggtgcggagcagaagcaagctggacgcccctaaggtggatctgctggtgaagaattgcctcctgcccctgagagagtacttcaagtatttcagccagaatagtctgcccctgggaggcagcggcggcggcgccctggtgacatttgaggacgtcgccgtgcggttcacccaggaggaatgggctctgctggatccttctcagaaaatcctgtaccgggacgtgatgagagagacataccggaatctgacctccgtgggcatcaactgggaatgttgggaccttgaagcctgcttcagaagcctgggaagaaacctgagagtgcaggtggtgaagagaaagtgcgagctgaccaacagcggcccctgcgccgagggcggcccaagcagcggcgcccctcctcccagcggcggcagcccagccggctccccaacctctaccgaggagggcacctctgagtccgccacccccgagagcggccctggcacctccaccgagcccagcgagggcagcgcacccggcagccctgccggcagccccacctccacagaggagggaaccagcaccgagcccagcgaaggcagcgccccaggcaccagcaccgagcctagtgagcaggagattaaacggatcaacaagatcagaagaagacttgtgaaagacagcaacaccaagaaggccggcaagacaggccccatgaaaaccctgctggttagagtgatgacacccgatctgagagagcggctggaaaacctgagaaagaagcctgaaaatatcccccagcccatcagcaatacatctagagccaacctgaataagctgctgaccgattacaccgaaatgaagaaggcgatcctgcatgtgtactgggaagagttccagaaggaccctgtgggcctgatgagccgggtggcccagcctgccagcaagaagatcgatcagaacaagctgaaacctgagatggacgagaagggcaacctgaccaccgccggctttgcctgctctcagtgtggccagcccctgttcgtgtacaagctggagcaggtgtctgagaagggcaaggcttacaccaactacttcggacggtgcaatgtggccgagcacgaaaagctgatcctgctggcccagctgaagcccgagaaggatagcgacgaagccgtgacatatagcctgggaaagtttgggcagagggccctggatttctacagcattcatgtgaccaaggagtccacccaccccgtgaagcccctggcccagatcgccggaaacagatacgcctccggacctgtgggaaaggccctgagcgacgcatgtatgggcacaatcgcctccttcctgtctaagtaccaggacatcatcatcgaacaccagaaggtggtgaagggcaaccagaagagactggagagcctgcgggagctggccggcaaggaaaacctggaataccctagcgtgaccctgccacctcagcctcacaccaaggagggcgttgatgcctacaacgaagtgatcgcccgggtgcgaatgtgggtgaacctgaacctgtggcagaagctgaagctaagcagagatgatgccaagcctctgctgagactgaagggattcccttcctttcctctggtcgagagacaggccaacgaagtggactggtgggacatggtgtgtaacgtgaagaagctgatcaacgagaaaaaggaggatggcaaggtgttttggcagaatctggctggctacaagagacaggaagccctgagaccatacctgagcagcgaggaagatcggaagaagggaaagaaattcgctcggtaccagctgggcgacctgctgctgcacctggaaaagaagcacggcgaggactggggaaaggtgtacgacgaggcctgggagcggattgacaagaaagtggaaggcctgagcaagcacatcaagctggaagaggaacggagaagcgaggacgcccagagcaaggccgccctgaccgactggctgcgggctaaggccagcttcgtgatcgagggcctgaaggaggccgacaaggacgagttctgcagatgcgagctgaagctgcagaagtggtacggggacctgcggggaaagcccttcgccatcgaagccgagaacagcatcctggacatcagcggcttcagcaagcagtacaactgtgccttcatctggcagaaggacggcgtgaagaagctgaacctgtacctgatcatcaactacttcaagggcggcaagctgcggttcaagaagatcaaacctgaagccttcgaagccaacagattctacaccgtgatcaacaaaaagagcggcgagatcgtgcccatggaggtgaacttcaacttcgacgaccccaacctgatcatcctgcctctggcctttggcaagagacagggcagagaattcatctggaacgacctgctgtccctggaaaccggcagcctgaagctggccaacggaagagtgatcgagaagacactgtacaacagaagaacccggcaggatgagcctgccctgttcgtggccctgaccttcgagcggcgggaggtcctggactcctccaatatcaaaccaatgaacctgatcggcgtggcaagaggcgaaaacatccccgccgtgatcgccctgaccgaccccgagggctgcccactgagccggtttaaggatagcctgggaaacccaacccacatcctgagaatcggcgagagctataaggagaagcagcggaccatccaggccaagaaggaggtggagcagcggagagccggcggctacagccggaagtacgccagcaaagccaagaatctggcagacgatatggtgagaaacaccgctagagatctgctgtactacgccgtgacccaggatgccatgctgatcttcgccaacctgagccggggcttcggccggcagggcaagcggaccttcatggccgagagacagtacacacggatggaggactggctgaccgccaagctggcctacgagggcctgagcaagacctacctgtccaagacactggcccagtacacctccaagacatgcagcaactgtgggtttaccatcaccagcgccgactacgacagggtgctggagaagctgaagaagacagcaacaggctggatgaccacaattaacggcaaggagctgaaggtggagggccagattacctactacaacagatacaagagacagaacgtagtcaaggacctgtccgtcgagctggatagactgagcgaagaatctgtgaacaacgacatctcctcctggacaaagggcagaagcggagaagctctgagcctcctgaagaaaagattctcccatagacccgtgcaggagaagttcgtgtgcctgaactgcggcttcgagacacacgcagccgagcaagccgccctgaacatcgccagatcctggctgttcctgcggagccaggagtacaagaaataccagacaaacaagacaaccggcaacaccgataagagagccttcgtcgagacctggcagtccttttaccggaagaagcttaaggaggtgtggaaacctgccgtgcggtctggcggatctggcggaggctcctgcaaggagagcgtgatcttcaaggacgtgtgcgtgaacttcagcctggaggagtgggagtgcctggacctgacccagaggaacctgtacaggtgcgtgatgctggagaactacagcaacctggtgagcgtggtgggcctgagcatccccaagcccgacgtgatcagcctgctggagcagggcaaggagccctggggcgtgttcgacagcgagatgaccaggggcctgaaccaggactgcggcggcggcccaagcagcggcgcccctcctcccagcggcggcagcccagccggctccccaacctctaccgaggagggcacctctgagtccgccacccccgagagcggccctggcacctccaccgagcccagcgagggcagcgcacccggcagccctgccggcagccccacctccacagaggagggaaccagcaccgagcccagcgaaggcagcgccccaggcaccagcaccgagcctagtgagcaggagattaaacggatcaacaagatcagaagaagacttgtgaaagacagcaacaccaagaaggccggcaagacaggccccatgaaaaccctgctggttagagtgatgacacccgatctgagagagcggctggaaaacctgagaaagaagcctgaaaatatcccccagcccatcagcaatacatctagagccaacctgaataagctgctgaccgattacaccgaaatgaagaaggcgatcctgcatgtgtactgggaagagttccagaaggaccctgtgggcctgatgagccgggtggcccagcctgccagcaagaagatcgatcagaacaagctgaaacctgagatggacgagaagggcaacctgaccaccgccggctttgcctgctctcagtgtggccagcccctgttcgtgtacaagctggagcaggtgtctgagaagggcaaggcttacaccaactacttcggacggtgcaatgtggccgagcacgaaaagctgatcctgctggcccagctgaagcccgagaaggatagcgacgaagccgtgacatatagcctgggaaagtttgggcagagggccctggatttctacagcattcatgtgaccaaggagtccacccaccccgtgaagcccctggcccagatcgccggaaacagatacgcctccggacctgtgggaaaggccctgagcgacgcatgtatgggcacaatcgcctccttcctgtctaagtaccaggacatcatcatcgaacaccagaaggtggtgaagggcaaccagaagagactggagagcctgcgggagctggccggcaaggaaaacctggaataccctagcgtgaccctgccacctcagcctcacaccaaggagggcgttgatgcctacaacgaagtgatcgcccgggtgcgaatgtgggtgaacctgaacctgtggcagaagctgaagctaagcagagatgatgccaagcctctgctgagactgaagggattcccttcctttcctctggtcgagagacaggccaacgaagtggactggtgggacatggtgtgtaacgtgaagaagctgatcaacgagaaaaaggaggatggcaaggtgttttggcagaatctggctggctacaagagacaggaagccctgagaccatacctgagcagcgaggaagatcggaagaagggaaagaaattcgctcggtaccagctgggcgacctgctgctgcacctggaaaagaagcacggcgaggactggggaaaggtgtacgacgaggcctgggagcggattgacaagaaagtggaaggcctgagcaagcacatcaagctggaagaggaacggagaagcgaggacgcccagagcaaggccgccctgaccgactggctgcgggctaaggccagcttcgtgatcgagggcctgaaggaggccgacaaggacgagttctgcagatgcgagctgaagctgcagaagtggtacggggacctgcggggaaagcccttcgccatcgaagccgagaacagcatcctggacatcagcggcttcagcaagcagtacaactgtgccttcatctggcagaaggacggcgtgaagaagctgaacctgtacctgatcatcaactacttcaagggcggcaagctgcggttcaagaagatcaaacctgaagccttcgaagccaacagattctacaccgtgatcaacaaaaagagcggcgagatcgtgcccatggaggtgaacttcaacttcgacgaccccaacctgatcatcctgcctctggcctttggcaagagacagggcagagaattcatctggaacgacctgctgtccctggaaaccggcagcctgaagctggccaacggaagagtgatcgagaagacactgtacaacagaagaacccggcaggatgagcctgccctgttcgtggccctgaccttcgagcggcgggaggtcctggactcctccaatatcaaaccaatgaacctgatcggcgtggcaagaggcgaaaacatccccgccgtgatcgccctgaccgaccccgagggctgcccactgagccggtttaaggatagcctgggaaacccaacccacatcctgagaatcggcgagagctataaggagaagcagcggaccatccaggccaagaaggaggtggagcagcggagagccggcggctacagccggaagtacgccagcaaagccaagaatctggcagacgatatggtgagaaacaccgctagagatctgctgtactacgccgtgacccaggatgccatgctgatcttcgccaacctgagccggggcttcggccggcagggcaagcggaccttcatggccgagagacagtacacacggatggaggactggctgaccgccaagctggcctacgagggcctgagcaagacctacctgtccaagacactggcccagtacacctccaagacatgcagcaactgtgggtttaccatcaccagcgccgactacgacagggtgctggagaagctgaagaagacagcaacaggctggatgaccacaattaacggcaaggagctgaaggtggagggccagattacctactacaacagatacaagagacagaacgtagtcaaggacctgtccgtcgagctggatagactgagcgaagaatctgtgaacaacgacatctcctcctggacaaagggcagaagcggagaagctctgagcctcctgaagaaaagattctcccatagacccgtgcaggagaagttcgtgtgcctgaactgcggcttcgagacacacgcagccgagcaagccgccctgaacatcgccagatcctggctgttcctgcggagccaggagtacaagaaataccagacaaacaagacaaccggcaacaccgataagagagccttcgtcgagacctggcagtccttttaccggaagaagcttaaggaggtgtggaaacctgccgtgcggtctggcggatctggcggaggctccttgcaaggagagcgtgatcttcaaggacgtgtgcgtgaacttcagcctggaggagtgggagtgcctggacctgacccagaggaacctgtacaggtgcgtgatgctggagaactacagcaacctggtgagcgtggtgggcctgagcatccccaagcccgacgtgatcagcctgctggagcagggcaaggagccctggggcgtgttcgacagcgagatgaccaggggcctgaaccaggactgcggcggatctggctccggcagcggccccaagaaaaagagaaaagtctaagctgccttctgcggggcttgccttctggccatgcccttcttctctcccttgcacctgtacctcttggtctttgaataaagcctgagtaggaaggctagcaaaaaaaaaaaaaaaaaaaaaaaaaaaaaaaaaaaaaaaaaaaaaaaaaaaaaaaaaaaaaaaaaaaaaaaaaaaaaaaa

SEQ ID NO: 16822 - RNA, 9485 nt, synthetic construct
  source 1..9485: mol_type = other RNA
aggaaataagagagaaaagaagagtaagaagaaatataagagccaccatggcccctaagaagaagcgtaaagtgagccggatggaacgcctcgtctacgaggtgcggcagaagtgcagaaacatcgaggacatctgcatctcctgcggatctctgaacgtgaccctggagcacccactgttcatcggcggcatgtgccagaactgtaaaaactgttttctggagtgtgcctatcaatacgacgatgacggctaccagagctactgcaccatctgttgcggcggaagagaggtgctgatgtgtggaaataacaactgctgccggtgcttctgcgtggaatgcgtggacctgctggtgggccccggcgccgcccaggccgctattaaggaagatccttggaactgctacatgtgcggccacaagggcacatacggcctgctgagacggagagaggactggcctagcagactgcagatgttcttcgccaataaccacgaccaggagttcgacccccctaaggtgtaccctcccgtccccgccgagaagagaaagcccatccgggtcctgagcctgttcgatggcatcgccaccggtctgctggtgctgaaggacctgggcatccaggtggataggtacattgcctccgaggtgtgcgaggactccatcaccgtgggaatggtgcgtcatcagggcaagatcatgtacgtgggcgacgtgcggagcgtgacacagaagcatatccaggagtggggccctttcgacctggtgatcggcggcagcccttgcaatgacctgagcatcgtgaacccagcccggaagggcctgtacgagggaaccggcagactgttcttcgagttttacagactgctgcacgacgcccggcctaaggaaggcgacgaccggcccttcttttggctgttcgagaatgtggtggccatgggagtcagcgacaagcgggatattagccggttcctggagagcaaccccgtgatgatcgatgccaaggaagtgagcgccgcccaccgggccagatacttctggggcaatctgcctggcatgaacagacccctggccagcaccgtgaacgacaagctggagctgcaggagtgcctggagcacggccggatcgccaagttcagcaaggtgagaaccatcaccacccgaagcaacagcatcaaacaaggcaaggaccagcactttcctgtgttcatgaacgagaaggaggacatcctgtggtgtaccgagatggagagagtgttcgggttcccagtccactacacagatgtcagcaacatgtctagactggccagacagagactgctgggaagaagctggtccgtccctgtgatcagacacctgttcgcccctctgaaggagtacttcgcctgcgtgagcagcggcaacagcaacgccaacagccggggccccagcttctctagcggcctggtgccactgtccctgagagggagccacatgggccccatggagatctacaaaaccgtgagcgcctggaagcggcagcctgtgcgcgtgctgagcctgtttcggaatatcgataaagtcctgaaaagcctgggattcctggagagcggctctggctccggcggtggcaccctgaagtacgtggaggatgtgacaaacgtggtcagacgggatgtggagaagtggggccccttcgatctggtgtacggcagcacccaacccctgggcagctcttgtgaccggtgccctggctggtacatgtttcagttccaccggatcctgcagtacgccctgccgagacaggagtcccagcggccattcttttggattttcatggacaacttgctgctgaccgaggatgaccaggaaactaccactcggttcctgcagaccgaagccgtgaccctgcaggacgtgagaggccgggactaccagaacgccatgcgggtgtggtccaacatccctggactgaaaagcaagcacgcacctctgacccctaaagaagaggagtacctgcaggcccaggtgcggagcagaagcaagctggacgcccctaaggtggatctgctggtgaagaattgcctcctgcccctgagagagtacttcaagtatttcagccagaatagtctgcccctgggaggcagcggcggcggcgccctggtgacatttgaggacgtcgccgtgcggttcacccaggaggaatgggctctgctggatccttctcagaaaatcctgtaccgggacgtgatgagagagacataccggaatctgacctccgtgggcatcaactgggaatgttgggaccttgaagcctgcttcagaagcctgggaagaaacctgagagtgcaggtggtgaagagaaagtgcgagctgaccaacagcggcccctgcgccgagggcggcccaagcagcggcgcccctcctcccagcggcggcagcccagccggctccccaacctctaccgaggagggcacctctgagtccgccacccccgagagcggccctggcacctccaccgagcccagcgagggcagcgcacccggcagccctgccggcagccccacctccacagaggagggaaccagcaccgagcccagcgaaggcagcgccccaggcaccagcaccgagcctagtgagcaggagattaaacggatcaacaagatcagaagaagacttgtgaaagacagcaacaccaagaaggccggcaagacaggccccatgaaaaccctgctggttagagtgatgacacccgatctgagagagcggctggaaaacctgagaaagaagcctgaaaatatcccccagcccatcagcaatacatctagagccaacctgaataagctgctgaccgattacaccgaaatgaagaaggcgatcctgcatgtgtactgggaagagttccagaaggaccctgtgggcctgatgagccgggtggcccagcctgccagcaagaagatcgatcagaacaagctgaaacctgagatggacgagaagggcaacctgaccaccgccggctttgcctgctctcagtgtggccagcccctgttcgtgtacaagctggagcaggtgtctgagaagggcaaggcttacaccaactacttcggacggtgcaatgtggccgagcacgaaaagctgatcctgctggcccagctgaagcccgagaaggatagcgacgaagccgtgacatatagcctgggaaagtttgggcagagggccctggatttctacagcattcatgtgaccaaggagtccacccaccccgtgaagcccctggcccagatcgccggaaacagatacgcctccggacctgtgggaaaggccctgagcgacgcatgtatgggcacaatcgcctccttcctgtctaagtaccaggacatcatcatcgaacaccagaaggtggtgaagggcaaccagaagagactggagagcctgcgggagctggccggcaaggaaaacctggaataccctagcgtgaccctgccacctcagcctcacaccaaggagggcgttgatgcctacaacgaagtgatcgcccgggtgcgaatgtgggtgaacctgaacctgtggcagaagctgaagctaagcagagatgatgccaagcctctgctgagactgaagggattcccttcctttcctctggtcgagagacaggccaacgaagtggactggtgggacatggtgtgtaacgtgaagaagctgatcaacgagaaaaaggaggatggcaaggtgttttggcagaatctggctggctacaagagacaggaagccctgagaccatacctgagcagcgaggaagatcggaagaagggaaagaaattcgctcggtaccagctgggcgacctgctgctgcacctggaaaagaagcacggcgaggactggggaaaggtgtacgacgaggcctgggagcggattgacaagaaagtggaaggcctgagcaagcacatcaagctggaagaggaacggagaagcgaggacgcccagagcaaggccgccctgaccgactggctgcgggctaaggccagcttcgtgatcgagggcctgaaggaggccgacaaggacgagttctgcagatgcgagctgaagctgcagaagtggtacggggacctgcggggaaagcccttcgccatcgaagccgagaacagcatcctggacatcagcggcttcagcaagcagtacaactgtgccttcatctggcagaaggacggcgtgaagaagctgaacctgtacctgatcatcaactacttcaagggcggcaagctgcggttcaagaagatcaaacctgaagccttcgaagccaacagattctacaccgtgatcaacaaaaagagcggcgagatcgtgcccatggaggtgaacttcaacttcgacgaccccaacctgatcatcctgcctctggcctttggcaagagacagggcagagaattcatctggaacgacctgctgtccctggaaaccggcagcctgaagctggccaacggaagagtgatcgagaagacactgtacaacagaagaacccggcaggatgagcctgccctgttcgtggccctgaccttcgagcggcgggaggtcctggactcctccaatatcaaaccaatgaacctgatcggcgtggcaagaggcgaaaacatccccgccgtgatcgccctgaccgaccccgagggctgcccactgagccggtttaaggatagcctgggaaacccaacccacatcctgagaatcggcgagagctataaggagaagcagcggaccatccaggccaagaaggaggtggagcagcggagagccggcggctacagccggaagtacgccagcaaagccaagaatctggcagacgatatggtgagaaacaccgctagagatctgctgtactacgccgtgacccaggatgccatgctgatcttcgccaacctgagccggggcttcggccggcagggcaagcggaccttcatggccgagagacagtacacacggatggaggactggctgaccgccaagctggcctacgagggcctgagcaagacctacctgtccaagacactggcccagtacacctccaagacatgcagcaactgtgggtttaccatcaccagcgccgactacgacagggtgctggagaagctgaagaagacagcaacaggctggatgaccacaattaacggcaaggagctgaaggtggagggccagattacctactacaacagatacaagagacagaacgtagtcaaggacctgtccgtcgagctggatagactgagcgaagaatctgtgaacaacgacatctcctcctggacaaagggcagaagcggagaagctctgagcctcctgaagaaaagattctcccatagacccgtgcaggagaagttcgtgtgcctgaactgcggcttcgagacacacgcagccgagcaagccgccctgaacatcgccagatcctggctgttcctgcggagccaggagtacaagaaataccagacaaacaagacaaccggcaacaccgataagagagccttcgtcgagacctggcagtccttttaccggaagaagcttaaggaggtgtggaaacctgccgtgcggtctggcggatctggcggaggctccggcagggtgaccttcagggacgtggccgtggagttcagcctggccgagtggaagtgcctgaaccccgtgcagagggccctgtacagggaggtgatgctggagaactacaggaacctggagttcgtggacagcagcctgaagagcatgatggagttcagcagccacgagcacagcaacaccggcgagggcttccacaccggcaccctggagaggcacaagagctaccacatcggcgacttctggggcggcccaagcagcggcgcccctcctcccagcggcggcagcccagccggctccccaacctctaccgaggagggcacctctgagtccgccacccccgagagcggccctggcacctccaccgagcccagcgagggcagcgcacccggcagccctgccggcagccccacctccacagaggagggaaccagcaccgagcccagcgaaggcagcgccccaggcaccagcaccgagcctagtgagcaggagattaaacggatcaacaagatcagaagaagacttgtgaaagacagcaacaccaagaaggccggcaagacaggccccatgaaaaccctgctggttagagtgatgacacccgatctgagagagcggctggaaaacctgagaaagaagcctgaaaatatcccccagcccatcagcaatacatctagagccaacctgaataagctgctgaccgattacaccgaaatgaagaaggcgatcctgcatgtgtactgggaagagttccagaaggaccctgtgggcctgatgagccgggtggcccagcctgccagcaagaagatcgatcagaacaagctgaaacctgagatggacgagaagggcaacctgaccaccgccggctttgcctgctctcagtgtggccagcccctgttcgtgtacaagctggagcaggtgtctgagaagggcaaggcttacaccaactacttcggacggtgcaatgtggccgagcacgaaaagctgatcctgctggcccagctgaagcccgagaaggatagcgacgaagccgtgacatatagcctgggaaagtttgggcagagggccctggatttctacagcattcatgtgaccaaggagtccacccaccccgtgaagcccctggcccagatcgccggaaacagatacgcctccggacctgtgggaaaggccctgagcgacgcatgtatgggcacaatcgcctccttcctgtctaagtaccaggacatcatcatcgaacaccagaaggtggtgaagggcaaccagaagagactggagagcctgcgggagctggccggcaaggaaaacctggaataccctagcgtgaccctgccacctcagcctcacaccaaggagggcgttgatgcctacaacgaagtgatcgcccgggtgcgaatgtgggtgaacctgaacctgtggcagaagctgaagctaagcagagatgatgccaagcctctgctgagactgaagggattcccttcctttcctctggtcgagagacaggccaacgaagtggactggtgggacatggtgtgtaacgtgaagaagctgatcaacgagaaaaaggaggatggcaaggtgttttggcagaatctggctggctacaagagacaggaagccctgagaccatacctgagcagcgaggaagatcggaagaagggaaagaaattcgctcggtaccagctgggcgacctgctgctgcacctggaaaagaagcacggcgaggactggggaaaggtgtacgacgaggcctgggagcggattgacaagaaagtggaaggcctgagcaagcacatcaagctggaagaggaacggagaagcgaggacgcccagagcaaggccgccctgaccgactggctgcgggctaaggccagcttcgtgatcgagggcctgaaggaggccgacaaggacgagttctgcagatgcgagctgaagctgcagaagtggtacggggacctgcggggaaagcccttcgccatcgaagccgagaacagcatcctggacatcagcggcttcagcaagcagtacaactgtgccttcatctggcagaaggacggcgtgaagaagctgaacctgtacctgatcatcaactacttcaagggcggcaagctgcggttcaagaagatcaaacctgaagccttcgaagccaacagattctacaccgtgatcaacaaaaagagcggcgagatcgtgcccatggaggtgaacttcaacttcgacgaccccaacctgatcatcctgcctctggcctttggcaagagacagggcagagaattcatctggaacgacctgctgtccctggaaaccggcagcctgaagctggccaacggaagagtgatcgagaagacactgtacaacagaagaacccggcaggatgagcctgccctgttcgtggccctgaccttcgagcggcgggaggtcctggactcctccaatatcaaaccaatgaacctgatcggcgtggcaagaggcgaaaacatccccgccgtgatcgccctgaccgaccccgagggctgcccactgagccggtttaaggatagcctgggaaacccaacccacatcctgagaatcggcgagagctataaggagaagcagcggaccatccaggccaagaaggaggtggagcagcggagagccggcggctacagccggaagtacgccagcaaagccaagaatctggcagacgatatggtgagaaacaccgctagagatctgctgtactacgccgtgacccaggatgccatgctgatcttcgccaacctgagccggggcttcggccggcagggcaagcggaccttcatggccgagagacagtacacacggatggaggactggctgaccgccaagctggcctacgagggcctgagcaagacctacctgtccaagacactggcccagtacacctccaagacatgcagcaactgtgggtttaccatcaccagcgccgactacgacagggtgctggagaagctgaagaagacagcaacaggctggatgaccacaattaacggcaaggagctgaaggtggagggccagattacctactacaacagatacaagagacagaacgtagtcaaggacctgtccgtcgagctggatagactgagcgaagaatctgtgaacaacgacatctcctcctggacaaagggcagaagcggagaagctctgagcctcctgaagaaaagattctcccatagacccgtgcaggagaagttcgtgtgcctgaactgcggcttcgagacacacgcagccgagcaagccgccctgaacatcgccagatcctggctgttcctgcggagccaggagtacaagaaataccagacaaacaagacaaccggcaacaccgataagagagccttcgtcgagacctggcagtccttttaccggaagaagcttaaggaggtgtggaaacctgccgtgcggtctggcggatctggcggaggctcctggcagggtgaccttcagggacgtggccgtggagttcagcctggccgagtggaagtgcctgaaccccgtgcagagggccctgtacagggaggtgatgctggagaactacaggaacctggagttcgtggacagcagcctgaagagcatgatggagttcagcagccacgagcacagcaacaccggcgagggcttccacaccggcaccctggagaggcacaagagctaccacatcggcgacttctggggatctggctccggcagcggccccaagaaaaagagaaaagtctaagctgccttctgcggggcttgccttctggccatgcccttcttctctcccttgcacctgtacctcttggtctttgaataaagcctgagtaggaaggctagcaaaaaaaaaaaaaaaaaaaaaaaaaaaaaaaaaaaaaaaaaaaaaaaaaaaaaaaaaaaaaaaaaaaaaaaaaaaaaaaa

SEQ ID NO: 16823 - RNA, 9485 nt, synthetic construct
  source 1..9485: mol_type = other RNA
aggaaataagagagaaaagaagagtaagaagaaatataagagccaccatggcccctaagaagaagcgtaaagtgagccggatggaacgcctcgtctacgaggtgcggcagaagtgcagaaacatcgaggacatctgcatctcctgcggatctctgaacgtgaccctggagcacccactgttcatcggcggcatgtgccagaactgtaaaaactgttttctggagtgtgcctatcaatacgacgatgacggctaccagagctactgcaccatctgttgcggcggaagagaggtgctgatgtgtggaaataacaactgctgccggtgcttctgcgtggaatgcgtggacctgctggtgggccccggcgccgcccaggccgctattaaggaagatccttggaactgctacatgtgcggccacaagggcacatacggcctgctgagacggagagaggactggcctagcagactgcagatgttcttcgccaataaccacgaccaggagttcgacccccctaaggtgtaccctcccgtccccgccgagaagagaaagcccatccgggtcctgagcctgttcgatggcatcgccaccggtctgctggtgctgaaggacctgggcatccaggtggataggtacattgcctccgaggtgtgcgaggactccatcaccgtgggaatggtgcgtcatcagggcaagatcatgtacgtgggcgacgtgcggagcgtgacacagaagcatatccaggagtggggccctttcgacctggtgatcggcggcagcccttgcaatgacctgagcatcgtgaacccagcccggaagggcctgtacgagggaaccggcagactgttcttcgagttttacagactgctgcacgacgcccggcctaaggaaggcgacgaccggcccttcttttggctgttcgagaatgtggtggccatgggagtcagcgacaagcgggatattagccggttcctggagagcaaccccgtgatgatcgatgccaaggaagtgagcgccgcccaccgggccagatacttctggggcaatctgcctggcatgaacagacccctggccagcaccgtgaacgacaagctggagctgcaggagtgcctggagcacggccggatcgccaagttcagcaaggtgagaaccatcaccacccgaagcaacagcatcaaacaaggcaaggaccagcactttcctgtgttcatgaacgagaaggaggacatcctgtggtgtaccgagatggagagagtgttcgggttcccagtccactacacagatgtcagcaacatgtctagactggccagacagagactgctgggaagaagctggtccgtccctgtgatcagacacctgttcgcccctctgaaggagtacttcgcctgcgtgagcagcggcaacagcaacgccaacagccggggccccagcttctctagcggcctggtgccactgtccctgagagggagccacatgggccccatggagatctacaaaaccgtgagcgcctggaagcggcagcctgtgcgcgtgctgagcctgtttcggaatatcgataaagtcctgaaaagcctgggattcctggagagcggctctggctccggcggtggcaccctgaagtacgtggaggatgtgacaaacgtggtcagacgggatgtggagaagtggggccccttcgatctggtgtacggcagcacccaacccctgggcagctcttgtgaccggtgccctggctggtacatgtttcagttccaccggatcctgcagtacgccctgccgagacaggagtcccagcggccattcttttggattttcatggacaacttgctgctgaccgaggatgaccaggaaactaccactcggttcctgcagaccgaagccgtgaccctgcaggacgtgagaggccgggactaccagaacgccatgcgggtgtggtccaacatccctggactgaaaagcaagcacgcacctctgacccctaaagaagaggagtacctgcaggcccaggtgcggagcagaagcaagctggacgcccctaaggtggatctgctggtgaagaattgcctcctgcccctgagagagtacttcaagtatttcagccagaatagtctgcccctgggaggcagcggcggcggcgccctggtgacatttgaggacgtcgccgtgcggttcacccaggaggaatgggctctgctggatccttctcagaaaatcctgtaccgggacgtgatgagagagacataccggaatctgacctccgtgggcatcaactgggaatgttgggaccttgaagcctgcttcagaagcctgggaagaaacctgagagtgcaggtggtgaagagaaagtgcgagctgaccaacagcggcccctgcgccgagggcggcccaagcagcggcgcccctcctcccagcggcggcagcccagccggctccccaacctctaccgaggagggcacctctgagtccgccacccccgagagcggccctggcacctccaccgagcccagcgagggcagcgcacccggcagccctgccggcagccccacctccacagaggagggaaccagcaccgagcccagcgaaggcagcgccccaggcaccagcaccgagcctagtgagcaggagattaaacggatcaacaagatcagaagaagacttgtgaaagacagcaacaccaagaaggccggcaagacaggccccatgaaaaccctgctggttagagtgatgacacccgatctgagagagcggctggaaaacctgagaaagaagcctgaaaatatcccccagcccatcagcaatacatctagagccaacctgaataagctgctgaccgattacaccgaaatgaagaaggcgatcctgcatgtgtactgggaagagttccagaaggaccctgtgggcctgatgagccgggtggcccagcctgccagcaagaagatcgatcagaacaagctgaaacctgagatggacgagaagggcaacctgaccaccgccggctttgcctgctctcagtgtggccagcccctgttcgtgtacaagctggagcaggtgtctgagaagggcaaggcttacaccaactacttcggacggtgcaatgtggccgagcacgaaaagctgatcctgctggcccagctgaagcccgagaaggatagcgacgaagccgtgacatatagcctgggaaagtttgggcagagggccctggatttctacagcattcatgtgaccaaggagtccacccaccccgtgaagcccctggcccagatcgccggaaacagatacgcctccggacctgtgggaaaggccctgagcgacgcatgtatgggcacaatcgcctccttcctgtctaagtaccaggacatcatcatcgaacaccagaaggtggtgaagggcaaccagaagagactggagagcctgcgggagctggccggcaaggaaaacctggaataccctagcgtgaccctgccacctcagcctcacaccaaggagggcgttgatgcctacaacgaagtgatcgcccgggtgcgaatgtgggtgaacctgaacctgtggcagaagctgaagctaagcagagatgatgccaagcctctgctgagactgaagggattcccttcctttcctctggtcgagagacaggccaacgaagtggactggtgggacatggtgtgtaacgtgaagaagctgatcaacgagaaaaaggaggatggcaaggtgttttggcagaatctggctggctacaagagacaggaagccctgagaccatacctgagcagcgaggaagatcggaagaagggaaagaaattcgctcggtaccagctgggcgacctgctgctgcacctggaaaagaagcacggcgaggactggggaaaggtgtacgacgaggcctgggagcggattgacaagaaagtggaaggcctgagcaagcacatcaagctggaagaggaacggagaagcgaggacgcccagagcaaggccgccctgaccgactggctgcgggctaaggccagcttcgtgatcgagggcctgaaggaggccgacaaggacgagttctgcagatgcgagctgaagctgcagaagtggtacggggacctgcggggaaagcccttcgccatcgaagccgagaacagcatcctggacatcagcggcttcagcaagcagtacaactgtgccttcatctggcagaaggacggcgtgaagaagctgaacctgtacctgatcatcaactacttcaagggcggcaagctgcggttcaagaagatcaaacctgaagccttcgaagccaacagattctacaccgtgatcaacaaaaagagcggcgagatcgtgcccatggaggtgaacttcaacttcgacgaccccaacctgatcatcctgcctctggcctttggcaagagacagggcagagaattcatctggaacgacctgctgtccctggaaaccggcagcctgaagctggccaacggaagagtgatcgagaagacactgtacaacagaagaacccggcaggatgagcctgccctgttcgtggccctgaccttcgagcggcgggaggtcctggactcctccaatatcaaaccaatgaacctgatcggcgtggcaagaggcgaaaacatccccgccgtgatcgccctgaccgaccccgagggctgcccactgagccggtttaaggatagcctgggaaacccaacccacatcctgagaatcggcgagagctataaggagaagcagcggaccatccaggccaagaaggaggtggagcagcggagagccggcggctacagccggaagtacgccagcaaagccaagaatctggcagacgatatggtgagaaacaccgctagagatctgctgtactacgccgtgacccaggatgccatgctgatcttcgccaacctgagccggggcttcggccggcagggcaagcggaccttcatggccgagagacagtacacacggatggaggactggctgaccgccaagctggcctacgagggcctgagcaagacctacctgtccaagacactggcccagtacacctccaagacatgcagcaactgtgggtttaccatcaccagcgccgactacgacagggtgctggagaagctgaagaagacagcaacaggctggatgaccacaattaacggcaaggagctgaaggtggagggccagattacctactacaacagatacaagagacagaacgtagtcaaggacctgtccgtcgagctggatagactgagcgaagaatctgtgaacaacgacatctcctcctggacaaagggcagaagcggagaagctctgagcctcctgaagaaaagattctcccatagacccgtgcaggagaagttcgtgtgcctgaactgcggcttcgagacacacgcagccgagcaagccgccctgaacatcgccagatcctggctgttcctgcggagccaggagtacaagaaataccagacaaacaagacaaccggcaacaccgataagagagccttcgtcgagacctggcagtccttttaccggaagaagcttaaggaggtgtggaaacctgccgtgcggtctggcggatctggcggaggctccggcaaggagctgctgagcttcgaggacgtggccatgtacttcaccagggaggagtggggccacctgaacctgggccagaaggacctgtacagggacgtgatgctggagaactacaggaacatggtgctgctgggcttccagttccccaagcccgaggtgatctgccagctggagaactgggacgagcagtggatcctggacctgcccagggccggcaacaggaaggccagcggcagcgcctgcggcggcccaagcagcggcgcccctcctcccagcggcggcagcccagccggctccccaacctctaccgaggagggcacctctgagtccgccacccccgagagcggccctggcacctccaccgagcccagcgagggcagcgcacccggcagccctgccggcagccccacctccacagaggagggaaccagcaccgagcccagcgaaggcagcgccccaggcaccagcaccgagcctagtgagcaggagattaaacggatcaacaagatcagaagaagacttgtgaaagacagcaacaccaagaaggccggcaagacaggccccatgaaaaccctgctggttagagtgatgacacccgatctgagagagcggctggaaaacctgagaaagaagcctgaaaatatcccccagcccatcagcaatacatctagagccaacctgaataagctgctgaccgattacaccgaaatgaagaaggcgatcctgcatgtgtactgggaagagttccagaaggaccctgtgggcctgatgagccgggtggcccagcctgccagcaagaagatcgatcagaacaagctgaaacctgagatggacgagaagggcaacctgaccaccgccggctttgcctgctctcagtgtggccagcccctgttcgtgtacaagctggagcaggtgtctgagaagggcaaggcttacaccaactacttcggacggtgcaatgtggccgagcacgaaaagctgatcctgctggcccagctgaagcccgagaaggatagcgacgaagccgtgacatatagcctgggaaagtttgggcagagggccctggatttctacagcattcatgtgaccaaggagtccacccaccccgtgaagcccctggcccagatcgccggaaacagatacgcctccggacctgtgggaaaggccctgagcgacgcatgtatgggcacaatcgcctccttcctgtctaagtaccaggacatcatcatcgaacaccagaaggtggtgaagggcaaccagaagagactggagagcctgcgggagctggccggcaaggaaaacctggaataccctagcgtgaccctgccacctcagcctcacaccaaggagggcgttgatgcctacaacgaagtgatcgcccgggtgcgaatgtgggtgaacctgaacctgtggcagaagctgaagctaagcagagatgatgccaagcctctgctgagactgaagggattcccttcctttcctctggtcgagagacaggccaacgaagtggactggtgggacatggtgtgtaacgtgaagaagctgatcaacgagaaaaaggaggatggcaaggtgttttggcagaatctggctggctacaagagacaggaagccctgagaccatacctgagcagcgaggaagatcggaagaagggaaagaaattcgctcggtaccagctgggcgacctgctgctgcacctggaaaagaagcacggcgaggactggggaaaggtgtacgacgaggcctgggagcggattgacaagaaagtggaaggcctgagcaagcacatcaagctggaagaggaacggagaagcgaggacgcccagagcaaggccgccctgaccgactggctgcgggctaaggccagcttcgtgatcgagggcctgaaggaggccgacaaggacgagttctgcagatgcgagctgaagctgcagaagtggtacggggacctgcggggaaagcccttcgccatcgaagccgagaacagcatcctggacatcagcggcttcagcaagcagtacaactgtgccttcatctggcagaaggacggcgtgaagaagctgaacctgtacctgatcatcaactacttcaagggcggcaagctgcggttcaagaagatcaaacctgaagccttcgaagccaacagattctacaccgtgatcaacaaaaagagcggcgagatcgtgcccatggaggtgaacttcaacttcgacgaccccaacctgatcatcctgcctctggcctttggcaagagacagggcagagaattcatctggaacgacctgctgtccctggaaaccggcagcctgaagctggccaacggaagagtgatcgagaagacactgtacaacagaagaacccggcaggatgagcctgccctgttcgtggccctgaccttcgagcggcgggaggtcctggactcctccaatatcaaaccaatgaacctgatcggcgtggcaagaggcgaaaacatccccgccgtgatcgccctgaccgaccccgagggctgcccactgagccggtttaaggatagcctgggaaacccaacccacatcctgagaatcggcgagagctataaggagaagcagcggaccatccaggccaagaaggaggtggagcagcggagagccggcggctacagccggaagtacgccagcaaagccaagaatctggcagacgatatggtgagaaacaccgctagagatctgctgtactacgccgtgacccaggatgccatgctgatcttcgccaacctgagccggggcttcggccggcagggcaagcggaccttcatggccgagagacagtacacacggatggaggactggctgaccgccaagctggcctacgagggcctgagcaagacctacctgtccaagacactggcccagtacacctccaagacatgcagcaactgtgggtttaccatcaccagcgccgactacgacagggtgctggagaagctgaagaagacagcaacaggctggatgaccacaattaacggcaaggagctgaaggtggagggccagattacctactacaacagatacaagagacagaacgtagtcaaggacctgtccgtcgagctggatagactgagcgaagaatctgtgaacaacgacatctcctcctggacaaagggcagaagcggagaagctctgagcctcctgaagaaaagattctcccatagacccgtgcaggagaagttcgtgtgcctgaactgcggcttcgagacacacgcagccgagcaagccgccctgaacatcgccagatcctggctgttcctgcggagccaggagtacaagaaataccagacaaacaagacaaccggcaacaccgataagagagccttcgtcgagacctggcagtccttttaccggaagaagcttaaggaggtgtggaaacctgccgtgcggtctggcggatctggcggaggctcctggcaaggagctgctgagcttcgaggacgtggccatgtacttcaccagggaggagtggggccacctgaacctgggccagaaggacctgtacagggacgtgatgctggagaactacaggaacatggtgctgctgggcttccagttccccaagcccgaggtgatctgccagctggagaactgggacgagcagtggatcctggacctgcccagggccggcaacaggaaggccagcggcagcgcctgcggatctggctccggcagcggccccaagaaaaagagaaaagtctaagctgccttctgcggggcttgccttctggccatgcccttcttctctcccttgcacctgtacctcttggtctttgaataaagcctgagtaggaaggctagcaaaaaaaaaaaaaaaaaaaaaaaaaaaaaaaaaaaaaaaaaaaaaaaaaaaaaaaaaaaaaaaaaaaaaaaaaaaaaaaa

SEQ ID NO: 16824 - RNA, 9485 nt, synthetic construct
  source 1..9485: mol_type = other RNA
aggaaataagagagaaaagaagagtaagaagaaatataagagccaccatggcccctaagaagaagcgtaaagtgagccggatggaacgcctcgtctacgaggtgcggcagaagtgcagaaacatcgaggacatctgcatctcctgcggatctctgaacgtgaccctggagcacccactgttcatcggcggcatgtgccagaactgtaaaaactgttttctggagtgtgcctatcaatacgacgatgacggctaccagagctactgcaccatctgttgcggcggaagagaggtgctgatgtgtggaaataacaactgctgccggtgcttctgcgtggaatgcgtggacctgctggtgggccccggcgccgcccaggccgctattaaggaagatccttggaactgctacatgtgcggccacaagggcacatacggcctgctgagacggagagaggactggcctagcagactgcagatgttcttcgccaataaccacgaccaggagttcgacccccctaaggtgtaccctcccgtccccgccgagaagagaaagcccatccgggtcctgagcctgttcgatggcatcgccaccggtctgctggtgctgaaggacctgggcatccaggtggataggtacattgcctccgaggtgtgcgaggactccatcaccgtgggaatggtgcgtcatcagggcaagatcatgtacgtgggcgacgtgcggagcgtgacacagaagcatatccaggagtggggccctttcgacctggtgatcggcggcagcccttgcaatgacctgagcatcgtgaacccagcccggaagggcctgtacgagggaaccggcagactgttcttcgagttttacagactgctgcacgacgcccggcctaaggaaggcgacgaccggcccttcttttggctgttcgagaatgtggtggccatgggagtcagcgacaagcgggatattagccggttcctggagagcaaccccgtgatgatcgatgccaaggaagtgagcgccgcccaccgggccagatacttctggggcaatctgcctggcatgaacagacccctggccagcaccgtgaacgacaagctggagctgcaggagtgcctggagcacggccggatcgccaagttcagcaaggtgagaaccatcaccacccgaagcaacagcatcaaacaaggcaaggaccagcactttcctgtgttcatgaacgagaaggaggacatcctgtggtgtaccgagatggagagagtgttcgggttcccagtccactacacagatgtcagcaacatgtctagactggccagacagagactgctgggaagaagctggtccgtccctgtgatcagacacctgttcgcccctctgaaggagtacttcgcctgcgtgagcagcggcaacagcaacgccaacagccggggccccagcttctctagcggcctggtgccactgtccctgagagggagccacatgggccccatggagatctacaaaaccgtgagcgcctggaagcggcagcctgtgcgcgtgctgagcctgtttcggaatatcgataaagtcctgaaaagcctgggattcctggagagcggctctggctccggcggtggcaccctgaagtacgtggaggatgtgacaaacgtggtcagacgggatgtggagaagtggggccccttcgatctggtgtacggcagcacccaacccctgggcagctcttgtgaccggtgccctggctggtacatgtttcagttccaccggatcctgcagtacgccctgccgagacaggagtcccagcggccattcttttggattttcatggacaacttgctgctgaccgaggatgaccaggaaactaccactcggttcctgcagaccgaagccgtgaccctgcaggacgtgagaggccgggactaccagaacgccatgcgggtgtggtccaacatccctggactgaaaagcaagcacgcacctctgacccctaaagaagaggagtacctgcaggcccaggtgcggagcagaagcaagctggacgcccctaaggtggatctgctggtgaagaattgcctcctgcccctgagagagtacttcaagtatttcagccagaatagtctgcccctgggaggcagcggcggcggcgccctggtgacatttgaggacgtcgccgtgcggttcacccaggaggaatgggctctgctggatccttctcagaaaatcctgtaccgggacgtgatgagagagacataccggaatctgacctccgtgggcatcaactgggaatgttgggaccttgaagcctgcttcagaagcctgggaagaaacctgagagtgcaggtggtgaagagaaagtgcgagctgaccaacagcggcccctgcgccgagggcggcccaagcagcggcgcccctcctcccagcggcggcagcccagccggctccccaacctctaccgaggagggcacctctgagtccgccacccccgagagcggccctggcacctccaccgagcccagcgagggcagcgcacccggcagccctgccggcagccccacctccacagaggagggaaccagcaccgagcccagcgaaggcagcgccccaggcaccagcaccgagcctagtgagcaggagattaaacggatcaacaagatcagaagaagacttgtgaaagacagcaacaccaagaaggccggcaagacaggccccatgaaaaccctgctggttagagtgatgacacccgatctgagagagcggctggaaaacctgagaaagaagcctgaaaatatcccccagcccatcagcaatacatctagagccaacctgaataagctgctgaccgattacaccgaaatgaagaaggcgatcctgcatgtgtactgggaagagttccagaaggaccctgtgggcctgatgagccgggtggcccagcctgccagcaagaagatcgatcagaacaagctgaaacctgagatggacgagaagggcaacctgaccaccgccggctttgcctgctctcagtgtggccagcccctgttcgtgtacaagctggagcaggtgtctgagaagggcaaggcttacaccaactacttcggacggtgcaatgtggccgagcacgaaaagctgatcctgctggcccagctgaagcccgagaaggatagcgacgaagccgtgacatatagcctgggaaagtttgggcagagggccctggatttctacagcattcatgtgaccaaggagtccacccaccccgtgaagcccctggcccagatcgccggaaacagatacgcctccggacctgtgggaaaggccctgagcgacgcatgtatgggcacaatcgcctccttcctgtctaagtaccaggacatcatcatcgaacaccagaaggtggtgaagggcaaccagaagagactggagagcctgcgggagctggccggcaaggaaaacctggaataccctagcgtgaccctgccacctcagcctcacaccaaggagggcgttgatgcctacaacgaagtgatcgcccgggtgcgaatgtgggtgaacctgaacctgtggcagaagctgaagctaagcagagatgatgccaagcctctgctgagactgaagggattcccttcctttcctctggtcgagagacaggccaacgaagtggactggtgggacatggtgtgtaacgtgaagaagctgatcaacgagaaaaaggaggatggcaaggtgttttggcagaatctggctggctacaagagacaggaagccctgagaccatacctgagcagcgaggaagatcggaagaagggaaagaaattcgctcggtaccagctgggcgacctgctgctgcacctggaaaagaagcacggcgaggactggggaaaggtgtacgacgaggcctgggagcggattgacaagaaagtggaaggcctgagcaagcacatcaagctggaagaggaacggagaagcgaggacgcccagagcaaggccgccctgaccgactggctgcgggctaaggccagcttcgtgatcgagggcctgaaggaggccgacaaggacgagttctgcagatgcgagctgaagctgcagaagtggtacggggacctgcggggaaagcccttcgccatcgaagccgagaacagcatcctggacatcagcggcttcagcaagcagtacaactgtgccttcatctggcagaaggacggcgtgaagaagctgaacctgtacctgatcatcaactacttcaagggcggcaagctgcggttcaagaagatcaaacctgaagccttcgaagccaacagattctacaccgtgatcaacaaaaagagcggcgagatcgtgcccatggaggtgaacttcaacttcgacgaccccaacctgatcatcctgcctctggcctttggcaagagacagggcagagaattcatctggaacgacctgctgtccctggaaaccggcagcctgaagctggccaacggaagagtgatcgagaagacactgtacaacagaagaacccggcaggatgagcctgccctgttcgtggccctgaccttcgagcggcgggaggtcctggactcctccaatatcaaaccaatgaacctgatcggcgtggcaagaggcgaaaacatccccgccgtgatcgccctgaccgaccccgagggctgcccactgagccggtttaaggatagcctgggaaacccaacccacatcctgagaatcggcgagagctataaggagaagcagcggaccatccaggccaagaaggaggtggagcagcggagagccggcggctacagccggaagtacgccagcaaagccaagaatctggcagacgatatggtgagaaacaccgctagagatctgctgtactacgccgtgacccaggatgccatgctgatcttcgccaacctgagccggggcttcggccggcagggcaagcggaccttcatggccgagagacagtacacacggatggaggactggctgaccgccaagctggcctacgagggcctgagcaagacctacctgtccaagacactggcccagtacacctccaagacatgcagcaactgtgggtttaccatcaccagcgccgactacgacagggtgctggagaagctgaagaagacagcaacaggctggatgaccacaattaacggcaaggagctgaaggtggagggccagattacctactacaacagatacaagagacagaacgtagtcaaggacctgtccgtcgagctggatagactgagcgaagaatctgtgaacaacgacatctcctcctggacaaagggcagaagcggagaagctctgagcctcctgaagaaaagattctcccatagacccgtgcaggagaagttcgtgtgcctgaactgcggcttcgagacacacgcagccgagcaagccgccctgaacatcgccagatcctggctgttcctgcggagccaggagtacaagaaataccagacaaacaagacaaccggcaacaccgataagagagccttcgtcgagacctggcagtccttttaccggaagaagcttaaggaggtgtggaaacctgccgtgcggtctggcggatctggcggaggctcccccctggagagcgtgaccttcgaggacgtggccgtggacttcacccaggaggagtggagcctgctggacaagagccagaagaacctgttcaggaacgtgatgctggagaccgtgacccacctggtgagcgtgggctaccagatcagcaagagcgacgtgatcttccagctggagcagggcaaggagctgtggcccgaggccgccggcggcctgcagggccagagccccgacgaggtgacccccggcggcccaagcagcggcgcccctcctcccagcggcggcagcccagccggctccccaacctctaccgaggagggcacctctgagtccgccacccccgagagcggccctggcacctccaccgagcccagcgagggcagcgcacccggcagccctgccggcagccccacctccacagaggagggaaccagcaccgagcccagcgaaggcagcgccccaggcaccagcaccgagcctagtgagcaggagattaaacggatcaacaagatcagaagaagacttgtgaaagacagcaacaccaagaaggccggcaagacaggccccatgaaaaccctgctggttagagtgatgacacccgatctgagagagcggctggaaaacctgagaaagaagcctgaaaatatcccccagcccatcagcaatacatctagagccaacctgaataagctgctgaccgattacaccgaaatgaagaaggcgatcctgcatgtgtactgggaagagttccagaaggaccctgtgggcctgatgagccgggtggcccagcctgccagcaagaagatcgatcagaacaagctgaaacctgagatggacgagaagggcaacctgaccaccgccggctttgcctgctctcagtgtggccagcccctgttcgtgtacaagctggagcaggtgtctgagaagggcaaggcttacaccaactacttcggacggtgcaatgtggccgagcacgaaaagctgatcctgctggcccagctgaagcccgagaaggatagcgacgaagccgtgacatatagcctgggaaagtttgggcagagggccctggatttctacagcattcatgtgaccaaggagtccacccaccccgtgaagcccctggcccagatcgccggaaacagatacgcctccggacctgtgggaaaggccctgagcgacgcatgtatgggcacaatcgcctccttcctgtctaagtaccaggacatcatcatcgaacaccagaaggtggtgaagggcaaccagaagagactggagagcctgcgggagctggccggcaaggaaaacctggaataccctagcgtgaccctgccacctcagcctcacaccaaggagggcgttgatgcctacaacgaagtgatcgcccgggtgcgaatgtgggtgaacctgaacctgtggcagaagctgaagctaagcagagatgatgccaagcctctgctgagactgaagggattcccttcctttcctctggtcgagagacaggccaacgaagtggactggtgggacatggtgtgtaacgtgaagaagctgatcaacgagaaaaaggaggatggcaaggtgttttggcagaatctggctggctacaagagacaggaagccctgagaccatacctgagcagcgaggaagatcggaagaagggaaagaaattcgctcggtaccagctgggcgacctgctgctgcacctggaaaagaagcacggcgaggactggggaaaggtgtacgacgaggcctgggagcggattgacaagaaagtggaaggcctgagcaagcacatcaagctggaagaggaacggagaagcgaggacgcccagagcaaggccgccctgaccgactggctgcgggctaaggccagcttcgtgatcgagggcctgaaggaggccgacaaggacgagttctgcagatgcgagctgaagctgcagaagtggtacggggacctgcggggaaagcccttcgccatcgaagccgagaacagcatcctggacatcagcggcttcagcaagcagtacaactgtgccttcatctggcagaaggacggcgtgaagaagctgaacctgtacctgatcatcaactacttcaagggcggcaagctgcggttcaagaagatcaaacctgaagccttcgaagccaacagattctacaccgtgatcaacaaaaagagcggcgagatcgtgcccatggaggtgaacttcaacttcgacgaccccaacctgatcatcctgcctctggcctttggcaagagacagggcagagaattcatctggaacgacctgctgtccctggaaaccggcagcctgaagctggccaacggaagagtgatcgagaagacactgtacaacagaagaacccggcaggatgagcctgccctgttcgtggccctgaccttcgagcggcgggaggtcctggactcctccaatatcaaaccaatgaacctgatcggcgtggcaagaggcgaaaacatccccgccgtgatcgccctgaccgaccccgagggctgcccactgagccggtttaaggatagcctgggaaacccaacccacatcctgagaatcggcgagagctataaggagaagcagcggaccatccaggccaagaaggaggtggagcagcggagagccggcggctacagccggaagtacgccagcaaagccaagaatctggcagacgatatggtgagaaacaccgctagagatctgctgtactacgccgtgacccaggatgccatgctgatcttcgccaacctgagccggggcttcggccggcagggcaagcggaccttcatggccgagagacagtacacacggatggaggactggctgaccgccaagctggcctacgagggcctgagcaagacctacctgtccaagacactggcccagtacacctccaagacatgcagcaactgtgggtttaccatcaccagcgccgactacgacagggtgctggagaagctgaagaagacagcaacaggctggatgaccacaattaacggcaaggagctgaaggtggagggccagattacctactacaacagatacaagagacagaacgtagtcaaggacctgtccgtcgagctggatagactgagcgaagaatctgtgaacaacgacatctcctcctggacaaagggcagaagcggagaagctctgagcctcctgaagaaaagattctcccatagacccgtgcaggagaagttcgtgtgcctgaactgcggcttcgagacacacgcagccgagcaagccgccctgaacatcgccagatcctggctgttcctgcggagccaggagtacaagaaataccagacaaacaagacaaccggcaacaccgataagagagccttcgtcgagacctggcagtccttttaccggaagaagcttaaggaggtgtggaaacctgccgtgcggtctggcggatctggcggaggctcctcccctggagagcgtgaccttcgaggacgtggccgtggacttcacccaggaggagtggagcctgctggacaagagccagaagaacctgttcaggaacgtgatgctggagaccgtgacccacctggtgagcgtgggctaccagatcagcaagagcgacgtgatcttccagctggagcagggcaaggagctgtggcccgaggccgccggcggcctgcagggccagagccccgacgaggtgacccccggatctggctccggcagcggccccaagaaaaagagaaaagtctaagctgccttctgcggggcttgccttctggccatgcccttcttctctcccttgcacctgtacctcttggtctttgaataaagcctgagtaggaaggctagcaaaaaaaaaaaaaaaaaaaaaaaaaaaaaaaaaaaaaaaaaaaaaaaaaaaaaaaaaaaaaaaaaaaaaaaaaaaaaaaa

SEQ ID NO: 16825 - RNA, 9485 nt, synthetic construct
  source 1..9485: mol_type = other RNA
aggaaataagagagaaaagaagagtaagaagaaatataagagccaccatggcccctaagaagaagcgtaaagtgagccggatggaacgcctcgtctacgaggtgcggcagaagtgcagaaacatcgaggacatctgcatctcctgcggatctctgaacgtgaccctggagcacccactgttcatcggcggcatgtgccagaactgtaaaaactgttttctggagtgtgcctatcaatacgacgatgacggctaccagagctactgcaccatctgttgcggcggaagagaggtgctgatgtgtggaaataacaactgctgccggtgcttctgcgtggaatgcgtggacctgctggtgggccccggcgccgcccaggccgctattaaggaagatccttggaactgctacatgtgcggccacaagggcacatacggcctgctgagacggagagaggactggcctagcagactgcagatgttcttcgccaataaccacgaccaggagttcgacccccctaaggtgtaccctcccgtccccgccgagaagagaaagcccatccgggtcctgagcctgttcgatggcatcgccaccggtctgctggtgctgaaggacctgggcatccaggtggataggtacattgcctccgaggtgtgcgaggactccatcaccgtgggaatggtgcgtcatcagggcaagatcatgtacgtgggcgacgtgcggagcgtgacacagaagcatatccaggagtggggccctttcgacctggtgatcggcggcagcccttgcaatgacctgagcatcgtgaacccagcccggaagggcctgtacgagggaaccggcagactgttcttcgagttttacagactgctgcacgacgcccggcctaaggaaggcgacgaccggcccttcttttggctgttcgagaatgtggtggccatgggagtcagcgacaagcgggatattagccggttcctggagagcaaccccgtgatgatcgatgccaaggaagtgagcgccgcccaccgggccagatacttctggggcaatctgcctggcatgaacagacccctggccagcaccgtgaacgacaagctggagctgcaggagtgcctggagcacggccggatcgccaagttcagcaaggtgagaaccatcaccacccgaagcaacagcatcaaacaaggcaaggaccagcactttcctgtgttcatgaacgagaaggaggacatcctgtggtgtaccgagatggagagagtgttcgggttcccagtccactacacagatgtcagcaacatgtctagactggccagacagagactgctgggaagaagctggtccgtccctgtgatcagacacctgttcgcccctctgaaggagtacttcgcctgcgtgagcagcggcaacagcaacgccaacagccggggccccagcttctctagcggcctggtgccactgtccctgagagggagccacatgggccccatggagatctacaaaaccgtgagcgcctggaagcggcagcctgtgcgcgtgctgagcctgtttcggaatatcgataaagtcctgaaaagcctgggattcctggagagcggctctggctccggcggtggcaccctgaagtacgtggaggatgtgacaaacgtggtcagacgggatgtggagaagtggggccccttcgatctggtgtacggcagcacccaacccctgggcagctcttgtgaccggtgccctggctggtacatgtttcagttccaccggatcctgcagtacgccctgccgagacaggagtcccagcggccattcttttggattttcatggacaacttgctgctgaccgaggatgaccaggaaactaccactcggttcctgcagaccgaagccgtgaccctgcaggacgtgagaggccgggactaccagaacgccatgcgggtgtggtccaacatccctggactgaaaagcaagcacgcacctctgacccctaaagaagaggagtacctgcaggcccaggtgcggagcagaagcaagctggacgcccctaaggtggatctgctggtgaagaattgcctcctgcccctgagagagtacttcaagtatttcagccagaatagtctgcccctgggaggcagcggcggcggcgccctggtgacatttgaggacgtcgccgtgcggttcacccaggaggaatgggctctgctggatccttctcagaaaatcctgtaccgggacgtgatgagagagacataccggaatctgacctccgtgggcatcaactgggaatgttgggaccttgaagcctgcttcagaagcctgggaagaaacctgagagtgcaggtggtgaagagaaagtgcgagctgaccaacagcggcccctgcgccgagggcggcccaagcagcggcgcccctcctcccagcggcggcagcccagccggctccccaacctctaccgaggagggcacctctgagtccgccacccccgagagcggccctggcacctccaccgagcccagcgagggcagcgcacccggcagccctgccggcagccccacctccacagaggagggaaccagcaccgagcccagcgaaggcagcgccccaggcaccagcaccgagcctagtgagcaggagattaaacggatcaacaagatcagaagaagacttgtgaaagacagcaacaccaagaaggccggcaagacaggccccatgaaaaccctgctggttagagtgatgacacccgatctgagagagcggctggaaaacctgagaaagaagcctgaaaatatcccccagcccatcagcaatacatctagagccaacctgaataagctgctgaccgattacaccgaaatgaagaaggcgatcctgcatgtgtactgggaagagttccagaaggaccctgtgggcctgatgagccgggtggcccagcctgccagcaagaagatcgatcagaacaagctgaaacctgagatggacgagaagggcaacctgaccaccgccggctttgcctgctctcagtgtggccagcccctgttcgtgtacaagctggagcaggtgtctgagaagggcaaggcttacaccaactacttcggacggtgcaatgtggccgagcacgaaaagctgatcctgctggcccagctgaagcccgagaaggatagcgacgaagccgtgacatatagcctgggaaagtttgggcagagggccctggatttctacagcattcatgtgaccaaggagtccacccaccccgtgaagcccctggcccagatcgccggaaacagatacgcctccggacctgtgggaaaggccctgagcgacgcatgtatgggcacaatcgcctccttcctgtctaagtaccaggacatcatcatcgaacaccagaaggtggtgaagggcaaccagaagagactggagagcctgcgggagctggccggcaaggaaaacctggaataccctagcgtgaccctgccacctcagcctcacaccaaggagggcgttgatgcctacaacgaagtgatcgcccgggtgcgaatgtgggtgaacctgaacctgtggcagaagctgaagctaagcagagatgatgccaagcctctgctgagactgaagggattcccttcctttcctctggtcgagagacaggccaacgaagtggactggtgggacatggtgtgtaacgtgaagaagctgatcaacgagaaaaaggaggatggcaaggtgttttggcagaatctggctggctacaagagacaggaagccctgagaccatacctgagcagcgaggaagatcggaagaagggaaagaaattcgctcggtaccagctgggcgacctgctgctgcacctggaaaagaagcacggcgaggactggggaaaggtgtacgacgaggcctgggagcggattgacaagaaagtggaaggcctgagcaagcacatcaagctggaagaggaacggagaagcgaggacgcccagagcaaggccgccctgaccgactggctgcgggctaaggccagcttcgtgatcgagggcctgaaggaggccgacaaggacgagttctgcagatgcgagctgaagctgcagaagtggtacggggacctgcggggaaagcccttcgccatcgaagccgagaacagcatcctggacatcagcggcttcagcaagcagtacaactgtgccttcatctggcagaaggacggcgtgaagaagctgaacctgtacctgatcatcaactacttcaagggcggcaagctgcggttcaagaagatcaaacctgaagccttcgaagccaacagattctacaccgtgatcaacaaaaagagcggcgagatcgtgcccatggaggtgaacttcaacttcgacgaccccaacctgatcatcctgcctctggcctttggcaagagacagggcagagaattcatctggaacgacctgctgtccctggaaaccggcagcctgaagctggccaacggaagagtgatcgagaagacactgtacaacagaagaacccggcaggatgagcctgccctgttcgtggccctgaccttcgagcggcgggaggtcctggactcctccaatatcaaaccaatgaacctgatcggcgtggcaagaggcgaaaacatccccgccgtgatcgccctgaccgaccccgagggctgcccactgagccggtttaaggatagcctgggaaacccaacccacatcctgagaatcggcgagagctataaggagaagcagcggaccatccaggccaagaaggaggtggagcagcggagagccggcggctacagccggaagtacgccagcaaagccaagaatctggcagacgatatggtgagaaacaccgctagagatctgctgtactacgccgtgacccaggatgccatgctgatcttcgccaacctgagccggggcttcggccggcagggcaagcggaccttcatggccgagagacagtacacacggatggaggactggctgaccgccaagctggcctacgagggcctgagcaagacctacctgtccaagacactggcccagtacacctccaagacatgcagcaactgtgggtttaccatcaccagcgccgactacgacagggtgctggagaagctgaagaagacagcaacaggctggatgaccacaattaacggcaaggagctgaaggtggagggccagattacctactacaacagatacaagagacagaacgtagtcaaggacctgtccgtcgagctggatagactgagcgaagaatctgtgaacaacgacatctcctcctggacaaagggcagaagcggagaagctctgagcctcctgaagaaaagattctcccatagacccgtgcaggagaagttcgtgtgcctgaactgcggcttcgagacacacgcagccgagcaagccgccctgaacatcgccagatcctggctgttcctgcggagccaggagtacaagaaataccagacaaacaagacaaccggcaacaccgataagagagccttcgtcgagacctggcagtccttttaccggaagaagcttaaggaggtgtggaaacctgccgtgcggtctggcggatctggcggaggctccatggcccagggcctggtgaccttcagggacgtggccatcgagttcagcctggaggagtggaagtgcctggagcccgcccagagggacctgtacagggaggtgaccctggagaacttcggccacctggccagcctgggcctgagcatcagcaagcccgacgtggtgagcctgctggagcagggcaaggagccctggatgatcgccaacgacgtgaccggcccctggtaccccgacctggagagcggcggcccaagcagcggcgcccctcctcccagcggcggcagcccagccggctccccaacctctaccgaggagggcacctctgagtccgccacccccgagagcggccctggcacctccaccgagcccagcgagggcagcgcacccggcagccctgccggcagccccacctccacagaggagggaaccagcaccgagcccagcgaaggcagcgccccaggcaccagcaccgagcctagtgagcaggagattaaacggatcaacaagatcagaagaagacttgtgaaagacagcaacaccaagaaggccggcaagacaggccccatgaaaaccctgctggttagagtgatgacacccgatctgagagagcggctggaaaacctgagaaagaagcctgaaaatatcccccagcccatcagcaatacatctagagccaacctgaataagctgctgaccgattacaccgaaatgaagaaggcgatcctgcatgtgtactgggaagagttccagaaggaccctgtgggcctgatgagccgggtggcccagcctgccagcaagaagatcgatcagaacaagctgaaacctgagatggacgagaagggcaacctgaccaccgccggctttgcctgctctcagtgtggccagcccctgttcgtgtacaagctggagcaggtgtctgagaagggcaaggcttacaccaactacttcggacggtgcaatgtggccgagcacgaaaagctgatcctgctggcccagctgaagcccgagaaggatagcgacgaagccgtgacatatagcctgggaaagtttgggcagagggccctggatttctacagcattcatgtgaccaaggagtccacccaccccgtgaagcccctggcccagatcgccggaaacagatacgcctccggacctgtgggaaaggccctgagcgacgcatgtatgggcacaatcgcctccttcctgtctaagtaccaggacatcatcatcgaacaccagaaggtggtgaagggcaaccagaagagactggagagcctgcgggagctggccggcaaggaaaacctggaataccctagcgtgaccctgccacctcagcctcacaccaaggagggcgttgatgcctacaacgaagtgatcgcccgggtgcgaatgtgggtgaacctgaacctgtggcagaagctgaagctaagcagagatgatgccaagcctctgctgagactgaagggattcccttcctttcctctggtcgagagacaggccaacgaagtggactggtgggacatggtgtgtaacgtgaagaagctgatcaacgagaaaaaggaggatggcaaggtgttttggcagaatctggctggctacaagagacaggaagccctgagaccatacctgagcagcgaggaagatcggaagaagggaaagaaattcgctcggtaccagctgggcgacctgctgctgcacctggaaaagaagcacggcgaggactggggaaaggtgtacgacgaggcctgggagcggattgacaagaaagtggaaggcctgagcaagcacatcaagctggaagaggaacggagaagcgaggacgcccagagcaaggccgccctgaccgactggctgcgggctaaggccagcttcgtgatcgagggcctgaaggaggccgacaaggacgagttctgcagatgcgagctgaagctgcagaagtggtacggggacctgcggggaaagcccttcgccatcgaagccgagaacagcatcctggacatcagcggcttcagcaagcagtacaactgtgccttcatctggcagaaggacggcgtgaagaagctgaacctgtacctgatcatcaactacttcaagggcggcaagctgcggttcaagaagatcaaacctgaagccttcgaagccaacagattctacaccgtgatcaacaaaaagagcggcgagatcgtgcccatggaggtgaacttcaacttcgacgaccccaacctgatcatcctgcctctggcctttggcaagagacagggcagagaattcatctggaacgacctgctgtccctggaaaccggcagcctgaagctggccaacggaagagtgatcgagaagacactgtacaacagaagaacccggcaggatgagcctgccctgttcgtggccctgaccttcgagcggcgggaggtcctggactcctccaatatcaaaccaatgaacctgatcggcgtggcaagaggcgaaaacatccccgccgtgatcgccctgaccgaccccgagggctgcccactgagccggtttaaggatagcctgggaaacccaacccacatcctgagaatcggcgagagctataaggagaagcagcggaccatccaggccaagaaggaggtggagcagcggagagccggcggctacagccggaagtacgccagcaaagccaagaatctggcagacgatatggtgagaaacaccgctagagatctgctgtactacgccgtgacccaggatgccatgctgatcttcgccaacctgagccggggcttcggccggcagggcaagcggaccttcatggccgagagacagtacacacggatggaggactggctgaccgccaagctggcctacgagggcctgagcaagacctacctgtccaagacactggcccagtacacctccaagacatgcagcaactgtgggtttaccatcaccagcgccgactacgacagggtgctggagaagctgaagaagacagcaacaggctggatgaccacaattaacggcaaggagctgaaggtggagggccagattacctactacaacagatacaagagacagaacgtagtcaaggacctgtccgtcgagctggatagactgagcgaagaatctgtgaacaacgacatctcctcctggacaaagggcagaagcggagaagctctgagcctcctgaagaaaagattctcccatagacccgtgcaggagaagttcgtgtgcctgaactgcggcttcgagacacacgcagccgagcaagccgccctgaacatcgccagatcctggctgttcctgcggagccaggagtacaagaaataccagacaaacaagacaaccggcaacaccgataagagagccttcgtcgagacctggcagtccttttaccggaagaagcttaaggaggtgtggaaacctgccgtgcggtctggcggatctggcggaggctcctatggcccagggcctggtgaccttcagggacgtggccatcgagttcagcctggaggagtggaagtgcctggagcccgcccagagggacctgtacagggaggtgaccctggagaacttcggccacctggccagcctgggcctgagcatcagcaagcccgacgtggtgagcctgctggagcagggcaaggagccctggatgatcgccaacgacgtgaccggcccctggtaccccgacctggagagcggatctggctccggcagcggccccaagaaaaagagaaaagtctaagctgccttctgcggggcttgccttctggccatgcccttcttctctcccttgcacctgtacctcttggtctttgaataaagcctgagtaggaaggctagcaaaaaaaaaaaaaaaaaaaaaaaaaaaaaaaaaaaaaaaaaaaaaaaaaaaaaaaaaaaaaaaaaaaaaaaaaaaaaaaa

SEQ ID NO: 16826 - RNA, 9485 nt, synthetic construct
  source 1..9485: mol_type = other RNA
aggaaataagagagaaaagaagagtaagaagaaatataagagccaccatggcccctaagaagaagcgtaaagtgagccggatggaacgcctcgtctacgaggtgcggcagaagtgcagaaacatcgaggacatctgcatctcctgcggatctctgaacgtgaccctggagcacccactgttcatcggcggcatgtgccagaactgtaaaaactgttttctggagtgtgcctatcaatacgacgatgacggctaccagagctactgcaccatctgttgcggcggaagagaggtgctgatgtgtggaaataacaactgctgccggtgcttctgcgtggaatgcgtggacctgctggtgggccccggcgccgcccaggccgctattaaggaagatccttggaactgctacatgtgcggccacaagggcacatacggcctgctgagacggagagaggactggcctagcagactgcagatgttcttcgccaataaccacgaccaggagttcgacccccctaaggtgtaccctcccgtccccgccgagaagagaaagcccatccgggtcctgagcctgttcgatggcatcgccaccggtctgctggtgctgaaggacctgggcatccaggtggataggtacattgcctccgaggtgtgcgaggactccatcaccgtgggaatggtgcgtcatcagggcaagatcatgtacgtgggcgacgtgcggagcgtgacacagaagcatatccaggagtggggccctttcgacctggtgatcggcggcagcccttgcaatgacctgagcatcgtgaacccagcccggaagggcctgtacgagggaaccggcagactgttcttcgagttttacagactgctgcacgacgcccggcctaaggaaggcgacgaccggcccttcttttggctgttcgagaatgtggtggccatgggagtcagcgacaagcgggatattagccggttcctggagagcaaccccgtgatgatcgatgccaaggaagtgagcgccgcccaccgggccagatacttctggggcaatctgcctggcatgaacagacccctggccagcaccgtgaacgacaagctggagctgcaggagtgcctggagcacggccggatcgccaagttcagcaaggtgagaaccatcaccacccgaagcaacagcatcaaacaaggcaaggaccagcactttcctgtgttcatgaacgagaaggaggacatcctgtggtgtaccgagatggagagagtgttcgggttcccagtccactacacagatgtcagcaacatgtctagactggccagacagagactgctgggaagaagctggtccgtccctgtgatcagacacctgttcgcccctctgaaggagtacttcgcctgcgtgagcagcggcaacagcaacgccaacagccggggccccagcttctctagcggcctggtgccactgtccctgagagggagccacatgggccccatggagatctacaaaaccgtgagcgcctggaagcggcagcctgtgcgcgtgctgagcctgtttcggaatatcgataaagtcctgaaaagcctgggattcctggagagcggctctggctccggcggtggcaccctgaagtacgtggaggatgtgacaaacgtggtcagacgggatgtggagaagtggggccccttcgatctggtgtacggcagcacccaacccctgggcagctcttgtgaccggtgccctggctggtacatgtttcagttccaccggatcctgcagtacgccctgccgagacaggagtcccagcggccattcttttggattttcatggacaacttgctgctgaccgaggatgaccaggaaactaccactcggttcctgcagaccgaagccgtgaccctgcaggacgtgagaggccgggactaccagaacgccatgcgggtgtggtccaacatccctggactgaaaagcaagcacgcacctctgacccctaaagaagaggagtacctgcaggcccaggtgcggagcagaagcaagctggacgcccctaaggtggatctgctggtgaagaattgcctcctgcccctgagagagtacttcaagtatttcagccagaatagtctgcccctgggaggcagcggcggcggcgccctggtgacatttgaggacgtcgccgtgcggttcacccaggaggaatgggctctgctggatccttctcagaaaatcctgtaccgggacgtgatgagagagacataccggaatctgacctccgtgggcatcaactgggaatgttgggaccttgaagcctgcttcagaagcctgggaagaaacctgagagtgcaggtggtgaagagaaagtgcgagctgaccaacagcggcccctgcgccgagggcggcccaagcagcggcgcccctcctcccagcggcggcagcccagccggctccccaacctctaccgaggagggcacctctgagtccgccacccccgagagcggccctggcacctccaccgagcccagcgagggcagcgcacccggcagccctgccggcagccccacctccacagaggagggaaccagcaccgagcccagcgaaggcagcgccccaggcaccagcaccgagcctagtgagcaggagattaaacggatcaacaagatcagaagaagacttgtgaaagacagcaacaccaagaaggccggcaagacaggccccatgaaaaccctgctggttagagtgatgacacccgatctgagagagcggctggaaaacctgagaaagaagcctgaaaatatcccccagcccatcagcaatacatctagagccaacctgaataagctgctgaccgattacaccgaaatgaagaaggcgatcctgcatgtgtactgggaagagttccagaaggaccctgtgggcctgatgagccgggtggcccagcctgccagcaagaagatcgatcagaacaagctgaaacctgagatggacgagaagggcaacctgaccaccgccggctttgcctgctctcagtgtggccagcccctgttcgtgtacaagctggagcaggtgtctgagaagggcaaggcttacaccaactacttcggacggtgcaatgtggccgagcacgaaaagctgatcctgctggcccagctgaagcccgagaaggatagcgacgaagccgtgacatatagcctgggaaagtttgggcagagggccctggatttctacagcattcatgtgaccaaggagtccacccaccccgtgaagcccctggcccagatcgccggaaacagatacgcctccggacctgtgggaaaggccctgagcgacgcatgtatgggcacaatcgcctccttcctgtctaagtaccaggacatcatcatcgaacaccagaaggtggtgaagggcaaccagaagagactggagagcctgcgggagctggccggcaaggaaaacctggaataccctagcgtgaccctgccacctcagcctcacaccaaggagggcgttgatgcctacaacgaagtgatcgcccgggtgcgaatgtgggtgaacctgaacctgtggcagaagctgaagctaagcagagatgatgccaagcctctgctgagactgaagggattcccttcctttcctctggtcgagagacaggccaacgaagtggactggtgggacatggtgtgtaacgtgaagaagctgatcaacgagaaaaaggaggatggcaaggtgttttggcagaatctggctggctacaagagacaggaagccctgagaccatacctgagcagcgaggaagatcggaagaagggaaagaaattcgctcggtaccagctgggcgacctgctgctgcacctggaaaagaagcacggcgaggactggggaaaggtgtacgacgaggcctgggagcggattgacaagaaagtggaaggcctgagcaagcacatcaagctggaagaggaacggagaagcgaggacgcccagagcaaggccgccctgaccgactggctgcgggctaaggccagcttcgtgatcgagggcctgaaggaggccgacaaggacgagttctgcagatgcgagctgaagctgcagaagtggtacggggacctgcggggaaagcccttcgccatcgaagccgagaacagcatcctggacatcagcggcttcagcaagcagtacaactgtgccttcatctggcagaaggacggcgtgaagaagctgaacctgtacctgatcatcaactacttcaagggcggcaagctgcggttcaagaagatcaaacctgaagccttcgaagccaacagattctacaccgtgatcaacaaaaagagcggcgagatcgtgcccatggaggtgaacttcaacttcgacgaccccaacctgatcatcctgcctctggcctttggcaagagacagggcagagaattcatctggaacgacctgctgtccctggaaaccggcagcctgaagctggccaacggaagagtgatcgagaagacactgtacaacagaagaacccggcaggatgagcctgccctgttcgtggccctgaccttcgagcggcgggaggtcctggactcctccaatatcaaaccaatgaacctgatcggcgtggcaagaggcgaaaacatccccgccgtgatcgccctgaccgaccccgagggctgcccactgagccggtttaaggatagcctgggaaacccaacccacatcctgagaatcggcgagagctataaggagaagcagcggaccatccaggccaagaaggaggtggagcagcggagagccggcggctacagccggaagtacgccagcaaagccaagaatctggcagacgatatggtgagaaacaccgctagagatctgctgtactacgccgtgacccaggatgccatgctgatcttcgccaacctgagccggggcttcggccggcagggcaagcggaccttcatggccgagagacagtacacacggatggaggactggctgaccgccaagctggcctacgagggcctgagcaagacctacctgtccaagacactggcccagtacacctccaagacatgcagcaactgtgggtttaccatcaccagcgccgactacgacagggtgctggagaagctgaagaagacagcaacaggctggatgaccacaattaacggcaaggagctgaaggtggagggccagattacctactacaacagatacaagagacagaacgtagtcaaggacctgtccgtcgagctggatagactgagcgaagaatctgtgaacaacgacatctcctcctggacaaagggcagaagcggagaagctctgagcctcctgaagaaaagattctcccatagacccgtgcaggagaagttcgtgtgcctgaactgcggcttcgagacacacgcagccgagcaagccgccctgaacatcgccagatcctggctgttcctgcggagccaggagtacaagaaataccagacaaacaagacaaccggcaacaccgataagagagccttcgtcgagacctggcagtccttttaccggaagaagcttaaggaggtgtggaaacctgccgtgcggtctggcggatctggcggaggctccgcccagaaggtgctgaccttcagggacgtggccatcgagttcagcctggaggagtggaagttcctggaccccgcccagcagaacctgtacagggacgtgatgctggagaactacaggaacctgttcagcatcggcctgaccgtgagcaagcccggcctgatcacctgcctggagcagaggaaggccccctggaacctgaagaggagggaggccgtggacggccacatcttcttcgccgagtacggcggcccaagcagcggcgcccctcctcccagcggcggcagcccagccggctccccaacctctaccgaggagggcacctctgagtccgccacccccgagagcggccctggcacctccaccgagcccagcgagggcagcgcacccggcagccctgccggcagccccacctccacagaggagggaaccagcaccgagcccagcgaaggcagcgccccaggcaccagcaccgagcctagtgagcaggagattaaacggatcaacaagatcagaagaagacttgtgaaagacagcaacaccaagaaggccggcaagacaggccccatgaaaaccctgctggttagagtgatgacacccgatctgagagagcggctggaaaacctgagaaagaagcctgaaaatatcccccagcccatcagcaatacatctagagccaacctgaataagctgctgaccgattacaccgaaatgaagaaggcgatcctgcatgtgtactgggaagagttccagaaggaccctgtgggcctgatgagccgggtggcccagcctgccagcaagaagatcgatcagaacaagctgaaacctgagatggacgagaagggcaacctgaccaccgccggctttgcctgctctcagtgtggccagcccctgttcgtgtacaagctggagcaggtgtctgagaagggcaaggcttacaccaactacttcggacggtgcaatgtggccgagcacgaaaagctgatcctgctggcccagctgaagcccgagaaggatagcgacgaagccgtgacatatagcctgggaaagtttgggcagagggccctggatttctacagcattcatgtgaccaaggagtccacccaccccgtgaagcccctggcccagatcgccggaaacagatacgcctccggacctgtgggaaaggccctgagcgacgcatgtatgggcacaatcgcctccttcctgtctaagtaccaggacatcatcatcgaacaccagaaggtggtgaagggcaaccagaagagactggagagcctgcgggagctggccggcaaggaaaacctggaataccctagcgtgaccctgccacctcagcctcacaccaaggagggcgttgatgcctacaacgaagtgatcgcccgggtgcgaatgtgggtgaacctgaacctgtggcagaagctgaagctaagcagagatgatgccaagcctctgctgagactgaagggattcccttcctttcctctggtcgagagacaggccaacgaagtggactggtgggacatggtgtgtaacgtgaagaagctgatcaacgagaaaaaggaggatggcaaggtgttttggcagaatctggctggctacaagagacaggaagccctgagaccatacctgagcagcgaggaagatcggaagaagggaaagaaattcgctcggtaccagctgggcgacctgctgctgcacctggaaaagaagcacggcgaggactggggaaaggtgtacgacgaggcctgggagcggattgacaagaaagtggaaggcctgagcaagcacatcaagctggaagaggaacggagaagcgaggacgcccagagcaaggccgccctgaccgactggctgcgggctaaggccagcttcgtgatcgagggcctgaaggaggccgacaaggacgagttctgcagatgcgagctgaagctgcagaagtggtacggggacctgcggggaaagcccttcgccatcgaagccgagaacagcatcctggacatcagcggcttcagcaagcagtacaactgtgccttcatctggcagaaggacggcgtgaagaagctgaacctgtacctgatcatcaactacttcaagggcggcaagctgcggttcaagaagatcaaacctgaagccttcgaagccaacagattctacaccgtgatcaacaaaaagagcggcgagatcgtgcccatggaggtgaacttcaacttcgacgaccccaacctgatcatcctgcctctggcctttggcaagagacagggcagagaattcatctggaacgacctgctgtccctggaaaccggcagcctgaagctggccaacggaagagtgatcgagaagacactgtacaacagaagaacccggcaggatgagcctgccctgttcgtggccctgaccttcgagcggcgggaggtcctggactcctccaatatcaaaccaatgaacctgatcggcgtggcaagaggcgaaaacatccccgccgtgatcgccctgaccgaccccgagggctgcccactgagccggtttaaggatagcctgggaaacccaacccacatcctgagaatcggcgagagctataaggagaagcagcggaccatccaggccaagaaggaggtggagcagcggagagccggcggctacagccggaagtacgccagcaaagccaagaatctggcagacgatatggtgagaaacaccgctagagatctgctgtactacgccgtgacccaggatgccatgctgatcttcgccaacctgagccggggcttcggccggcagggcaagcggaccttcatggccgagagacagtacacacggatggaggactggctgaccgccaagctggcctacgagggcctgagcaagacctacctgtccaagacactggcccagtacacctccaagacatgcagcaactgtgggtttaccatcaccagcgccgactacgacagggtgctggagaagctgaagaagacagcaacaggctggatgaccacaattaacggcaaggagctgaaggtggagggccagattacctactacaacagatacaagagacagaacgtagtcaaggacctgtccgtcgagctggatagactgagcgaagaatctgtgaacaacgacatctcctcctggacaaagggcagaagcggagaagctctgagcctcctgaagaaaagattctcccatagacccgtgcaggagaagttcgtgtgcctgaactgcggcttcgagacacacgcagccgagcaagccgccctgaacatcgccagatcctggctgttcctgcggagccaggagtacaagaaataccagacaaacaagacaaccggcaacaccgataagagagccttcgtcgagacctggcagtccttttaccggaagaagcttaaggaggtgtggaaacctgccgtgcggtctggcggatctggcggaggctcctgcccagaaggtgctgaccttcagggacgtggccatcgagttcagcctggaggagtggaagttcctggaccccgcccagcagaacctgtacagggacgtgatgctggagaactacaggaacctgttcagcatcggcctgaccgtgagcaagcccggcctgatcacctgcctggagcagaggaaggccccctggaacctgaagaggagggaggccgtggacggccacatcttcttcgccgagtacggatctggctccggcagcggccccaagaaaaagagaaaagtctaagctgccttctgcggggcttgccttctggccatgcccttcttctctcccttgcacctgtacctcttggtctttgaataaagcctgagtaggaaggctagcaaaaaaaaaaaaaaaaaaaaaaaaaaaaaaaaaaaaaaaaaaaaaaaaaaaaaaaaaaaaaaaaaaaaaaaaaaaaaaaa

SEQ ID NO: 16827 - RNA, 9485 nt, synthetic construct
  source 1..9485: mol_type = other RNA
aggaaataagagagaaaagaagagtaagaagaaatataagagccaccatggcccctaagaagaagcgtaaagtgagccggatggaacgcctcgtctacgaggtgcggcagaagtgcagaaacatcgaggacatctgcatctcctgcggatctctgaacgtgaccctggagcacccactgttcatcggcggcatgtgccagaactgtaaaaactgttttctggagtgtgcctatcaatacgacgatgacggctaccagagctactgcaccatctgttgcggcggaagagaggtgctgatgtgtggaaataacaactgctgccggtgcttctgcgtggaatgcgtggacctgctggtgggccccggcgccgcccaggccgctattaaggaagatccttggaactgctacatgtgcggccacaagggcacatacggcctgctgagacggagagaggactggcctagcagactgcagatgttcttcgccaataaccacgaccaggagttcgacccccctaaggtgtaccctcccgtccccgccgagaagagaaagcccatccgggtcctgagcctgttcgatggcatcgccaccggtctgctggtgctgaaggacctgggcatccaggtggataggtacattgcctccgaggtgtgcgaggactccatcaccgtgggaatggtgcgtcatcagggcaagatcatgtacgtgggcgacgtgcggagcgtgacacagaagcatatccaggagtggggccctttcgacctggtgatcggcggcagcccttgcaatgacctgagcatcgtgaacccagcccggaagggcctgtacgagggaaccggcagactgttcttcgagttttacagactgctgcacgacgcccggcctaaggaaggcgacgaccggcccttcttttggctgttcgagaatgtggtggccatgggagtcagcgacaagcgggatattagccggttcctggagagcaaccccgtgatgatcgatgccaaggaagtgagcgccgcccaccgggccagatacttctggggcaatctgcctggcatgaacagacccctggccagcaccgtgaacgacaagctggagctgcaggagtgcctggagcacggccggatcgccaagttcagcaaggtgagaaccatcaccacccgaagcaacagcatcaaacaaggcaaggaccagcactttcctgtgttcatgaacgagaaggaggacatcctgtggtgtaccgagatggagagagtgttcgggttcccagtccactacacagatgtcagcaacatgtctagactggccagacagagactgctgggaagaagctggtccgtccctgtgatcagacacctgttcgcccctctgaaggagtacttcgcctgcgtgagcagcggcaacagcaacgccaacagccggggccccagcttctctagcggcctggtgccactgtccctgagagggagccacatgggccccatggagatctacaaaaccgtgagcgcctggaagcggcagcctgtgcgcgtgctgagcctgtttcggaatatcgataaagtcctgaaaagcctgggattcctggagagcggctctggctccggcggtggcaccctgaagtacgtggaggatgtgacaaacgtggtcagacgggatgtggagaagtggggccccttcgatctggtgtacggcagcacccaacccctgggcagctcttgtgaccggtgccctggctggtacatgtttcagttccaccggatcctgcagtacgccctgccgagacaggagtcccagcggccattcttttggattttcatggacaacttgctgctgaccgaggatgaccaggaaactaccactcggttcctgcagaccgaagccgtgaccctgcaggacgtgagaggccgggactaccagaacgccatgcgggtgtggtccaacatccctggactgaaaagcaagcacgcacctctgacccctaaagaagaggagtacctgcaggcccaggtgcggagcagaagcaagctggacgcccctaaggtggatctgctggtgaagaattgcctcctgcccctgagagagtacttcaagtatttcagccagaatagtctgcccctgggaggcagcggcggcggcgccctggtgacatttgaggacgtcgccgtgcggttcacccaggaggaatgggctctgctggatccttctcagaaaatcctgtaccgggacgtgatgagagagacataccggaatctgacctccgtgggcatcaactgggaatgttgggaccttgaagcctgcttcagaagcctgggaagaaacctgagagtgcaggtggtgaagagaaagtgcgagctgaccaacagcggcccctgcgccgagggcggcccaagcagcggcgcccctcctcccagcggcggcagcccagccggctccccaacctctaccgaggagggcacctctgagtccgccacccccgagagcggccctggcacctccaccgagcccagcgagggcagcgcacccggcagccctgccggcagccccacctccacagaggagggaaccagcaccgagcccagcgaaggcagcgccccaggcaccagcaccgagcctagtgagcaggagattaaacggatcaacaagatcagaagaagacttgtgaaagacagcaacaccaagaaggccggcaagacaggccccatgaaaaccctgctggttagagtgatgacacccgatctgagagagcggctggaaaacctgagaaagaagcctgaaaatatcccccagcccatcagcaatacatctagagccaacctgaataagctgctgaccgattacaccgaaatgaagaaggcgatcctgcatgtgtactgggaagagttccagaaggaccctgtgggcctgatgagccgggtggcccagcctgccagcaagaagatcgatcagaacaagctgaaacctgagatggacgagaagggcaacctgaccaccgccggctttgcctgctctcagtgtggccagcccctgttcgtgtacaagctggagcaggtgtctgagaagggcaaggcttacaccaactacttcggacggtgcaatgtggccgagcacgaaaagctgatcctgctggcccagctgaagcccgagaaggatagcgacgaagccgtgacatatagcctgggaaagtttgggcagagggccctggatttctacagcattcatgtgaccaaggagtccacccaccccgtgaagcccctggcccagatcgccggaaacagatacgcctccggacctgtgggaaaggccctgagcgacgcatgtatgggcacaatcgcctccttcctgtctaagtaccaggacatcatcatcgaacaccagaaggtggtgaagggcaaccagaagagactggagagcctgcgggagctggccggcaaggaaaacctggaataccctagcgtgaccctgccacctcagcctcacaccaaggagggcgttgatgcctacaacgaagtgatcgcccgggtgcgaatgtgggtgaacctgaacctgtggcagaagctgaagctaagcagagatgatgccaagcctctgctgagactgaagggattcccttcctttcctctggtcgagagacaggccaacgaagtggactggtgggacatggtgtgtaacgtgaagaagctgatcaacgagaaaaaggaggatggcaaggtgttttggcagaatctggctggctacaagagacaggaagccctgagaccatacctgagcagcgaggaagatcggaagaagggaaagaaattcgctcggtaccagctgggcgacctgctgctgcacctggaaaagaagcacggcgaggactggggaaaggtgtacgacgaggcctgggagcggattgacaagaaagtggaaggcctgagcaagcacatcaagctggaagaggaacggagaagcgaggacgcccagagcaaggccgccctgaccgactggctgcgggctaaggccagcttcgtgatcgagggcctgaaggaggccgacaaggacgagttctgcagatgcgagctgaagctgcagaagtggtacggggacctgcggggaaagcccttcgccatcgaagccgagaacagcatcctggacatcagcggcttcagcaagcagtacaactgtgccttcatctggcagaaggacggcgtgaagaagctgaacctgtacctgatcatcaactacttcaagggcggcaagctgcggttcaagaagatcaaacctgaagccttcgaagccaacagattctacaccgtgatcaacaaaaagagcggcgagatcgtgcccatggaggtgaacttcaacttcgacgaccccaacctgatcatcctgcctctggcctttggcaagagacagggcagagaattcatctggaacgacctgctgtccctggaaaccggcagcctgaagctggccaacggaagagtgatcgagaagacactgtacaacagaagaacccggcaggatgagcctgccctgttcgtggccctgaccttcgagcggcgggaggtcctggactcctccaatatcaaaccaatgaacctgatcggcgtggcaagaggcgaaaacatccccgccgtgatcgccctgaccgaccccgagggctgcccactgagccggtttaaggatagcctgggaaacccaacccacatcctgagaatcggcgagagctataaggagaagcagcggaccatccaggccaagaaggaggtggagcagcggagagccggcggctacagccggaagtacgccagcaaagccaagaatctggcagacgatatggtgagaaacaccgctagagatctgctgtactacgccgtgacccaggatgccatgctgatcttcgccaacctgagccggggcttcggccggcagggcaagcggaccttcatggccgagagacagtacacacggatggaggactggctgaccgccaagctggcctacgagggcctgagcaagacctacctgtccaagacactggcccagtacacctccaagacatgcagcaactgtgggtttaccatcaccagcgccgactacgacagggtgctggagaagctgaagaagacagcaacaggctggatgaccacaattaacggcaaggagctgaaggtggagggccagattacctactacaacagatacaagagacagaacgtagtcaaggacctgtccgtcgagctggatagactgagcgaagaatctgtgaacaacgacatctcctcctggacaaagggcagaagcggagaagctctgagcctcctgaagaaaagattctcccatagacccgtgcaggagaagttcgtgtgcctgaactgcggcttcgagacacacgcagccgagcaagccgccctgaacatcgccagatcctggctgttcctgcggagccaggagtacaagaaataccagacaaacaagacaaccggcaacaccgataagagagccttcgtcgagacctggcagtccttttaccggaagaagcttaaggaggtgtggaaacctgccgtgcggtctggcggatctggcggaggctccaccatgaccaccgtgagcagcaccgccaggccccaggagagcgtggccttcgacgacgtggccgtgtacttcaccaagaaggagtgggccatcatggtgcccgaccagagggccctgtacagggacgtgatgctggagaactacgaggccgtggccttcgtggtgccccccaccagcaagcccgccctgatcagccacctggagcagggcaaggagccctgcttcacccagccccagggcgtgggcggcccaagcagcggcgcccctcctcccagcggcggcagcccagccggctccccaacctctaccgaggagggcacctctgagtccgccacccccgagagcggccctggcacctccaccgagcccagcgagggcagcgcacccggcagccctgccggcagccccacctccacagaggagggaaccagcaccgagcccagcgaaggcagcgccccaggcaccagcaccgagcctagtgagcaggagattaaacggatcaacaagatcagaagaagacttgtgaaagacagcaacaccaagaaggccggcaagacaggccccatgaaaaccctgctggttagagtgatgacacccgatctgagagagcggctggaaaacctgagaaagaagcctgaaaatatcccccagcccatcagcaatacatctagagccaacctgaataagctgctgaccgattacaccgaaatgaagaaggcgatcctgcatgtgtactgggaagagttccagaaggaccctgtgggcctgatgagccgggtggcccagcctgccagcaagaagatcgatcagaacaagctgaaacctgagatggacgagaagggcaacctgaccaccgccggctttgcctgctctcagtgtggccagcccctgttcgtgtacaagctggagcaggtgtctgagaagggcaaggcttacaccaactacttcggacggtgcaatgtggccgagcacgaaaagctgatcctgctggcccagctgaagcccgagaaggatagcgacgaagccgtgacatatagcctgggaaagtttgggcagagggccctggatttctacagcattcatgtgaccaaggagtccacccaccccgtgaagcccctggcccagatcgccggaaacagatacgcctccggacctgtgggaaaggccctgagcgacgcatgtatgggcacaatcgcctccttcctgtctaagtaccaggacatcatcatcgaacaccagaaggtggtgaagggcaaccagaagagactggagagcctgcgggagctggccggcaaggaaaacctggaataccctagcgtgaccctgccacctcagcctcacaccaaggagggcgttgatgcctacaacgaagtgatcgcccgggtgcgaatgtgggtgaacctgaacctgtggcagaagctgaagctaagcagagatgatgccaagcctctgctgagactgaagggattcccttcctttcctctggtcgagagacaggccaacgaagtggactggtgggacatggtgtgtaacgtgaagaagctgatcaacgagaaaaaggaggatggcaaggtgttttggcagaatctggctggctacaagagacaggaagccctgagaccatacctgagcagcgaggaagatcggaagaagggaaagaaattcgctcggtaccagctgggcgacctgctgctgcacctggaaaagaagcacggcgaggactggggaaaggtgtacgacgaggcctgggagcggattgacaagaaagtggaaggcctgagcaagcacatcaagctggaagaggaacggagaagcgaggacgcccagagcaaggccgccctgaccgactggctgcgggctaaggccagcttcgtgatcgagggcctgaaggaggccgacaaggacgagttctgcagatgcgagctgaagctgcagaagtggtacggggacctgcggggaaagcccttcgccatcgaagccgagaacagcatcctggacatcagcggcttcagcaagcagtacaactgtgccttcatctggcagaaggacggcgtgaagaagctgaacctgtacctgatcatcaactacttcaagggcggcaagctgcggttcaagaagatcaaacctgaagccttcgaagccaacagattctacaccgtgatcaacaaaaagagcggcgagatcgtgcccatggaggtgaacttcaacttcgacgaccccaacctgatcatcctgcctctggcctttggcaagagacagggcagagaattcatctggaacgacctgctgtccctggaaaccggcagcctgaagctggccaacggaagagtgatcgagaagacactgtacaacagaagaacccggcaggatgagcctgccctgttcgtggccctgaccttcgagcggcgggaggtcctggactcctccaatatcaaaccaatgaacctgatcggcgtggcaagaggcgaaaacatccccgccgtgatcgccctgaccgaccccgagggctgcccactgagccggtttaaggatagcctgggaaacccaacccacatcctgagaatcggcgagagctataaggagaagcagcggaccatccaggccaagaaggaggtggagcagcggagagccggcggctacagccggaagtacgccagcaaagccaagaatctggcagacgatatggtgagaaacaccgctagagatctgctgtactacgccgtgacccaggatgccatgctgatcttcgccaacctgagccggggcttcggccggcagggcaagcggaccttcatggccgagagacagtacacacggatggaggactggctgaccgccaagctggcctacgagggcctgagcaagacctacctgtccaagacactggcccagtacacctccaagacatgcagcaactgtgggtttaccatcaccagcgccgactacgacagggtgctggagaagctgaagaagacagcaacaggctggatgaccacaattaacggcaaggagctgaaggtggagggccagattacctactacaacagatacaagagacagaacgtagtcaaggacctgtccgtcgagctggatagactgagcgaagaatctgtgaacaacgacatctcctcctggacaaagggcagaagcggagaagctctgagcctcctgaagaaaagattctcccatagacccgtgcaggagaagttcgtgtgcctgaactgcggcttcgagacacacgcagccgagcaagccgccctgaacatcgccagatcctggctgttcctgcggagccaggagtacaagaaataccagacaaacaagacaaccggcaacaccgataagagagccttcgtcgagacctggcagtccttttaccggaagaagcttaaggaggtgtggaaacctgccgtgcggtctggcggatctggcggaggctcctaccatgaccaccgtgagcagcaccgccaggccccaggagagcgtggccttcgacgacgtggccgtgtacttcaccaagaaggagtgggccatcatggtgcccgaccagagggccctgtacagggacgtgatgctggagaactacgaggccgtggccttcgtggtgccccccaccagcaagcccgccctgatcagccacctggagcagggcaaggagccctgcttcacccagccccagggcgtgggatctggctccggcagcggccccaagaaaaagagaaaagtctaagctgccttctgcggggcttgccttctggccatgcccttcttctctcccttgcacctgtacctcttggtctttgaataaagcctgagtaggaaggctagcaaaaaaaaaaaaaaaaaaaaaaaaaaaaaaaaaaaaaaaaaaaaaaaaaaaaaaaaaaaaaaaaaaaaaaaaaaaaaaaa

SEQ ID NO: 16828 - RNA, 9485 nt, synthetic construct
  source 1..9485: mol_type = other RNA
aggaaataagagagaaaagaagagtaagaagaaatataagagccaccatggcccctaagaagaagcgtaaagtgagccggatggaacgcctcgtctacgaggtgcggcagaagtgcagaaacatcgaggacatctgcatctcctgcggatctctgaacgtgaccctggagcacccactgttcatcggcggcatgtgccagaactgtaaaaactgttttctggagtgtgcctatcaatacgacgatgacggctaccagagctactgcaccatctgttgcggcggaagagaggtgctgatgtgtggaaataacaactgctgccggtgcttctgcgtggaatgcgtggacctgctggtgggccccggcgccgcccaggccgctattaaggaagatccttggaactgctacatgtgcggccacaagggcacatacggcctgctgagacggagagaggactggcctagcagactgcagatgttcttcgccaataaccacgaccaggagttcgacccccctaaggtgtaccctcccgtccccgccgagaagagaaagcccatccgggtcctgagcctgttcgatggcatcgccaccggtctgctggtgctgaaggacctgggcatccaggtggataggtacattgcctccgaggtgtgcgaggactccatcaccgtgggaatggtgcgtcatcagggcaagatcatgtacgtgggcgacgtgcggagcgtgacacagaagcatatccaggagtggggccctttcgacctggtgatcggcggcagcccttgcaatgacctgagcatcgtgaacccagcccggaagggcctgtacgagggaaccggcagactgttcttcgagttttacagactgctgcacgacgcccggcctaaggaaggcgacgaccggcccttcttttggctgttcgagaatgtggtggccatgggagtcagcgacaagcgggatattagccggttcctggagagcaaccccgtgatgatcgatgccaaggaagtgagcgccgcccaccgggccagatacttctggggcaatctgcctggcatgaacagacccctggccagcaccgtgaacgacaagctggagctgcaggagtgcctggagcacggccggatcgccaagttcagcaaggtgagaaccatcaccacccgaagcaacagcatcaaacaaggcaaggaccagcactttcctgtgttcatgaacgagaaggaggacatcctgtggtgtaccgagatggagagagtgttcgggttcccagtccactacacagatgtcagcaacatgtctagactggccagacagagactgctgggaagaagctggtccgtccctgtgatcagacacctgttcgcccctctgaaggagtacttcgcctgcgtgagcagcggcaacagcaacgccaacagccggggccccagcttctctagcggcctggtgccactgtccctgagagggagccacatgggccccatggagatctacaaaaccgtgagcgcctggaagcggcagcctgtgcgcgtgctgagcctgtttcggaatatcgataaagtcctgaaaagcctgggattcctggagagcggctctggctccggcggtggcaccctgaagtacgtggaggatgtgacaaacgtggtcagacgggatgtggagaagtggggccccttcgatctggtgtacggcagcacccaacccctgggcagctcttgtgaccggtgccctggctggtacatgtttcagttccaccggatcctgcagtacgccctgccgagacaggagtcccagcggccattcttttggattttcatggacaacttgctgctgaccgaggatgaccaggaaactaccactcggttcctgcagaccgaagccgtgaccctgcaggacgtgagaggccgggactaccagaacgccatgcgggtgtggtccaacatccctggactgaaaagcaagcacgcacctctgacccctaaagaagaggagtacctgcaggcccaggtgcggagcagaagcaagctggacgcccctaaggtggatctgctggtgaagaattgcctcctgcccctgagagagtacttcaagtatttcagccagaatagtctgcccctgggaggcagcggcggcggcgccctggtgacatttgaggacgtcgccgtgcggttcacccaggaggaatgggctctgctggatccttctcagaaaatcctgtaccgggacgtgatgagagagacataccggaatctgacctccgtgggcatcaactgggaatgttgggaccttgaagcctgcttcagaagcctgggaagaaacctgagagtgcaggtggtgaagagaaagtgcgagctgaccaacagcggcccctgcgccgagggcggcccaagcagcggcgcccctcctcccagcggcggcagcccagccggctccccaacctctaccgaggagggcacctctgagtccgccacccccgagagcggccctggcacctccaccgagcccagcgagggcagcgcacccggcagccctgccggcagccccacctccacagaggagggaaccagcaccgagcccagcgaaggcagcgccccaggcaccagcaccgagcctagtgagcaggagattaaacggatcaacaagatcagaagaagacttgtgaaagacagcaacaccaagaaggccggcaagacaggccccatgaaaaccctgctggttagagtgatgacacccgatctgagagagcggctggaaaacctgagaaagaagcctgaaaatatcccccagcccatcagcaatacatctagagccaacctgaataagctgctgaccgattacaccgaaatgaagaaggcgatcctgcatgtgtactgggaagagttccagaaggaccctgtgggcctgatgagccgggtggcccagcctgccagcaagaagatcgatcagaacaagctgaaacctgagatggacgagaagggcaacctgaccaccgccggctttgcctgctctcagtgtggccagcccctgttcgtgtacaagctggagcaggtgtctgagaagggcaaggcttacaccaactacttcggacggtgcaatgtggccgagcacgaaaagctgatcctgctggcccagctgaagcccgagaaggatagcgacgaagccgtgacatatagcctgggaaagtttgggcagagggccctggatttctacagcattcatgtgaccaaggagtccacccaccccgtgaagcccctggcccagatcgccggaaacagatacgcctccggacctgtgggaaaggccctgagcgacgcatgtatgggcacaatcgcctccttcctgtctaagtaccaggacatcatcatcgaacaccagaaggtggtgaagggcaaccagaagagactggagagcctgcgggagctggccggcaaggaaaacctggaataccctagcgtgaccctgccacctcagcctcacaccaaggagggcgttgatgcctacaacgaagtgatcgcccgggtgcgaatgtgggtgaacctgaacctgtggcagaagctgaagctaagcagagatgatgccaagcctctgctgagactgaagggattcccttcctttcctctggtcgagagacaggccaacgaagtggactggtgggacatggtgtgtaacgtgaagaagctgatcaacgagaaaaaggaggatggcaaggtgttttggcagaatctggctggctacaagagacaggaagccctgagaccatacctgagcagcgaggaagatcggaagaagggaaagaaattcgctcggtaccagctgggcgacctgctgctgcacctggaaaagaagcacggcgaggactggggaaaggtgtacgacgaggcctgggagcggattgacaagaaagtggaaggcctgagcaagcacatcaagctggaagaggaacggagaagcgaggacgcccagagcaaggccgccctgaccgactggctgcgggctaaggccagcttcgtgatcgagggcctgaaggaggccgacaaggacgagttctgcagatgcgagctgaagctgcagaagtggtacggggacctgcggggaaagcccttcgccatcgaagccgagaacagcatcctggacatcagcggcttcagcaagcagtacaactgtgccttcatctggcagaaggacggcgtgaagaagctgaacctgtacctgatcatcaactacttcaagggcggcaagctgcggttcaagaagatcaaacctgaagccttcgaagccaacagattctacaccgtgatcaacaaaaagagcggcgagatcgtgcccatggaggtgaacttcaacttcgacgaccccaacctgatcatcctgcctctggcctttggcaagagacagggcagagaattcatctggaacgacctgctgtccctggaaaccggcagcctgaagctggccaacggaagagtgatcgagaagacactgtacaacagaagaacccggcaggatgagcctgccctgttcgtggccctgaccttcgagcggcgggaggtcctggactcctccaatatcaaaccaatgaacctgatcggcgtggcaagaggcgaaaacatccccgccgtgatcgccctgaccgaccccgagggctgcccactgagccggtttaaggatagcctgggaaacccaacccacatcctgagaatcggcgagagctataaggagaagcagcggaccatccaggccaagaaggaggtggagcagcggagagccggcggctacagccggaagtacgccagcaaagccaagaatctggcagacgatatggtgagaaacaccgctagagatctgctgtactacgccgtgacccaggatgccatgctgatcttcgccaacctgagccggggcttcggccggcagggcaagcggaccttcatggccgagagacagtacacacggatggaggactggctgaccgccaagctggcctacgagggcctgagcaagacctacctgtccaagacactggcccagtacacctccaagacatgcagcaactgtgggtttaccatcaccagcgccgactacgacagggtgctggagaagctgaagaagacagcaacaggctggatgaccacaattaacggcaaggagctgaaggtggagggccagattacctactacaacagatacaagagacagaacgtagtcaaggacctgtccgtcgagctggatagactgagcgaagaatctgtgaacaacgacatctcctcctggacaaagggcagaagcggagaagctctgagcctcctgaagaaaagattctcccatagacccgtgcaggagaagttcgtgtgcctgaactgcggcttcgagacacacgcagccgagcaagccgccctgaacatcgccagatcctggctgttcctgcggagccaggagtacaagaaataccagacaaacaagacaaccggcaacaccgataagagagccttcgtcgagacctggcagtccttttaccggaagaagcttaaggaggtgtggaaacctgccgtgcggtctggcggatctggcggaggctccatgagccaggtgaccttcagcgacgtggccatcgacttcagccacgaggagtgggcctgcctggacagcgcccagagggacctgtacaaggacgtgatggtgcagaactacgagaacctggtgagcgtgggcctgagcgtgaccaagccctacgtgatcatgctgctggaggacggcaaggagccctggatgatggagaagaagctgagcaaggactgggagagcaggtgggagaacaaggagggcggcccaagcagcggcgcccctcctcccagcggcggcagcccagccggctccccaacctctaccgaggagggcacctctgagtccgccacccccgagagcggccctggcacctccaccgagcccagcgagggcagcgcacccggcagccctgccggcagccccacctccacagaggagggaaccagcaccgagcccagcgaaggcagcgccccaggcaccagcaccgagcctagtgagcaggagattaaacggatcaacaagatcagaagaagacttgtgaaagacagcaacaccaagaaggccggcaagacaggccccatgaaaaccctgctggttagagtgatgacacccgatctgagagagcggctggaaaacctgagaaagaagcctgaaaatatcccccagcccatcagcaatacatctagagccaacctgaataagctgctgaccgattacaccgaaatgaagaaggcgatcctgcatgtgtactgggaagagttccagaaggaccctgtgggcctgatgagccgggtggcccagcctgccagcaagaagatcgatcagaacaagctgaaacctgagatggacgagaagggcaacctgaccaccgccggctttgcctgctctcagtgtggccagcccctgttcgtgtacaagctggagcaggtgtctgagaagggcaaggcttacaccaactacttcggacggtgcaatgtggccgagcacgaaaagctgatcctgctggcccagctgaagcccgagaaggatagcgacgaagccgtgacatatagcctgggaaagtttgggcagagggccctggatttctacagcattcatgtgaccaaggagtccacccaccccgtgaagcccctggcccagatcgccggaaacagatacgcctccggacctgtgggaaaggccctgagcgacgcatgtatgggcacaatcgcctccttcctgtctaagtaccaggacatcatcatcgaacaccagaaggtggtgaagggcaaccagaagagactggagagcctgcgggagctggccggcaaggaaaacctggaataccctagcgtgaccctgccacctcagcctcacaccaaggagggcgttgatgcctacaacgaagtgatcgcccgggtgcgaatgtgggtgaacctgaacctgtggcagaagctgaagctaagcagagatgatgccaagcctctgctgagactgaagggattcccttcctttcctctggtcgagagacaggccaacgaagtggactggtgggacatggtgtgtaacgtgaagaagctgatcaacgagaaaaaggaggatggcaaggtgttttggcagaatctggctggctacaagagacaggaagccctgagaccatacctgagcagcgaggaagatcggaagaagggaaagaaattcgctcggtaccagctgggcgacctgctgctgcacctggaaaagaagcacggcgaggactggggaaaggtgtacgacgaggcctgggagcggattgacaagaaagtggaaggcctgagcaagcacatcaagctggaagaggaacggagaagcgaggacgcccagagcaaggccgccctgaccgactggctgcgggctaaggccagcttcgtgatcgagggcctgaaggaggccgacaaggacgagttctgcagatgcgagctgaagctgcagaagtggtacggggacctgcggggaaagcccttcgccatcgaagccgagaacagcatcctggacatcagcggcttcagcaagcagtacaactgtgccttcatctggcagaaggacggcgtgaagaagctgaacctgtacctgatcatcaactacttcaagggcggcaagctgcggttcaagaagatcaaacctgaagccttcgaagccaacagattctacaccgtgatcaacaaaaagagcggcgagatcgtgcccatggaggtgaacttcaacttcgacgaccccaacctgatcatcctgcctctggcctttggcaagagacagggcagagaattcatctggaacgacctgctgtccctggaaaccggcagcctgaagctggccaacggaagagtgatcgagaagacactgtacaacagaagaacccggcaggatgagcctgccctgttcgtggccctgaccttcgagcggcgggaggtcctggactcctccaatatcaaaccaatgaacctgatcggcgtggcaagaggcgaaaacatccccgccgtgatcgccctgaccgaccccgagggctgcccactgagccggtttaaggatagcctgggaaacccaacccacatcctgagaatcggcgagagctataaggagaagcagcggaccatccaggccaagaaggaggtggagcagcggagagccggcggctacagccggaagtacgccagcaaagccaagaatctggcagacgatatggtgagaaacaccgctagagatctgctgtactacgccgtgacccaggatgccatgctgatcttcgccaacctgagccggggcttcggccggcagggcaagcggaccttcatggccgagagacagtacacacggatggaggactggctgaccgccaagctggcctacgagggcctgagcaagacctacctgtccaagacactggcccagtacacctccaagacatgcagcaactgtgggtttaccatcaccagcgccgactacgacagggtgctggagaagctgaagaagacagcaacaggctggatgaccacaattaacggcaaggagctgaaggtggagggccagattacctactacaacagatacaagagacagaacgtagtcaaggacctgtccgtcgagctggatagactgagcgaagaatctgtgaacaacgacatctcctcctggacaaagggcagaagcggagaagctctgagcctcctgaagaaaagattctcccatagacccgtgcaggagaagttcgtgtgcctgaactgcggcttcgagacacacgcagccgagcaagccgccctgaacatcgccagatcctggctgttcctgcggagccaggagtacaagaaataccagacaaacaagacaaccggcaacaccgataagagagccttcgtcgagacctggcagtccttttaccggaagaagcttaaggaggtgtggaaacctgccgtgcggtctggcggatctggcggaggctcctatgagccaggtgaccttcagcgacgtggccatcgacttcagccacgaggagtgggcctgcctggacagcgcccagagggacctgtacaaggacgtgatggtgcagaactacgagaacctggtgagcgtgggcctgagcgtgaccaagccctacgtgatcatgctgctggaggacggcaaggagccctggatgatggagaagaagctgagcaaggactgggagagcaggtgggagaacaaggagggatctggctccggcagcggccccaagaaaaagagaaaagtctaagctgccttctgcggggcttgccttctggccatgcccttcttctctcccttgcacctgtacctcttggtctttgaataaagcctgagtaggaaggctagcaaaaaaaaaaaaaaaaaaaaaaaaaaaaaaaaaaaaaaaaaaaaaaaaaaaaaaaaaaaaaaaaaaaaaaaaaaaaaaaa

SEQ ID NO: 16829 - RNA, 9485 nt, synthetic construct
  source 1..9485: mol_type = other RNA
aggaaataagagagaaaagaagagtaagaagaaatataagagccaccatggcccctaagaagaagcgtaaagtgagccggatggaacgcctcgtctacgaggtgcggcagaagtgcagaaacatcgaggacatctgcatctcctgcggatctctgaacgtgaccctggagcacccactgttcatcggcggcatgtgccagaactgtaaaaactgttttctggagtgtgcctatcaatacgacgatgacggctaccagagctactgcaccatctgttgcggcggaagagaggtgctgatgtgtggaaataacaactgctgccggtgcttctgcgtggaatgcgtggacctgctggtgggccccggcgccgcccaggccgctattaaggaagatccttggaactgctacatgtgcggccacaagggcacatacggcctgctgagacggagagaggactggcctagcagactgcagatgttcttcgccaataaccacgaccaggagttcgacccccctaaggtgtaccctcccgtccccgccgagaagagaaagcccatccgggtcctgagcctgttcgatggcatcgccaccggtctgctggtgctgaaggacctgggcatccaggtggataggtacattgcctccgaggtgtgcgaggactccatcaccgtgggaatggtgcgtcatcagggcaagatcatgtacgtgggcgacgtgcggagcgtgacacagaagcatatccaggagtggggccctttcgacctggtgatcggcggcagcccttgcaatgacctgagcatcgtgaacccagcccggaagggcctgtacgagggaaccggcagactgttcttcgagttttacagactgctgcacgacgcccggcctaaggaaggcgacgaccggcccttcttttggctgttcgagaatgtggtggccatgggagtcagcgacaagcgggatattagccggttcctggagagcaaccccgtgatgatcgatgccaaggaagtgagcgccgcccaccgggccagatacttctggggcaatctgcctggcatgaacagacccctggccagcaccgtgaacgacaagctggagctgcaggagtgcctggagcacggccggatcgccaagttcagcaaggtgagaaccatcaccacccgaagcaacagcatcaaacaaggcaaggaccagcactttcctgtgttcatgaacgagaaggaggacatcctgtggtgtaccgagatggagagagtgttcgggttcccagtccactacacagatgtcagcaacatgtctagactggccagacagagactgctgggaagaagctggtccgtccctgtgatcagacacctgttcgcccctctgaaggagtacttcgcctgcgtgagcagcggcaacagcaacgccaacagccggggccccagcttctctagcggcctggtgccactgtccctgagagggagccacatgggccccatggagatctacaaaaccgtgagcgcctggaagcggcagcctgtgcgcgtgctgagcctgtttcggaatatcgataaagtcctgaaaagcctgggattcctggagagcggctctggctccggcggtggcaccctgaagtacgtggaggatgtgacaaacgtggtcagacgggatgtggagaagtggggccccttcgatctggtgtacggcagcacccaacccctgggcagctcttgtgaccggtgccctggctggtacatgtttcagttccaccggatcctgcagtacgccctgccgagacaggagtcccagcggccattcttttggattttcatggacaacttgctgctgaccgaggatgaccaggaaactaccactcggttcctgcagaccgaagccgtgaccctgcaggacgtgagaggccgggactaccagaacgccatgcgggtgtggtccaacatccctggactgaaaagcaagcacgcacctctgacccctaaagaagaggagtacctgcaggcccaggtgcggagcagaagcaagctggacgcccctaaggtggatctgctggtgaagaattgcctcctgcccctgagagagtacttcaagtatttcagccagaatagtctgcccctgggaggcagcggcggcggcgccctggtgacatttgaggacgtcgccgtgcggttcacccaggaggaatgggctctgctggatccttctcagaaaatcctgtaccgggacgtgatgagagagacataccggaatctgacctccgtgggcatcaactgggaatgttgggaccttgaagcctgcttcagaagcctgggaagaaacctgagagtgcaggtggtgaagagaaagtgcgagctgaccaacagcggcccctgcgccgagggcggcccaagcagcggcgcccctcctcccagcggcggcagcccagccggctccccaacctctaccgaggagggcacctctgagtccgccacccccgagagcggccctggcacctccaccgagcccagcgagggcagcgcacccggcagccctgccggcagccccacctccacagaggagggaaccagcaccgagcccagcgaaggcagcgccccaggcaccagcaccgagcctagtgagcaggagattaaacggatcaacaagatcagaagaagacttgtgaaagacagcaacaccaagaaggccggcaagacaggccccatgaaaaccctgctggttagagtgatgacacccgatctgagagagcggctggaaaacctgagaaagaagcctgaaaatatcccccagcccatcagcaatacatctagagccaacctgaataagctgctgaccgattacaccgaaatgaagaaggcgatcctgcatgtgtactgggaagagttccagaaggaccctgtgggcctgatgagccgggtggcccagcctgccagcaagaagatcgatcagaacaagctgaaacctgagatggacgagaagggcaacctgaccaccgccggctttgcctgctctcagtgtggccagcccctgttcgtgtacaagctggagcaggtgtctgagaagggcaaggcttacaccaactacttcggacggtgcaatgtggccgagcacgaaaagctgatcctgctggcccagctgaagcccgagaaggatagcgacgaagccgtgacatatagcctgggaaagtttgggcagagggccctggatttctacagcattcatgtgaccaaggagtccacccaccccgtgaagcccctggcccagatcgccggaaacagatacgcctccggacctgtgggaaaggccctgagcgacgcatgtatgggcacaatcgcctccttcctgtctaagtaccaggacatcatcatcgaacaccagaaggtggtgaagggcaaccagaagagactggagagcctgcgggagctggccggcaaggaaaacctggaataccctagcgtgaccctgccacctcagcctcacaccaaggagggcgttgatgcctacaacgaagtgatcgcccgggtgcgaatgtgggtgaacctgaacctgtggcagaagctgaagctaagcagagatgatgccaagcctctgctgagactgaagggattcccttcctttcctctggtcgagagacaggccaacgaagtggactggtgggacatggtgtgtaacgtgaagaagctgatcaacgagaaaaaggaggatggcaaggtgttttggcagaatctggctggctacaagagacaggaagccctgagaccatacctgagcagcgaggaagatcggaagaagggaaagaaattcgctcggtaccagctgggcgacctgctgctgcacctggaaaagaagcacggcgaggactggggaaaggtgtacgacgaggcctgggagcggattgacaagaaagtggaaggcctgagcaagcacatcaagctggaagaggaacggagaagcgaggacgcccagagcaaggccgccctgaccgactggctgcgggctaaggccagcttcgtgatcgagggcctgaaggaggccgacaaggacgagttctgcagatgcgagctgaagctgcagaagtggtacggggacctgcggggaaagcccttcgccatcgaagccgagaacagcatcctggacatcagcggcttcagcaagcagtacaactgtgccttcatctggcagaaggacggcgtgaagaagctgaacctgtacctgatcatcaactacttcaagggcggcaagctgcggttcaagaagatcaaacctgaagccttcgaagccaacagattctacaccgtgatcaacaaaaagagcggcgagatcgtgcccatggaggtgaacttcaacttcgacgaccccaacctgatcatcctgcctctggcctttggcaagagacagggcagagaattcatctggaacgacctgctgtccctggaaaccggcagcctgaagctggccaacggaagagtgatcgagaagacactgtacaacagaagaacccggcaggatgagcctgccctgttcgtggccctgaccttcgagcggcgggaggtcctggactcctccaatatcaaaccaatgaacctgatcggcgtggcaagaggcgaaaacatccccgccgtgatcgccctgaccgaccccgagggctgcccactgagccggtttaaggatagcctgggaaacccaacccacatcctgagaatcggcgagagctataaggagaagcagcggaccatccaggccaagaaggaggtggagcagcggagagccggcggctacagccggaagtacgccagcaaagccaagaatctggcagacgatatggtgagaaacaccgctagagatctgctgtactacgccgtgacccaggatgccatgctgatcttcgccaacctgagccggggcttcggccggcagggcaagcggaccttcatggccgagagacagtacacacggatggaggactggctgaccgccaagctggcctacgagggcctgagcaagacctacctgtccaagacactggcccagtacacctccaagacatgcagcaactgtgggtttaccatcaccagcgccgactacgacagggtgctggagaagctgaagaagacagcaacaggctggatgaccacaattaacggcaaggagctgaaggtggagggccagattacctactacaacagatacaagagacagaacgtagtcaaggacctgtccgtcgagctggatagactgagcgaagaatctgtgaacaacgacatctcctcctggacaaagggcagaagcggagaagctctgagcctcctgaagaaaagattctcccatagacccgtgcaggagaagttcgtgtgcctgaactgcggcttcgagacacacgcagccgagcaagccgccctgaacatcgccagatcctggctgttcctgcggagccaggagtacaagaaataccagacaaacaagacaaccggcaacaccgataagagagccttcgtcgagacctggcagtccttttaccggaagaagcttaaggaggtgtggaaacctgccgtgcggtctggcggatctggcggaggctccgcccagatgagggtgaccttcgaggacatcgccgtgagcttcagccccgaggagtgggagtacctggaccagggccagaaggagctgtacagggaggtgatgaaggagaactacgagatcctgatcagcctgggctgccccaacctgacccccgagatcatcagcaggatcgagaggggcgaggagccctacatcaggggcgagcccggcagcgaggagagggagaccggcaagagcagctgcggcggcccaagcagcggcgcccctcctcccagcggcggcagcccagccggctccccaacctctaccgaggagggcacctctgagtccgccacccccgagagcggccctggcacctccaccgagcccagcgagggcagcgcacccggcagccctgccggcagccccacctccacagaggagggaaccagcaccgagcccagcgaaggcagcgccccaggcaccagcaccgagcctagtgagcaggagattaaacggatcaacaagatcagaagaagacttgtgaaagacagcaacaccaagaaggccggcaagacaggccccatgaaaaccctgctggttagagtgatgacacccgatctgagagagcggctggaaaacctgagaaagaagcctgaaaatatcccccagcccatcagcaatacatctagagccaacctgaataagctgctgaccgattacaccgaaatgaagaaggcgatcctgcatgtgtactgggaagagttccagaaggaccctgtgggcctgatgagccgggtggcccagcctgccagcaagaagatcgatcagaacaagctgaaacctgagatggacgagaagggcaacctgaccaccgccggctttgcctgctctcagtgtggccagcccctgttcgtgtacaagctggagcaggtgtctgagaagggcaaggcttacaccaactacttcggacggtgcaatgtggccgagcacgaaaagctgatcctgctggcccagctgaagcccgagaaggatagcgacgaagccgtgacatatagcctgggaaagtttgggcagagggccctggatttctacagcattcatgtgaccaaggagtccacccaccccgtgaagcccctggcccagatcgccggaaacagatacgcctccggacctgtgggaaaggccctgagcgacgcatgtatgggcacaatcgcctccttcctgtctaagtaccaggacatcatcatcgaacaccagaaggtggtgaagggcaaccagaagagactggagagcctgcgggagctggccggcaaggaaaacctggaataccctagcgtgaccctgccacctcagcctcacaccaaggagggcgttgatgcctacaacgaagtgatcgcccgggtgcgaatgtgggtgaacctgaacctgtggcagaagctgaagctaagcagagatgatgccaagcctctgctgagactgaagggattcccttcctttcctctggtcgagagacaggccaacgaagtggactggtgggacatggtgtgtaacgtgaagaagctgatcaacgagaaaaaggaggatggcaaggtgttttggcagaatctggctggctacaagagacaggaagccctgagaccatacctgagcagcgaggaagatcggaagaagggaaagaaattcgctcggtaccagctgggcgacctgctgctgcacctggaaaagaagcacggcgaggactggggaaaggtgtacgacgaggcctgggagcggattgacaagaaagtggaaggcctgagcaagcacatcaagctggaagaggaacggagaagcgaggacgcccagagcaaggccgccctgaccgactggctgcgggctaaggccagcttcgtgatcgagggcctgaaggaggccgacaaggacgagttctgcagatgcgagctgaagctgcagaagtggtacggggacctgcggggaaagcccttcgccatcgaagccgagaacagcatcctggacatcagcggcttcagcaagcagtacaactgtgccttcatctggcagaaggacggcgtgaagaagctgaacctgtacctgatcatcaactacttcaagggcggcaagctgcggttcaagaagatcaaacctgaagccttcgaagccaacagattctacaccgtgatcaacaaaaagagcggcgagatcgtgcccatggaggtgaacttcaacttcgacgaccccaacctgatcatcctgcctctggcctttggcaagagacagggcagagaattcatctggaacgacctgctgtccctggaaaccggcagcctgaagctggccaacggaagagtgatcgagaagacactgtacaacagaagaacccggcaggatgagcctgccctgttcgtggccctgaccttcgagcggcgggaggtcctggactcctccaatatcaaaccaatgaacctgatcggcgtggcaagaggcgaaaacatccccgccgtgatcgccctgaccgaccccgagggctgcccactgagccggtttaaggatagcctgggaaacccaacccacatcctgagaatcggcgagagctataaggagaagcagcggaccatccaggccaagaaggaggtggagcagcggagagccggcggctacagccggaagtacgccagcaaagccaagaatctggcagacgatatggtgagaaacaccgctagagatctgctgtactacgccgtgacccaggatgccatgctgatcttcgccaacctgagccggggcttcggccggcagggcaagcggaccttcatggccgagagacagtacacacggatggaggactggctgaccgccaagctggcctacgagggcctgagcaagacctacctgtccaagacactggcccagtacacctccaagacatgcagcaactgtgggtttaccatcaccagcgccgactacgacagggtgctggagaagctgaagaagacagcaacaggctggatgaccacaattaacggcaaggagctgaaggtggagggccagattacctactacaacagatacaagagacagaacgtagtcaaggacctgtccgtcgagctggatagactgagcgaagaatctgtgaacaacgacatctcctcctggacaaagggcagaagcggagaagctctgagcctcctgaagaaaagattctcccatagacccgtgcaggagaagttcgtgtgcctgaactgcggcttcgagacacacgcagccgagcaagccgccctgaacatcgccagatcctggctgttcctgcggagccaggagtacaagaaataccagacaaacaagacaaccggcaacaccgataagagagccttcgtcgagacctggcagtccttttaccggaagaagcttaaggaggtgtggaaacctgccgtgcggtctggcggatctggcggaggctcctgcccagatgagggtgaccttcgaggacatcgccgtgagcttcagccccgaggagtgggagtacctggaccagggccagaaggagctgtacagggaggtgatgaaggagaactacgagatcctgatcagcctgggctgccccaacctgacccccgagatcatcagcaggatcgagaggggcgaggagccctacatcaggggcgagcccggcagcgaggagagggagaccggcaagagcagctgcggatctggctccggcagcggccccaagaaaaagagaaaagtctaagctgccttctgcggggcttgccttctggccatgcccttcttctctcccttgcacctgtacctcttggtctttgaataaagcctgagtaggaaggctagcaaaaaaaaaaaaaaaaaaaaaaaaaaaaaaaaaaaaaaaaaaaaaaaaaaaaaaaaaaaaaaaaaaaaaaaaaaaaaaaa

SEQ ID NO: 16830 - RNA, 9485 nt, synthetic construct
  source 1..9485: mol_type = other RNA
aggaaataagagagaaaagaagagtaagaagaaatataagagccaccatggcccctaagaagaagcgtaaagtgagccggatggaacgcctcgtctacgaggtgcggcagaagtgcagaaacatcgaggacatctgcatctcctgcggatctctgaacgtgaccctggagcacccactgttcatcggcggcatgtgccagaactgtaaaaactgttttctggagtgtgcctatcaatacgacgatgacggctaccagagctactgcaccatctgttgcggcggaagagaggtgctgatgtgtggaaataacaactgctgccggtgcttctgcgtggaatgcgtggacctgctggtgggccccggcgccgcccaggccgctattaaggaagatccttggaactgctacatgtgcggccacaagggcacatacggcctgctgagacggagagaggactggcctagcagactgcagatgttcttcgccaataaccacgaccaggagttcgacccccctaaggtgtaccctcccgtccccgccgagaagagaaagcccatccgggtcctgagcctgttcgatggcatcgccaccggtctgctggtgctgaaggacctgggcatccaggtggataggtacattgcctccgaggtgtgcgaggactccatcaccgtgggaatggtgcgtcatcagggcaagatcatgtacgtgggcgacgtgcggagcgtgacacagaagcatatccaggagtggggccctttcgacctggtgatcggcggcagcccttgcaatgacctgagcatcgtgaacccagcccggaagggcctgtacgagggaaccggcagactgttcttcgagttttacagactgctgcacgacgcccggcctaaggaaggcgacgaccggcccttcttttggctgttcgagaatgtggtggccatgggagtcagcgacaagcgggatattagccggttcctggagagcaaccccgtgatgatcgatgccaaggaagtgagcgccgcccaccgggccagatacttctggggcaatctgcctggcatgaacagacccctggccagcaccgtgaacgacaagctggagctgcaggagtgcctggagcacggccggatcgccaagttcagcaaggtgagaaccatcaccacccgaagcaacagcatcaaacaaggcaaggaccagcactttcctgtgttcatgaacgagaaggaggacatcctgtggtgtaccgagatggagagagtgttcgggttcccagtccactacacagatgtcagcaacatgtctagactggccagacagagactgctgggaagaagctggtccgtccctgtgatcagacacctgttcgcccctctgaaggagtacttcgcctgcgtgagcagcggcaacagcaacgccaacagccggggccccagcttctctagcggcctggtgccactgtccctgagagggagccacatgggccccatggagatctacaaaaccgtgagcgcctggaagcggcagcctgtgcgcgtgctgagcctgtttcggaatatcgataaagtcctgaaaagcctgggattcctggagagcggctctggctccggcggtggcaccctgaagtacgtggaggatgtgacaaacgtggtcagacgggatgtggagaagtggggccccttcgatctggtgtacggcagcacccaacccctgggcagctcttgtgaccggtgccctggctggtacatgtttcagttccaccggatcctgcagtacgccctgccgagacaggagtcccagcggccattcttttggattttcatggacaacttgctgctgaccgaggatgaccaggaaactaccactcggttcctgcagaccgaagccgtgaccctgcaggacgtgagaggccgggactaccagaacgccatgcgggtgtggtccaacatccctggactgaaaagcaagcacgcacctctgacccctaaagaagaggagtacctgcaggcccaggtgcggagcagaagcaagctggacgcccctaaggtggatctgctggtgaagaattgcctcctgcccctgagagagtacttcaagtatttcagccagaatagtctgcccctgggaggcagcggcggcggcgccctggtgacatttgaggacgtcgccgtgcggttcacccaggaggaatgggctctgctggatccttctcagaaaatcctgtaccgggacgtgatgagagagacataccggaatctgacctccgtgggcatcaactgggaatgttgggaccttgaagcctgcttcagaagcctgggaagaaacctgagagtgcaggtggtgaagagaaagtgcgagctgaccaacagcggcccctgcgccgagggcggcccaagcagcggcgcccctcctcccagcggcggcagcccagccggctccccaacctctaccgaggagggcacctctgagtccgccacccccgagagcggccctggcacctccaccgagcccagcgagggcagcgcacccggcagccctgccggcagccccacctccacagaggagggaaccagcaccgagcccagcgaaggcagcgccccaggcaccagcaccgagcctagtgagcaggagattaaacggatcaacaagatcagaagaagacttgtgaaagacagcaacaccaagaaggccggcaagacaggccccatgaaaaccctgctggttagagtgatgacacccgatctgagagagcggctggaaaacctgagaaagaagcctgaaaatatcccccagcccatcagcaatacatctagagccaacctgaataagctgctgaccgattacaccgaaatgaagaaggcgatcctgcatgtgtactgggaagagttccagaaggaccctgtgggcctgatgagccgggtggcccagcctgccagcaagaagatcgatcagaacaagctgaaacctgagatggacgagaagggcaacctgaccaccgccggctttgcctgctctcagtgtggccagcccctgttcgtgtacaagctggagcaggtgtctgagaagggcaaggcttacaccaactacttcggacggtgcaatgtggccgagcacgaaaagctgatcctgctggcccagctgaagcccgagaaggatagcgacgaagccgtgacatatagcctgggaaagtttgggcagagggccctggatttctacagcattcatgtgaccaaggagtccacccaccccgtgaagcccctggcccagatcgccggaaacagatacgcctccggacctgtgggaaaggccctgagcgacgcatgtatgggcacaatcgcctccttcctgtctaagtaccaggacatcatcatcgaacaccagaaggtggtgaagggcaaccagaagagactggagagcctgcgggagctggccggcaaggaaaacctggaataccctagcgtgaccctgccacctcagcctcacaccaaggagggcgttgatgcctacaacgaagtgatcgcccgggtgcgaatgtgggtgaacctgaacctgtggcagaagctgaagctaagcagagatgatgccaagcctctgctgagactgaagggattcccttcctttcctctggtcgagagacaggccaacgaagtggactggtgggacatggtgtgtaacgtgaagaagctgatcaacgagaaaaaggaggatggcaaggtgttttggcagaatctggctggctacaagagacaggaagccctgagaccatacctgagcagcgaggaagatcggaagaagggaaagaaattcgctcggtaccagctgggcgacctgctgctgcacctggaaaagaagcacggcgaggactggggaaaggtgtacgacgaggcctgggagcggattgacaagaaagtggaaggcctgagcaagcacatcaagctggaagaggaacggagaagcgaggacgcccagagcaaggccgccctgaccgactggctgcgggctaaggccagcttcgtgatcgagggcctgaaggaggccgacaaggacgagttctgcagatgcgagctgaagctgcagaagtggtacggggacctgcggggaaagcccttcgccatcgaagccgagaacagcatcctggacatcagcggcttcagcaagcagtacaactgtgccttcatctggcagaaggacggcgtgaagaagctgaacctgtacctgatcatcaactacttcaagggcggcaagctgcggttcaagaagatcaaacctgaagccttcgaagccaacagattctacaccgtgatcaacaaaaagagcggcgagatcgtgcccatggaggtgaacttcaacttcgacgaccccaacctgatcatcctgcctctggcctttggcaagagacagggcagagaattcatctggaacgacctgctgtccctggaaaccggcagcctgaagctggccaacggaagagtgatcgagaagacactgtacaacagaagaacccggcaggatgagcctgccctgttcgtggccctgaccttcgagcggcgggaggtcctggactcctccaatatcaaaccaatgaacctgatcggcgtggcaagaggcgaaaacatccccgccgtgatcgccctgaccgaccccgagggctgcccactgagccggtttaaggatagcctgggaaacccaacccacatcctgagaatcggcgagagctataaggagaagcagcggaccatccaggccaagaaggaggtggagcagcggagagccggcggctacagccggaagtacgccagcaaagccaagaatctggcagacgatatggtgagaaacaccgctagagatctgctgtactacgccgtgacccaggatgccatgctgatcttcgccaacctgagccggggcttcggccggcagggcaagcggaccttcatggccgagagacagtacacacggatggaggactggctgaccgccaagctggcctacgagggcctgagcaagacctacctgtccaagacactggcccagtacacctccaagacatgcagcaactgtgggtttaccatcaccagcgccgactacgacagggtgctggagaagctgaagaagacagcaacaggctggatgaccacaattaacggcaaggagctgaaggtggagggccagattacctactacaacagatacaagagacagaacgtagtcaaggacctgtccgtcgagctggatagactgagcgaagaatctgtgaacaacgacatctcctcctggacaaagggcagaagcggagaagctctgagcctcctgaagaaaagattctcccatagacccgtgcaggagaagttcgtgtgcctgaactgcggcttcgagacacacgcagccgagcaagccgccctgaacatcgccagatcctggctgttcctgcggagccaggagtacaagaaataccagacaaacaagacaaccggcaacaccgataagagagccttcgtcgagacctggcagtccttttaccggaagaagcttaaggaggtgtggaaacctgccgtgcggtctggcggatctggcggaggctccatggacagcgtggccttcgaggacgtggccgtgaccttcacccaggaggagtgggccctgctggaccccagccagaagaccctgtacagggacgtgatgcaggagaccttcaggaacctggccagcgtgggcaagaagtggaaggcccagaacatgtacgtggagtacgagaacctgaagaggaacctgaggaccttcgtgggcgagaggctgttcgagagcaaggagggccaccagcacggcggcggcccaagcagcggcgcccctcctcccagcggcggcagcccagccggctccccaacctctaccgaggagggcacctctgagtccgccacccccgagagcggccctggcacctccaccgagcccagcgagggcagcgcacccggcagccctgccggcagccccacctccacagaggagggaaccagcaccgagcccagcgaaggcagcgccccaggcaccagcaccgagcctagtgagcaggagattaaacggatcaacaagatcagaagaagacttgtgaaagacagcaacaccaagaaggccggcaagacaggccccatgaaaaccctgctggttagagtgatgacacccgatctgagagagcggctggaaaacctgagaaagaagcctgaaaatatcccccagcccatcagcaatacatctagagccaacctgaataagctgctgaccgattacaccgaaatgaagaaggcgatcctgcatgtgtactgggaagagttccagaaggaccctgtgggcctgatgagccgggtggcccagcctgccagcaagaagatcgatcagaacaagctgaaacctgagatggacgagaagggcaacctgaccaccgccggctttgcctgctctcagtgtggccagcccctgttcgtgtacaagctggagcaggtgtctgagaagggcaaggcttacaccaactacttcggacggtgcaatgtggccgagcacgaaaagctgatcctgctggcccagctgaagcccgagaaggatagcgacgaagccgtgacatatagcctgggaaagtttgggcagagggccctggatttctacagcattcatgtgaccaaggagtccacccaccccgtgaagcccctggcccagatcgccggaaacagatacgcctccggacctgtgggaaaggccctgagcgacgcatgtatgggcacaatcgcctccttcctgtctaagtaccaggacatcatcatcgaacaccagaaggtggtgaagggcaaccagaagagactggagagcctgcgggagctggccggcaaggaaaacctggaataccctagcgtgaccctgccacctcagcctcacaccaaggagggcgttgatgcctacaacgaagtgatcgcccgggtgcgaatgtgggtgaacctgaacctgtggcagaagctgaagctaagcagagatgatgccaagcctctgctgagactgaagggattcccttcctttcctctggtcgagagacaggccaacgaagtggactggtgggacatggtgtgtaacgtgaagaagctgatcaacgagaaaaaggaggatggcaaggtgttttggcagaatctggctggctacaagagacaggaagccctgagaccatacctgagcagcgaggaagatcggaagaagggaaagaaattcgctcggtaccagctgggcgacctgctgctgcacctggaaaagaagcacggcgaggactggggaaaggtgtacgacgaggcctgggagcggattgacaagaaagtggaaggcctgagcaagcacatcaagctggaagaggaacggagaagcgaggacgcccagagcaaggccgccctgaccgactggctgcgggctaaggccagcttcgtgatcgagggcctgaaggaggccgacaaggacgagttctgcagatgcgagctgaagctgcagaagtggtacggggacctgcggggaaagcccttcgccatcgaagccgagaacagcatcctggacatcagcggcttcagcaagcagtacaactgtgccttcatctggcagaaggacggcgtgaagaagctgaacctgtacctgatcatcaactacttcaagggcggcaagctgcggttcaagaagatcaaacctgaagccttcgaagccaacagattctacaccgtgatcaacaaaaagagcggcgagatcgtgcccatggaggtgaacttcaacttcgacgaccccaacctgatcatcctgcctctggcctttggcaagagacagggcagagaattcatctggaacgacctgctgtccctggaaaccggcagcctgaagctggccaacggaagagtgatcgagaagacactgtacaacagaagaacccggcaggatgagcctgccctgttcgtggccctgaccttcgagcggcgggaggtcctggactcctccaatatcaaaccaatgaacctgatcggcgtggcaagaggcgaaaacatccccgccgtgatcgccctgaccgaccccgagggctgcccactgagccggtttaaggatagcctgggaaacccaacccacatcctgagaatcggcgagagctataaggagaagcagcggaccatccaggccaagaaggaggtggagcagcggagagccggcggctacagccggaagtacgccagcaaagccaagaatctggcagacgatatggtgagaaacaccgctagagatctgctgtactacgccgtgacccaggatgccatgctgatcttcgccaacctgagccggggcttcggccggcagggcaagcggaccttcatggccgagagacagtacacacggatggaggactggctgaccgccaagctggcctacgagggcctgagcaagacctacctgtccaagacactggcccagtacacctccaagacatgcagcaactgtgggtttaccatcaccagcgccgactacgacagggtgctggagaagctgaagaagacagcaacaggctggatgaccacaattaacggcaaggagctgaaggtggagggccagattacctactacaacagatacaagagacagaacgtagtcaaggacctgtccgtcgagctggatagactgagcgaagaatctgtgaacaacgacatctcctcctggacaaagggcagaagcggagaagctctgagcctcctgaagaaaagattctcccatagacccgtgcaggagaagttcgtgtgcctgaactgcggcttcgagacacacgcagccgagcaagccgccctgaacatcgccagatcctggctgttcctgcggagccaggagtacaagaaataccagacaaacaagacaaccggcaacaccgataagagagccttcgtcgagacctggcagtccttttaccggaagaagcttaaggaggtgtggaaacctgccgtgcggtctggcggatctggcggaggctcctatggacagcgtggccttcgaggacgtggccgtgaccttcacccaggaggagtgggccctgctggaccccagccagaagaccctgtacagggacgtgatgcaggagaccttcaggaacctggccagcgtgggcaagaagtggaaggcccagaacatgtacgtggagtacgagaacctgaagaggaacctgaggaccttcgtgggcgagaggctgttcgagagcaaggagggccaccagcacggcggatctggctccggcagcggccccaagaaaaagagaaaagtctaagctgccttctgcggggcttgccttctggccatgcccttcttctctcccttgcacctgtacctcttggtctttgaataaagcctgagtaggaaggctagcaaaaaaaaaaaaaaaaaaaaaaaaaaaaaaaaaaaaaaaaaaaaaaaaaaaaaaaaaaaaaaaaaaaaaaaaaaaaaaaa

SEQ ID NO: 16831 - RNA, 9485 nt, synthetic construct
  source 1..9485: mol_type = other RNA
aggaaataagagagaaaagaagagtaagaagaaatataagagccaccatggcccctaagaagaagcgtaaagtgagccggatggaacgcctcgtctacgaggtgcggcagaagtgcagaaacatcgaggacatctgcatctcctgcggatctctgaacgtgaccctggagcacccactgttcatcggcggcatgtgccagaactgtaaaaactgttttctggagtgtgcctatcaatacgacgatgacggctaccagagctactgcaccatctgttgcggcggaagagaggtgctgatgtgtggaaataacaactgctgccggtgcttctgcgtggaatgcgtggacctgctggtgggccccggcgccgcccaggccgctattaaggaagatccttggaactgctacatgtgcggccacaagggcacatacggcctgctgagacggagagaggactggcctagcagactgcagatgttcttcgccaataaccacgaccaggagttcgacccccctaaggtgtaccctcccgtccccgccgagaagagaaagcccatccgggtcctgagcctgttcgatggcatcgccaccggtctgctggtgctgaaggacctgggcatccaggtggataggtacattgcctccgaggtgtgcgaggactccatcaccgtgggaatggtgcgtcatcagggcaagatcatgtacgtgggcgacgtgcggagcgtgacacagaagcatatccaggagtggggccctttcgacctggtgatcggcggcagcccttgcaatgacctgagcatcgtgaacccagcccggaagggcctgtacgagggaaccggcagactgttcttcgagttttacagactgctgcacgacgcccggcctaaggaaggcgacgaccggcccttcttttggctgttcgagaatgtggtggccatgggagtcagcgacaagcgggatattagccggttcctggagagcaaccccgtgatgatcgatgccaaggaagtgagcgccgcccaccgggccagatacttctggggcaatctgcctggcatgaacagacccctggccagcaccgtgaacgacaagctggagctgcaggagtgcctggagcacggccggatcgccaagttcagcaaggtgagaaccatcaccacccgaagcaacagcatcaaacaaggcaaggaccagcactttcctgtgttcatgaacgagaaggaggacatcctgtggtgtaccgagatggagagagtgttcgggttcccagtccactacacagatgtcagcaacatgtctagactggccagacagagactgctgggaagaagctggtccgtccctgtgatcagacacctgttcgcccctctgaaggagtacttcgcctgcgtgagcagcggcaacagcaacgccaacagccggggccccagcttctctagcggcctggtgccactgtccctgagagggagccacatgggccccatggagatctacaaaaccgtgagcgcctggaagcggcagcctgtgcgcgtgctgagcctgtttcggaatatcgataaagtcctgaaaagcctgggattcctggagagcggctctggctccggcggtggcaccctgaagtacgtggaggatgtgacaaacgtggtcagacgggatgtggagaagtggggccccttcgatctggtgtacggcagcacccaacccctgggcagctcttgtgaccggtgccctggctggtacatgtttcagttccaccggatcctgcagtacgccctgccgagacaggagtcccagcggccattcttttggattttcatggacaacttgctgctgaccgaggatgaccaggaaactaccactcggttcctgcagaccgaagccgtgaccctgcaggacgtgagaggccgggactaccagaacgccatgcgggtgtggtccaacatccctggactgaaaagcaagcacgcacctctgacccctaaagaagaggagtacctgcaggcccaggtgcggagcagaagcaagctggacgcccctaaggtggatctgctggtgaagaattgcctcctgcccctgagagagtacttcaagtatttcagccagaatagtctgcccctgggaggcagcggcggcggcgccctggtgacatttgaggacgtcgccgtgcggttcacccaggaggaatgggctctgctggatccttctcagaaaatcctgtaccgggacgtgatgagagagacataccggaatctgacctccgtgggcatcaactgggaatgttgggaccttgaagcctgcttcagaagcctgggaagaaacctgagagtgcaggtggtgaagagaaagtgcgagctgaccaacagcggcccctgcgccgagggcggcccaagcagcggcgcccctcctcccagcggcggcagcccagccggctccccaacctctaccgaggagggcacctctgagtccgccacccccgagagcggccctggcacctccaccgagcccagcgagggcagcgcacccggcagccctgccggcagccccacctccacagaggagggaaccagcaccgagcccagcgaaggcagcgccccaggcaccagcaccgagcctagtgagcaggagattaaacggatcaacaagatcagaagaagacttgtgaaagacagcaacaccaagaaggccggcaagacaggccccatgaaaaccctgctggttagagtgatgacacccgatctgagagagcggctggaaaacctgagaaagaagcctgaaaatatcccccagcccatcagcaatacatctagagccaacctgaataagctgctgaccgattacaccgaaatgaagaaggcgatcctgcatgtgtactgggaagagttccagaaggaccctgtgggcctgatgagccgggtggcccagcctgccagcaagaagatcgatcagaacaagctgaaacctgagatggacgagaagggcaacctgaccaccgccggctttgcctgctctcagtgtggccagcccctgttcgtgtacaagctggagcaggtgtctgagaagggcaaggcttacaccaactacttcggacggtgcaatgtggccgagcacgaaaagctgatcctgctggcccagctgaagcccgagaaggatagcgacgaagccgtgacatatagcctgggaaagtttgggcagagggccctggatttctacagcattcatgtgaccaaggagtccacccaccccgtgaagcccctggcccagatcgccggaaacagatacgcctccggacctgtgggaaaggccctgagcgacgcatgtatgggcacaatcgcctccttcctgtctaagtaccaggacatcatcatcgaacaccagaaggtggtgaagggcaaccagaagagactggagagcctgcgggagctggccggcaaggaaaacctggaataccctagcgtgaccctgccacctcagcctcacaccaaggagggcgttgatgcctacaacgaagtgatcgcccgggtgcgaatgtgggtgaacctgaacctgtggcagaagctgaagctaagcagagatgatgccaagcctctgctgagactgaagggattcccttcctttcctctggtcgagagacaggccaacgaagtggactggtgggacatggtgtgtaacgtgaagaagctgatcaacgagaaaaaggaggatggcaaggtgttttggcagaatctggctggctacaagagacaggaagccctgagaccatacctgagcagcgaggaagatcggaagaagggaaagaaattcgctcggtaccagctgggcgacctgctgctgcacctggaaaagaagcacggcgaggactggggaaaggtgtacgacgaggcctgggagcggattgacaagaaagtggaaggcctgagcaagcacatcaagctggaagaggaacggagaagcgaggacgcccagagcaaggccgccctgaccgactggctgcgggctaaggccagcttcgtgatcgagggcctgaaggaggccgacaaggacgagttctgcagatgcgagctgaagctgcagaagtggtacggggacctgcggggaaagcccttcgccatcgaagccgagaacagcatcctggacatcagcggcttcagcaagcagtacaactgtgccttcatctggcagaaggacggcgtgaagaagctgaacctgtacctgatcatcaactacttcaagggcggcaagctgcggttcaagaagatcaaacctgaagccttcgaagccaacagattctacaccgtgatcaacaaaaagagcggcgagatcgtgcccatggaggtgaacttcaacttcgacgaccccaacctgatcatcctgcctctggcctttggcaagagacagggcagagaattcatctggaacgacctgctgtccctggaaaccggcagcctgaagctggccaacggaagagtgatcgagaagacactgtacaacagaagaacccggcaggatgagcctgccctgttcgtggccctgaccttcgagcggcgggaggtcctggactcctccaatatcaaaccaatgaacctgatcggcgtggcaagaggcgaaaacatccccgccgtgatcgccctgaccgaccccgagggctgcccactgagccggtttaaggatagcctgggaaacccaacccacatcctgagaatcggcgagagctataaggagaagcagcggaccatccaggccaagaaggaggtggagcagcggagagccggcggctacagccggaagtacgccagcaaagccaagaatctggcagacgatatggtgagaaacaccgctagagatctgctgtactacgccgtgacccaggatgccatgctgatcttcgccaacctgagccggggcttcggccggcagggcaagcggaccttcatggccgagagacagtacacacggatggaggactggctgaccgccaagctggcctacgagggcctgagcaagacctacctgtccaagacactggcccagtacacctccaagacatgcagcaactgtgggtttaccatcaccagcgccgactacgacagggtgctggagaagctgaagaagacagcaacaggctggatgaccacaattaacggcaaggagctgaaggtggagggccagattacctactacaacagatacaagagacagaacgtagtcaaggacctgtccgtcgagctggatagactgagcgaagaatctgtgaacaacgacatctcctcctggacaaagggcagaagcggagaagctctgagcctcctgaagaaaagattctcccatagacccgtgcaggagaagttcgtgtgcctgaactgcggcttcgagacacacgcagccgagcaagccgccctgaacatcgccagatcctggctgttcctgcggagccaggagtacaagaaataccagacaaacaagacaaccggcaacaccgataagagagccttcgtcgagacctggcagtccttttaccggaagaagcttaaggaggtgtggaaacctgccgtgcggtctggcggatctggcggaggctccttccagatgcccgtgaccttcgaggaggtggccgtgtacttcacccagggccagggcgccctgctggaccccgcccagagggccctgtacagggacgtgatgcaggagaactacaagatggtgaccagcctgggcttccccctgcccaagcccgagctgatcagcaggctggagcagggcgaggagccctgggtgcccgacctgcaggcctgcgaggagagggagagcctgagcggcaaccacggcggcccaagcagcggcgcccctcctcccagcggcggcagcccagccggctccccaacctctaccgaggagggcacctctgagtccgccacccccgagagcggccctggcacctccaccgagcccagcgagggcagcgcacccggcagccctgccggcagccccacctccacagaggagggaaccagcaccgagcccagcgaaggcagcgccccaggcaccagcaccgagcctagtgagcaggagattaaacggatcaacaagatcagaagaagacttgtgaaagacagcaacaccaagaaggccggcaagacaggccccatgaaaaccctgctggttagagtgatgacacccgatctgagagagcggctggaaaacctgagaaagaagcctgaaaatatcccccagcccatcagcaatacatctagagccaacctgaataagctgctgaccgattacaccgaaatgaagaaggcgatcctgcatgtgtactgggaagagttccagaaggaccctgtgggcctgatgagccgggtggcccagcctgccagcaagaagatcgatcagaacaagctgaaacctgagatggacgagaagggcaacctgaccaccgccggctttgcctgctctcagtgtggccagcccctgttcgtgtacaagctggagcaggtgtctgagaagggcaaggcttacaccaactacttcggacggtgcaatgtggccgagcacgaaaagctgatcctgctggcccagctgaagcccgagaaggatagcgacgaagccgtgacatatagcctgggaaagtttgggcagagggccctggatttctacagcattcatgtgaccaaggagtccacccaccccgtgaagcccctggcccagatcgccggaaacagatacgcctccggacctgtgggaaaggccctgagcgacgcatgtatgggcacaatcgcctccttcctgtctaagtaccaggacatcatcatcgaacaccagaaggtggtgaagggcaaccagaagagactggagagcctgcgggagctggccggcaaggaaaacctggaataccctagcgtgaccctgccacctcagcctcacaccaaggagggcgttgatgcctacaacgaagtgatcgcccgggtgcgaatgtgggtgaacctgaacctgtggcagaagctgaagctaagcagagatgatgccaagcctctgctgagactgaagggattcccttcctttcctctggtcgagagacaggccaacgaagtggactggtgggacatggtgtgtaacgtgaagaagctgatcaacgagaaaaaggaggatggcaaggtgttttggcagaatctggctggctacaagagacaggaagccctgagaccatacctgagcagcgaggaagatcggaagaagggaaagaaattcgctcggtaccagctgggcgacctgctgctgcacctggaaaagaagcacggcgaggactggggaaaggtgtacgacgaggcctgggagcggattgacaagaaagtggaaggcctgagcaagcacatcaagctggaagaggaacggagaagcgaggacgcccagagcaaggccgccctgaccgactggctgcgggctaaggccagcttcgtgatcgagggcctgaaggaggccgacaaggacgagttctgcagatgcgagctgaagctgcagaagtggtacggggacctgcggggaaagcccttcgccatcgaagccgagaacagcatcctggacatcagcggcttcagcaagcagtacaactgtgccttcatctggcagaaggacggcgtgaagaagctgaacctgtacctgatcatcaactacttcaagggcggcaagctgcggttcaagaagatcaaacctgaagccttcgaagccaacagattctacaccgtgatcaacaaaaagagcggcgagatcgtgcccatggaggtgaacttcaacttcgacgaccccaacctgatcatcctgcctctggcctttggcaagagacagggcagagaattcatctggaacgacctgctgtccctggaaaccggcagcctgaagctggccaacggaagagtgatcgagaagacactgtacaacagaagaacccggcaggatgagcctgccctgttcgtggccctgaccttcgagcggcgggaggtcctggactcctccaatatcaaaccaatgaacctgatcggcgtggcaagaggcgaaaacatccccgccgtgatcgccctgaccgaccccgagggctgcccactgagccggtttaaggatagcctgggaaacccaacccacatcctgagaatcggcgagagctataaggagaagcagcggaccatccaggccaagaaggaggtggagcagcggagagccggcggctacagccggaagtacgccagcaaagccaagaatctggcagacgatatggtgagaaacaccgctagagatctgctgtactacgccgtgacccaggatgccatgctgatcttcgccaacctgagccggggcttcggccggcagggcaagcggaccttcatggccgagagacagtacacacggatggaggactggctgaccgccaagctggcctacgagggcctgagcaagacctacctgtccaagacactggcccagtacacctccaagacatgcagcaactgtgggtttaccatcaccagcgccgactacgacagggtgctggagaagctgaagaagacagcaacaggctggatgaccacaattaacggcaaggagctgaaggtggagggccagattacctactacaacagatacaagagacagaacgtagtcaaggacctgtccgtcgagctggatagactgagcgaagaatctgtgaacaacgacatctcctcctggacaaagggcagaagcggagaagctctgagcctcctgaagaaaagattctcccatagacccgtgcaggagaagttcgtgtgcctgaactgcggcttcgagacacacgcagccgagcaagccgccctgaacatcgccagatcctggctgttcctgcggagccaggagtacaagaaataccagacaaacaagacaaccggcaacaccgataagagagccttcgtcgagacctggcagtccttttaccggaagaagcttaaggaggtgtggaaacctgccgtgcggtctggcggatctggcggaggctcctttccagatgcccgtgaccttcgaggaggtggccgtgtacttcacccagggccagggcgccctgctggaccccgcccagagggccctgtacagggacgtgatgcaggagaactacaagatggtgaccagcctgggcttccccctgcccaagcccgagctgatcagcaggctggagcagggcgaggagccctgggtgcccgacctgcaggcctgcgaggagagggagagcctgagcggcaaccacggatctggctccggcagcggccccaagaaaaagagaaaagtctaagctgccttctgcggggcttgccttctggccatgcccttcttctctcccttgcacctgtacctcttggtctttgaataaagcctgagtaggaaggctagcaaaaaaaaaaaaaaaaaaaaaaaaaaaaaaaaaaaaaaaaaaaaaaaaaaaaaaaaaaaaaaaaaaaaaaaaaaaaaaaa

SEQ ID NO: 16832 - RNA, 9485 nt, synthetic construct
  source 1..9485: mol_type = other RNA
aggaaataagagagaaaagaagagtaagaagaaatataagagccaccatggcccctaagaagaagcgtaaagtgagccggatggaacgcctcgtctacgaggtgcggcagaagtgcagaaacatcgaggacatctgcatctcctgcggatctctgaacgtgaccctggagcacccactgttcatcggcggcatgtgccagaactgtaaaaactgttttctggagtgtgcctatcaatacgacgatgacggctaccagagctactgcaccatctgttgcggcggaagagaggtgctgatgtgtggaaataacaactgctgccggtgcttctgcgtggaatgcgtggacctgctggtgggccccggcgccgcccaggccgctattaaggaagatccttggaactgctacatgtgcggccacaagggcacatacggcctgctgagacggagagaggactggcctagcagactgcagatgttcttcgccaataaccacgaccaggagttcgacccccctaaggtgtaccctcccgtccccgccgagaagagaaagcccatccgggtcctgagcctgttcgatggcatcgccaccggtctgctggtgctgaaggacctgggcatccaggtggataggtacattgcctccgaggtgtgcgaggactccatcaccgtgggaatggtgcgtcatcagggcaagatcatgtacgtgggcgacgtgcggagcgtgacacagaagcatatccaggagtggggccctttcgacctggtgatcggcggcagcccttgcaatgacctgagcatcgtgaacccagcccggaagggcctgtacgagggaaccggcagactgttcttcgagttttacagactgctgcacgacgcccggcctaaggaaggcgacgaccggcccttcttttggctgttcgagaatgtggtggccatgggagtcagcgacaagcgggatattagccggttcctggagagcaaccccgtgatgatcgatgccaaggaagtgagcgccgcccaccgggccagatacttctggggcaatctgcctggcatgaacagacccctggccagcaccgtgaacgacaagctggagctgcaggagtgcctggagcacggccggatcgccaagttcagcaaggtgagaaccatcaccacccgaagcaacagcatcaaacaaggcaaggaccagcactttcctgtgttcatgaacgagaaggaggacatcctgtggtgtaccgagatggagagagtgttcgggttcccagtccactacacagatgtcagcaacatgtctagactggccagacagagactgctgggaagaagctggtccgtccctgtgatcagacacctgttcgcccctctgaaggagtacttcgcctgcgtgagcagcggcaacagcaacgccaacagccggggccccagcttctctagcggcctggtgccactgtccctgagagggagccacatgggccccatggagatctacaaaaccgtgagcgcctggaagcggcagcctgtgcgcgtgctgagcctgtttcggaatatcgataaagtcctgaaaagcctgggattcctggagagcggctctggctccggcggtggcaccctgaagtacgtggaggatgtgacaaacgtggtcagacgggatgtggagaagtggggccccttcgatctggtgtacggcagcacccaacccctgggcagctcttgtgaccggtgccctggctggtacatgtttcagttccaccggatcctgcagtacgccctgccgagacaggagtcccagcggccattcttttggattttcatggacaacttgctgctgaccgaggatgaccaggaaactaccactcggttcctgcagaccgaagccgtgaccctgcaggacgtgagaggccgggactaccagaacgccatgcgggtgtggtccaacatccctggactgaaaagcaagcacgcacctctgacccctaaagaagaggagtacctgcaggcccaggtgcggagcagaagcaagctggacgcccctaaggtggatctgctggtgaagaattgcctcctgcccctgagagagtacttcaagtatttcagccagaatagtctgcccctgggaggcagcggcggcggcgccctggtgacatttgaggacgtcgccgtgcggttcacccaggaggaatgggctctgctggatccttctcagaaaatcctgtaccgggacgtgatgagagagacataccggaatctgacctccgtgggcatcaactgggaatgttgggaccttgaagcctgcttcagaagcctgggaagaaacctgagagtgcaggtggtgaagagaaagtgcgagctgaccaacagcggcccctgcgccgagggcggcccaagcagcggcgcccctcctcccagcggcggcagcccagccggctccccaacctctaccgaggagggcacctctgagtccgccacccccgagagcggccctggcacctccaccgagcccagcgagggcagcgcacccggcagccctgccggcagccccacctccacagaggagggaaccagcaccgagcccagcgaaggcagcgccccaggcaccagcaccgagcctagtgagcaggagattaaacggatcaacaagatcagaagaagacttgtgaaagacagcaacaccaagaaggccggcaagacaggccccatgaaaaccctgctggttagagtgatgacacccgatctgagagagcggctggaaaacctgagaaagaagcctgaaaatatcccccagcccatcagcaatacatctagagccaacctgaataagctgctgaccgattacaccgaaatgaagaaggcgatcctgcatgtgtactgggaagagttccagaaggaccctgtgggcctgatgagccgggtggcccagcctgccagcaagaagatcgatcagaacaagctgaaacctgagatggacgagaagggcaacctgaccaccgccggctttgcctgctctcagtgtggccagcccctgttcgtgtacaagctggagcaggtgtctgagaagggcaaggcttacaccaactacttcggacggtgcaatgtggccgagcacgaaaagctgatcctgctggcccagctgaagcccgagaaggatagcgacgaagccgtgacatatagcctgggaaagtttgggcagagggccctggatttctacagcattcatgtgaccaaggagtccacccaccccgtgaagcccctggcccagatcgccggaaacagatacgcctccggacctgtgggaaaggccctgagcgacgcatgtatgggcacaatcgcctccttcctgtctaagtaccaggacatcatcatcgaacaccagaaggtggtgaagggcaaccagaagagactggagagcctgcgggagctggccggcaaggaaaacctggaataccctagcgtgaccctgccacctcagcctcacaccaaggagggcgttgatgcctacaacgaagtgatcgcccgggtgcgaatgtgggtgaacctgaacctgtggcagaagctgaagctaagcagagatgatgccaagcctctgctgagactgaagggattcccttcctttcctctggtcgagagacaggccaacgaagtggactggtgggacatggtgtgtaacgtgaagaagctgatcaacgagaaaaaggaggatggcaaggtgttttggcagaatctggctggctacaagagacaggaagccctgagaccatacctgagcagcgaggaagatcggaagaagggaaagaaattcgctcggtaccagctgggcgacctgctgctgcacctggaaaagaagcacggcgaggactggggaaaggtgtacgacgaggcctgggagcggattgacaagaaagtggaaggcctgagcaagcacatcaagctggaagaggaacggagaagcgaggacgcccagagcaaggccgccctgaccgactggctgcgggctaaggccagcttcgtgatcgagggcctgaaggaggccgacaaggacgagttctgcagatgcgagctgaagctgcagaagtggtacggggacctgcggggaaagcccttcgccatcgaagccgagaacagcatcctggacatcagcggcttcagcaagcagtacaactgtgccttcatctggcagaaggacggcgtgaagaagctgaacctgtacctgatcatcaactacttcaagggcggcaagctgcggttcaagaagatcaaacctgaagccttcgaagccaacagattctacaccgtgatcaacaaaaagagcggcgagatcgtgcccatggaggtgaacttcaacttcgacgaccccaacctgatcatcctgcctctggcctttggcaagagacagggcagagaattcatctggaacgacctgctgtccctggaaaccggcagcctgaagctggccaacggaagagtgatcgagaagacactgtacaacagaagaacccggcaggatgagcctgccctgttcgtggccctgaccttcgagcggcgggaggtcctggactcctccaatatcaaaccaatgaacctgatcggcgtggcaagaggcgaaaacatccccgccgtgatcgccctgaccgaccccgagggctgcccactgagccggtttaaggatagcctgggaaacccaacccacatcctgagaatcggcgagagctataaggagaagcagcggaccatccaggccaagaaggaggtggagcagcggagagccggcggctacagccggaagtacgccagcaaagccaagaatctggcagacgatatggtgagaaacaccgctagagatctgctgtactacgccgtgacccaggatgccatgctgatcttcgccaacctgagccggggcttcggccggcagggcaagcggaccttcatggccgagagacagtacacacggatggaggactggctgaccgccaagctggcctacgagggcctgagcaagacctacctgtccaagacactggcccagtacacctccaagacatgcagcaactgtgggtttaccatcaccagcgccgactacgacagggtgctggagaagctgaagaagacagcaacaggctggatgaccacaattaacggcaaggagctgaaggtggagggccagattacctactacaacagatacaagagacagaacgtagtcaaggacctgtccgtcgagctggatagactgagcgaagaatctgtgaacaacgacatctcctcctggacaaagggcagaagcggagaagctctgagcctcctgaagaaaagattctcccatagacccgtgcaggagaagttcgtgtgcctgaactgcggcttcgagacacacgcagccgagcaagccgccctgaacatcgccagatcctggctgttcctgcggagccaggagtacaagaaataccagacaaacaagacaaccggcaacaccgataagagagccttcgtcgagacctggcagtccttttaccggaagaagcttaaggaggtgtggaaacctgccgtgcggtctggcggatctggcggaggctccatggccaccgccctgaccgaccccgcccaggtgagcgtgaccttcgacgacgtggccgtgaccttcacccaggaggagtggggccagctggacctggcccagaggaccctgtaccaggaggtgatgctggagaactgcggcctgctggtgagcctgggctgccccgtgcccaggcccgagctgatctaccacctggagcacggccaggagccctggaccaggaaggaggacctgagccaggacggcggcccaagcagcggcgcccctcctcccagcggcggcagcccagccggctccccaacctctaccgaggagggcacctctgagtccgccacccccgagagcggccctggcacctccaccgagcccagcgagggcagcgcacccggcagccctgccggcagccccacctccacagaggagggaaccagcaccgagcccagcgaaggcagcgccccaggcaccagcaccgagcctagtgagcaggagattaaacggatcaacaagatcagaagaagacttgtgaaagacagcaacaccaagaaggccggcaagacaggccccatgaaaaccctgctggttagagtgatgacacccgatctgagagagcggctggaaaacctgagaaagaagcctgaaaatatcccccagcccatcagcaatacatctagagccaacctgaataagctgctgaccgattacaccgaaatgaagaaggcgatcctgcatgtgtactgggaagagttccagaaggaccctgtgggcctgatgagccgggtggcccagcctgccagcaagaagatcgatcagaacaagctgaaacctgagatggacgagaagggcaacctgaccaccgccggctttgcctgctctcagtgtggccagcccctgttcgtgtacaagctggagcaggtgtctgagaagggcaaggcttacaccaactacttcggacggtgcaatgtggccgagcacgaaaagctgatcctgctggcccagctgaagcccgagaaggatagcgacgaagccgtgacatatagcctgggaaagtttgggcagagggccctggatttctacagcattcatgtgaccaaggagtccacccaccccgtgaagcccctggcccagatcgccggaaacagatacgcctccggacctgtgggaaaggccctgagcgacgcatgtatgggcacaatcgcctccttcctgtctaagtaccaggacatcatcatcgaacaccagaaggtggtgaagggcaaccagaagagactggagagcctgcgggagctggccggcaaggaaaacctggaataccctagcgtgaccctgccacctcagcctcacaccaaggagggcgttgatgcctacaacgaagtgatcgcccgggtgcgaatgtgggtgaacctgaacctgtggcagaagctgaagctaagcagagatgatgccaagcctctgctgagactgaagggattcccttcctttcctctggtcgagagacaggccaacgaagtggactggtgggacatggtgtgtaacgtgaagaagctgatcaacgagaaaaaggaggatggcaaggtgttttggcagaatctggctggctacaagagacaggaagccctgagaccatacctgagcagcgaggaagatcggaagaagggaaagaaattcgctcggtaccagctgggcgacctgctgctgcacctggaaaagaagcacggcgaggactggggaaaggtgtacgacgaggcctgggagcggattgacaagaaagtggaaggcctgagcaagcacatcaagctggaagaggaacggagaagcgaggacgcccagagcaaggccgccctgaccgactggctgcgggctaaggccagcttcgtgatcgagggcctgaaggaggccgacaaggacgagttctgcagatgcgagctgaagctgcagaagtggtacggggacctgcggggaaagcccttcgccatcgaagccgagaacagcatcctggacatcagcggcttcagcaagcagtacaactgtgccttcatctggcagaaggacggcgtgaagaagctgaacctgtacctgatcatcaactacttcaagggcggcaagctgcggttcaagaagatcaaacctgaagccttcgaagccaacagattctacaccgtgatcaacaaaaagagcggcgagatcgtgcccatggaggtgaacttcaacttcgacgaccccaacctgatcatcctgcctctggcctttggcaagagacagggcagagaattcatctggaacgacctgctgtccctggaaaccggcagcctgaagctggccaacggaagagtgatcgagaagacactgtacaacagaagaacccggcaggatgagcctgccctgttcgtggccctgaccttcgagcggcgggaggtcctggactcctccaatatcaaaccaatgaacctgatcggcgtggcaagaggcgaaaacatccccgccgtgatcgccctgaccgaccccgagggctgcccactgagccggtttaaggatagcctgggaaacccaacccacatcctgagaatcggcgagagctataaggagaagcagcggaccatccaggccaagaaggaggtggagcagcggagagccggcggctacagccggaagtacgccagcaaagccaagaatctggcagacgatatggtgagaaacaccgctagagatctgctgtactacgccgtgacccaggatgccatgctgatcttcgccaacctgagccggggcttcggccggcagggcaagcggaccttcatggccgagagacagtacacacggatggaggactggctgaccgccaagctggcctacgagggcctgagcaagacctacctgtccaagacactggcccagtacacctccaagacatgcagcaactgtgggtttaccatcaccagcgccgactacgacagggtgctggagaagctgaagaagacagcaacaggctggatgaccacaattaacggcaaggagctgaaggtggagggccagattacctactacaacagatacaagagacagaacgtagtcaaggacctgtccgtcgagctggatagactgagcgaagaatctgtgaacaacgacatctcctcctggacaaagggcagaagcggagaagctctgagcctcctgaagaaaagattctcccatagacccgtgcaggagaagttcgtgtgcctgaactgcggcttcgagacacacgcagccgagcaagccgccctgaacatcgccagatcctggctgttcctgcggagccaggagtacaagaaataccagacaaacaagacaaccggcaacaccgataagagagccttcgtcgagacctggcagtccttttaccggaagaagcttaaggaggtgtggaaacctgccgtgcggtctggcggatctggcggaggctcctatggccaccgccctgaccgaccccgcccaggtgagcgtgaccttcgacgacgtggccgtgaccttcacccaggaggagtggggccagctggacctggcccagaggaccctgtaccaggaggtgatgctggagaactgcggcctgctggtgagcctgggctgccccgtgcccaggcccgagctgatctaccacctggagcacggccaggagccctggaccaggaaggaggacctgagccaggacggatctggctccggcagcggccccaagaaaaagagaaaagtctaagctgccttctgcggggcttgccttctggccatgcccttcttctctcccttgcacctgtacctcttggtctttgaataaagcctgagtaggaaggctagcaaaaaaaaaaaaaaaaaaaaaaaaaaaaaaaaaaaaaaaaaaaaaaaaaaaaaaaaaaaaaaaaaaaaaaaaaaaaaaaa

SEQ ID NO: 16833 - RNA, 9485 nt, synthetic construct
  source 1..9485: mol_type = other RNA
aggaaataagagagaaaagaagagtaagaagaaatataagagccaccatggcccctaagaagaagcgtaaagtgagccggatggaacgcctcgtctacgaggtgcggcagaagtgcagaaacatcgaggacatctgcatctcctgcggatctctgaacgtgaccctggagcacccactgttcatcggcggcatgtgccagaactgtaaaaactgttttctggagtgtgcctatcaatacgacgatgacggctaccagagctactgcaccatctgttgcggcggaagagaggtgctgatgtgtggaaataacaactgctgccggtgcttctgcgtggaatgcgtggacctgctggtgggccccggcgccgcccaggccgctattaaggaagatccttggaactgctacatgtgcggccacaagggcacatacggcctgctgagacggagagaggactggcctagcagactgcagatgttcttcgccaataaccacgaccaggagttcgacccccctaaggtgtaccctcccgtccccgccgagaagagaaagcccatccgggtcctgagcctgttcgatggcatcgccaccggtctgctggtgctgaaggacctgggcatccaggtggataggtacattgcctccgaggtgtgcgaggactccatcaccgtgggaatggtgcgtcatcagggcaagatcatgtacgtgggcgacgtgcggagcgtgacacagaagcatatccaggagtggggccctttcgacctggtgatcggcggcagcccttgcaatgacctgagcatcgtgaacccagcccggaagggcctgtacgagggaaccggcagactgttcttcgagttttacagactgctgcacgacgcccggcctaaggaaggcgacgaccggcccttcttttggctgttcgagaatgtggtggccatgggagtcagcgacaagcgggatattagccggttcctggagagcaaccccgtgatgatcgatgccaaggaagtgagcgccgcccaccgggccagatacttctggggcaatctgcctggcatgaacagacccctggccagcaccgtgaacgacaagctggagctgcaggagtgcctggagcacggccggatcgccaagttcagcaaggtgagaaccatcaccacccgaagcaacagcatcaaacaaggcaaggaccagcactttcctgtgttcatgaacgagaaggaggacatcctgtggtgtaccgagatggagagagtgttcgggttcccagtccactacacagatgtcagcaacatgtctagactggccagacagagactgctgggaagaagctggtccgtccctgtgatcagacacctgttcgcccctctgaaggagtacttcgcctgcgtgagcagcggcaacagcaacgccaacagccggggccccagcttctctagcggcctggtgccactgtccctgagagggagccacatgggccccatggagatctacaaaaccgtgagcgcctggaagcggcagcctgtgcgcgtgctgagcctgtttcggaatatcgataaagtcctgaaaagcctgggattcctggagagcggctctggctccggcggtggcaccctgaagtacgtggaggatgtgacaaacgtggtcagacgggatgtggagaagtggggccccttcgatctggtgtacggcagcacccaacccctgggcagctcttgtgaccggtgccctggctggtacatgtttcagttccaccggatcctgcagtacgccctgccgagacaggagtcccagcggccattcttttggattttcatggacaacttgctgctgaccgaggatgaccaggaaactaccactcggttcctgcagaccgaagccgtgaccctgcaggacgtgagaggccgggactaccagaacgccatgcgggtgtggtccaacatccctggactgaaaagcaagcacgcacctctgacccctaaagaagaggagtacctgcaggcccaggtgcggagcagaagcaagctggacgcccctaaggtggatctgctggtgaagaattgcctcctgcccctgagagagtacttcaagtatttcagccagaatagtctgcccctgggaggcagcggcggcggcgccctggtgacatttgaggacgtcgccgtgcggttcacccaggaggaatgggctctgctggatccttctcagaaaatcctgtaccgggacgtgatgagagagacataccggaatctgacctccgtgggcatcaactgggaatgttgggaccttgaagcctgcttcagaagcctgggaagaaacctgagagtgcaggtggtgaagagaaagtgcgagctgaccaacagcggcccctgcgccgagggcggcccaagcagcggcgcccctcctcccagcggcggcagcccagccggctccccaacctctaccgaggagggcacctctgagtccgccacccccgagagcggccctggcacctccaccgagcccagcgagggcagcgcacccggcagccctgccggcagccccacctccacagaggagggaaccagcaccgagcccagcgaaggcagcgccccaggcaccagcaccgagcctagtgagcaggagattaaacggatcaacaagatcagaagaagacttgtgaaagacagcaacaccaagaaggccggcaagacaggccccatgaaaaccctgctggttagagtgatgacacccgatctgagagagcggctggaaaacctgagaaagaagcctgaaaatatcccccagcccatcagcaatacatctagagccaacctgaataagctgctgaccgattacaccgaaatgaagaaggcgatcctgcatgtgtactgggaagagttccagaaggaccctgtgggcctgatgagccgggtggcccagcctgccagcaagaagatcgatcagaacaagctgaaacctgagatggacgagaagggcaacctgaccaccgccggctttgcctgctctcagtgtggccagcccctgttcgtgtacaagctggagcaggtgtctgagaagggcaaggcttacaccaactacttcggacggtgcaatgtggccgagcacgaaaagctgatcctgctggcccagctgaagcccgagaaggatagcgacgaagccgtgacatatagcctgggaaagtttgggcagagggccctggatttctacagcattcatgtgaccaaggagtccacccaccccgtgaagcccctggcccagatcgccggaaacagatacgcctccggacctgtgggaaaggccctgagcgacgcatgtatgggcacaatcgcctccttcctgtctaagtaccaggacatcatcatcgaacaccagaaggtggtgaagggcaaccagaagagactggagagcctgcgggagctggccggcaaggaaaacctggaataccctagcgtgaccctgccacctcagcctcacaccaaggagggcgttgatgcctacaacgaagtgatcgcccgggtgcgaatgtgggtgaacctgaacctgtggcagaagctgaagctaagcagagatgatgccaagcctctgctgagactgaagggattcccttcctttcctctggtcgagagacaggccaacgaagtggactggtgggacatggtgtgtaacgtgaagaagctgatcaacgagaaaaaggaggatggcaaggtgttttggcagaatctggctggctacaagagacaggaagccctgagaccatacctgagcagcgaggaagatcggaagaagggaaagaaattcgctcggtaccagctgggcgacctgctgctgcacctggaaaagaagcacggcgaggactggggaaaggtgtacgacgaggcctgggagcggattgacaagaaagtggaaggcctgagcaagcacatcaagctggaagaggaacggagaagcgaggacgcccagagcaaggccgccctgaccgactggctgcgggctaaggccagcttcgtgatcgagggcctgaaggaggccgacaaggacgagttctgcagatgcgagctgaagctgcagaagtggtacggggacctgcggggaaagcccttcgccatcgaagccgagaacagcatcctggacatcagcggcttcagcaagcagtacaactgtgccttcatctggcagaaggacggcgtgaagaagctgaacctgtacctgatcatcaactacttcaagggcggcaagctgcggttcaagaagatcaaacctgaagccttcgaagccaacagattctacaccgtgatcaacaaaaagagcggcgagatcgtgcccatggaggtgaacttcaacttcgacgaccccaacctgatcatcctgcctctggcctttggcaagagacagggcagagaattcatctggaacgacctgctgtccctggaaaccggcagcctgaagctggccaacggaagagtgatcgagaagacactgtacaacagaagaacccggcaggatgagcctgccctgttcgtggccctgaccttcgagcggcgggaggtcctggactcctccaatatcaaaccaatgaacctgatcggcgtggcaagaggcgaaaacatccccgccgtgatcgccctgaccgaccccgagggctgcccactgagccggtttaaggatagcctgggaaacccaacccacatcctgagaatcggcgagagctataaggagaagcagcggaccatccaggccaagaaggaggtggagcagcggagagccggcggctacagccggaagtacgccagcaaagccaagaatctggcagacgatatggtgagaaacaccgctagagatctgctgtactacgccgtgacccaggatgccatgctgatcttcgccaacctgagccggggcttcggccggcagggcaagcggaccttcatggccgagagacagtacacacggatggaggactggctgaccgccaagctggcctacgagggcctgagcaagacctacctgtccaagacactggcccagtacacctccaagacatgcagcaactgtgggtttaccatcaccagcgccgactacgacagggtgctggagaagctgaagaagacagcaacaggctggatgaccacaattaacggcaaggagctgaaggtggagggccagattacctactacaacagatacaagagacagaacgtagtcaaggacctgtccgtcgagctggatagactgagcgaagaatctgtgaacaacgacatctcctcctggacaaagggcagaagcggagaagctctgagcctcctgaagaaaagattctcccatagacccgtgcaggagaagttcgtgtgcctgaactgcggcttcgagacacacgcagccgagcaagccgccctgaacatcgccagatcctggctgttcctgcggagccaggagtacaagaaataccagacaaacaagacaaccggcaacaccgataagagagccttcgtcgagacctggcagtccttttaccggaagaagcttaaggaggtgtggaaacctgccgtgcggtctggcggatctggcggaggctccaggcccgagagcgtgaccttcgaggacgtggccgtgtacttcagcgagaacgagtggatcggcctggcccccgcccagagggtgctgtacagggacgtgatgctggagaactacggcgtggtggccagcctggccttccccttccccaagcccgccctgatcagccagctggagaggggcgaggccccctggtgcaaggccccccagggcgccctggacggcgagtgccccaggggcgtgagcggcggcccaagcagcggcgcccctcctcccagcggcggcagcccagccggctccccaacctctaccgaggagggcacctctgagtccgccacccccgagagcggccctggcacctccaccgagcccagcgagggcagcgcacccggcagccctgccggcagccccacctccacagaggagggaaccagcaccgagcccagcgaaggcagcgccccaggcaccagcaccgagcctagtgagcaggagattaaacggatcaacaagatcagaagaagacttgtgaaagacagcaacaccaagaaggccggcaagacaggccccatgaaaaccctgctggttagagtgatgacacccgatctgagagagcggctggaaaacctgagaaagaagcctgaaaatatcccccagcccatcagcaatacatctagagccaacctgaataagctgctgaccgattacaccgaaatgaagaaggcgatcctgcatgtgtactgggaagagttccagaaggaccctgtgggcctgatgagccgggtggcccagcctgccagcaagaagatcgatcagaacaagctgaaacctgagatggacgagaagggcaacctgaccaccgccggctttgcctgctctcagtgtggccagcccctgttcgtgtacaagctggagcaggtgtctgagaagggcaaggcttacaccaactacttcggacggtgcaatgtggccgagcacgaaaagctgatcctgctggcccagctgaagcccgagaaggatagcgacgaagccgtgacatatagcctgggaaagtttgggcagagggccctggatttctacagcattcatgtgaccaaggagtccacccaccccgtgaagcccctggcccagatcgccggaaacagatacgcctccggacctgtgggaaaggccctgagcgacgcatgtatgggcacaatcgcctccttcctgtctaagtaccaggacatcatcatcgaacaccagaaggtggtgaagggcaaccagaagagactggagagcctgcgggagctggccggcaaggaaaacctggaataccctagcgtgaccctgccacctcagcctcacaccaaggagggcgttgatgcctacaacgaagtgatcgcccgggtgcgaatgtgggtgaacctgaacctgtggcagaagctgaagctaagcagagatgatgccaagcctctgctgagactgaagggattcccttcctttcctctggtcgagagacaggccaacgaagtggactggtgggacatggtgtgtaacgtgaagaagctgatcaacgagaaaaaggaggatggcaaggtgttttggcagaatctggctggctacaagagacaggaagccctgagaccatacctgagcagcgaggaagatcggaagaagggaaagaaattcgctcggtaccagctgggcgacctgctgctgcacctggaaaagaagcacggcgaggactggggaaaggtgtacgacgaggcctgggagcggattgacaagaaagtggaaggcctgagcaagcacatcaagctggaagaggaacggagaagcgaggacgcccagagcaaggccgccctgaccgactggctgcgggctaaggccagcttcgtgatcgagggcctgaaggaggccgacaaggacgagttctgcagatgcgagctgaagctgcagaagtggtacggggacctgcggggaaagcccttcgccatcgaagccgagaacagcatcctggacatcagcggcttcagcaagcagtacaactgtgccttcatctggcagaaggacggcgtgaagaagctgaacctgtacctgatcatcaactacttcaagggcggcaagctgcggttcaagaagatcaaacctgaagccttcgaagccaacagattctacaccgtgatcaacaaaaagagcggcgagatcgtgcccatggaggtgaacttcaacttcgacgaccccaacctgatcatcctgcctctggcctttggcaagagacagggcagagaattcatctggaacgacctgctgtccctggaaaccggcagcctgaagctggccaacggaagagtgatcgagaagacactgtacaacagaagaacccggcaggatgagcctgccctgttcgtggccctgaccttcgagcggcgggaggtcctggactcctccaatatcaaaccaatgaacctgatcggcgtggcaagaggcgaaaacatccccgccgtgatcgccctgaccgaccccgagggctgcccactgagccggtttaaggatagcctgggaaacccaacccacatcctgagaatcggcgagagctataaggagaagcagcggaccatccaggccaagaaggaggtggagcagcggagagccggcggctacagccggaagtacgccagcaaagccaagaatctggcagacgatatggtgagaaacaccgctagagatctgctgtactacgccgtgacccaggatgccatgctgatcttcgccaacctgagccggggcttcggccggcagggcaagcggaccttcatggccgagagacagtacacacggatggaggactggctgaccgccaagctggcctacgagggcctgagcaagacctacctgtccaagacactggcccagtacacctccaagacatgcagcaactgtgggtttaccatcaccagcgccgactacgacagggtgctggagaagctgaagaagacagcaacaggctggatgaccacaattaacggcaaggagctgaaggtggagggccagattacctactacaacagatacaagagacagaacgtagtcaaggacctgtccgtcgagctggatagactgagcgaagaatctgtgaacaacgacatctcctcctggacaaagggcagaagcggagaagctctgagcctcctgaagaaaagattctcccatagacccgtgcaggagaagttcgtgtgcctgaactgcggcttcgagacacacgcagccgagcaagccgccctgaacatcgccagatcctggctgttcctgcggagccaggagtacaagaaataccagacaaacaagacaaccggcaacaccgataagagagccttcgtcgagacctggcagtccttttaccggaagaagcttaaggaggtgtggaaacctgccgtgcggtctggcggatctggcggaggctcctaggcccgagagcgtgaccttcgaggacgtggccgtgtacttcagcgagaacgagtggatcggcctggcccccgcccagagggtgctgtacagggacgtgatgctggagaactacggcgtggtggccagcctggccttccccttccccaagcccgccctgatcagccagctggagaggggcgaggccccctggtgcaaggccccccagggcgccctggacggcgagtgccccaggggcgtgagcggatctggctccggcagcggccccaagaaaaagagaaaagtctaagctgccttctgcggggcttgccttctggccatgcccttcttctctcccttgcacctgtacctcttggtctttgaataaagcctgagtaggaaggctagcaaaaaaaaaaaaaaaaaaaaaaaaaaaaaaaaaaaaaaaaaaaaaaaaaaaaaaaaaaaaaaaaaaaaaaaaaaaaaaaa

SEQ ID NO: 16834 - RNA, 9485 nt, synthetic construct
  source 1..9485: mol_type = other RNA
aggaaataagagagaaaagaagagtaagaagaaatataagagccaccatggcccctaagaagaagcgtaaagtgagccggatggaacgcctcgtctacgaggtgcggcagaagtgcagaaacatcgaggacatctgcatctcctgcggatctctgaacgtgaccctggagcacccactgttcatcggcggcatgtgccagaactgtaaaaactgttttctggagtgtgcctatcaatacgacgatgacggctaccagagctactgcaccatctgttgcggcggaagagaggtgctgatgtgtggaaataacaactgctgccggtgcttctgcgtggaatgcgtggacctgctggtgggccccggcgccgcccaggccgctattaaggaagatccttggaactgctacatgtgcggccacaagggcacatacggcctgctgagacggagagaggactggcctagcagactgcagatgttcttcgccaataaccacgaccaggagttcgacccccctaaggtgtaccctcccgtccccgccgagaagagaaagcccatccgggtcctgagcctgttcgatggcatcgccaccggtctgctggtgctgaaggacctgggcatccaggtggataggtacattgcctccgaggtgtgcgaggactccatcaccgtgggaatggtgcgtcatcagggcaagatcatgtacgtgggcgacgtgcggagcgtgacacagaagcatatccaggagtggggccctttcgacctggtgatcggcggcagcccttgcaatgacctgagcatcgtgaacccagcccggaagggcctgtacgagggaaccggcagactgttcttcgagttttacagactgctgcacgacgcccggcctaaggaaggcgacgaccggcccttcttttggctgttcgagaatgtggtggccatgggagtcagcgacaagcgggatattagccggttcctggagagcaaccccgtgatgatcgatgccaaggaagtgagcgccgcccaccgggccagatacttctggggcaatctgcctggcatgaacagacccctggccagcaccgtgaacgacaagctggagctgcaggagtgcctggagcacggccggatcgccaagttcagcaaggtgagaaccatcaccacccgaagcaacagcatcaaacaaggcaaggaccagcactttcctgtgttcatgaacgagaaggaggacatcctgtggtgtaccgagatggagagagtgttcgggttcccagtccactacacagatgtcagcaacatgtctagactggccagacagagactgctgggaagaagctggtccgtccctgtgatcagacacctgttcgcccctctgaaggagtacttcgcctgcgtgagcagcggcaacagcaacgccaacagccggggccccagcttctctagcggcctggtgccactgtccctgagagggagccacatgggccccatggagatctacaaaaccgtgagcgcctggaagcggcagcctgtgcgcgtgctgagcctgtttcggaatatcgataaagtcctgaaaagcctgggattcctggagagcggctctggctccggcggtggcaccctgaagtacgtggaggatgtgacaaacgtggtcagacgggatgtggagaagtggggccccttcgatctggtgtacggcagcacccaacccctgggcagctcttgtgaccggtgccctggctggtacatgtttcagttccaccggatcctgcagtacgccctgccgagacaggagtcccagcggccattcttttggattttcatggacaacttgctgctgaccgaggatgaccaggaaactaccactcggttcctgcagaccgaagccgtgaccctgcaggacgtgagaggccgggactaccagaacgccatgcgggtgtggtccaacatccctggactgaaaagcaagcacgcacctctgacccctaaagaagaggagtacctgcaggcccaggtgcggagcagaagcaagctggacgcccctaaggtggatctgctggtgaagaattgcctcctgcccctgagagagtacttcaagtatttcagccagaatagtctgcccctgggaggcagcggcggcggcgccctggtgacatttgaggacgtcgccgtgcggttcacccaggaggaatgggctctgctggatccttctcagaaaatcctgtaccgggacgtgatgagagagacataccggaatctgacctccgtgggcatcaactgggaatgttgggaccttgaagcctgcttcagaagcctgggaagaaacctgagagtgcaggtggtgaagagaaagtgcgagctgaccaacagcggcccctgcgccgagggcggcccaagcagcggcgcccctcctcccagcggcggcagcccagccggctccccaacctctaccgaggagggcacctctgagtccgccacccccgagagcggccctggcacctccaccgagcccagcgagggcagcgcacccggcagccctgccggcagccccacctccacagaggagggaaccagcaccgagcccagcgaaggcagcgccccaggcaccagcaccgagcctagtgagcaggagattaaacggatcaacaagatcagaagaagacttgtgaaagacagcaacaccaagaaggccggcaagacaggccccatgaaaaccctgctggttagagtgatgacacccgatctgagagagcggctggaaaacctgagaaagaagcctgaaaatatcccccagcccatcagcaatacatctagagccaacctgaataagctgctgaccgattacaccgaaatgaagaaggcgatcctgcatgtgtactgggaagagttccagaaggaccctgtgggcctgatgagccgggtggcccagcctgccagcaagaagatcgatcagaacaagctgaaacctgagatggacgagaagggcaacctgaccaccgccggctttgcctgctctcagtgtggccagcccctgttcgtgtacaagctggagcaggtgtctgagaagggcaaggcttacaccaactacttcggacggtgcaatgtggccgagcacgaaaagctgatcctgctggcccagctgaagcccgagaaggatagcgacgaagccgtgacatatagcctgggaaagtttgggcagagggccctggatttctacagcattcatgtgaccaaggagtccacccaccccgtgaagcccctggcccagatcgccggaaacagatacgcctccggacctgtgggaaaggccctgagcgacgcatgtatgggcacaatcgcctccttcctgtctaagtaccaggacatcatcatcgaacaccagaaggtggtgaagggcaaccagaagagactggagagcctgcgggagctggccggcaaggaaaacctggaataccctagcgtgaccctgccacctcagcctcacaccaaggagggcgttgatgcctacaacgaagtgatcgcccgggtgcgaatgtgggtgaacctgaacctgtggcagaagctgaagctaagcagagatgatgccaagcctctgctgagactgaagggattcccttcctttcctctggtcgagagacaggccaacgaagtggactggtgggacatggtgtgtaacgtgaagaagctgatcaacgagaaaaaggaggatggcaaggtgttttggcagaatctggctggctacaagagacaggaagccctgagaccatacctgagcagcgaggaagatcggaagaagggaaagaaattcgctcggtaccagctgggcgacctgctgctgcacctggaaaagaagcacggcgaggactggggaaaggtgtacgacgaggcctgggagcggattgacaagaaagtggaaggcctgagcaagcacatcaagctggaagaggaacggagaagcgaggacgcccagagcaaggccgccctgaccgactggctgcgggctaaggccagcttcgtgatcgagggcctgaaggaggccgacaaggacgagttctgcagatgcgagctgaagctgcagaagtggtacggggacctgcggggaaagcccttcgccatcgaagccgagaacagcatcctggacatcagcggcttcagcaagcagtacaactgtgccttcatctggcagaaggacggcgtgaagaagctgaacctgtacctgatcatcaactacttcaagggcggcaagctgcggttcaagaagatcaaacctgaagccttcgaagccaacagattctacaccgtgatcaacaaaaagagcggcgagatcgtgcccatggaggtgaacttcaacttcgacgaccccaacctgatcatcctgcctctggcctttggcaagagacagggcagagaattcatctggaacgacctgctgtccctggaaaccggcagcctgaagctggccaacggaagagtgatcgagaagacactgtacaacagaagaacccggcaggatgagcctgccctgttcgtggccctgaccttcgagcggcgggaggtcctggactcctccaatatcaaaccaatgaacctgatcggcgtggcaagaggcgaaaacatccccgccgtgatcgccctgaccgaccccgagggctgcccactgagccggtttaaggatagcctgggaaacccaacccacatcctgagaatcggcgagagctataaggagaagcagcggaccatccaggccaagaaggaggtggagcagcggagagccggcggctacagccggaagtacgccagcaaagccaagaatctggcagacgatatggtgagaaacaccgctagagatctgctgtactacgccgtgacccaggatgccatgctgatcttcgccaacctgagccggggcttcggccggcagggcaagcggaccttcatggccgagagacagtacacacggatggaggactggctgaccgccaagctggcctacgagggcctgagcaagacctacctgtccaagacactggcccagtacacctccaagacatgcagcaactgtgggtttaccatcaccagcgccgactacgacagggtgctggagaagctgaagaagacagcaacaggctggatgaccacaattaacggcaaggagctgaaggtggagggccagattacctactacaacagatacaagagacagaacgtagtcaaggacctgtccgtcgagctggatagactgagcgaagaatctgtgaacaacgacatctcctcctggacaaagggcagaagcggagaagctctgagcctcctgaagaaaagattctcccatagacccgtgcaggagaagttcgtgtgcctgaactgcggcttcgagacacacgcagccgagcaagccgccctgaacatcgccagatcctggctgttcctgcggagccaggagtacaagaaataccagacaaacaagacaaccggcaacaccgataagagagccttcgtcgagacctggcagtccttttaccggaagaagcttaaggaggtgtggaaacctgccgtgcggtctggcggatctggcggaggctccacccccgagcccgtgaggttcgccgacgtggccgtgtacttcagcctggaggagtggggctgcctgcagcccgcccagagggccctgtacagggacgtgatgagggagacctacggccacctgggcgccctgggcttcaggggcaccaagcccgccctgatcagctgggtggagaaggaggccgagctgtggggccccgacgccagggaccccgaggtgggcgagtgcctgaccgaggccgacggcggcccaagcagcggcgcccctcctcccagcggcggcagcccagccggctccccaacctctaccgaggagggcacctctgagtccgccacccccgagagcggccctggcacctccaccgagcccagcgagggcagcgcacccggcagccctgccggcagccccacctccacagaggagggaaccagcaccgagcccagcgaaggcagcgccccaggcaccagcaccgagcctagtgagcaggagattaaacggatcaacaagatcagaagaagacttgtgaaagacagcaacaccaagaaggccggcaagacaggccccatgaaaaccctgctggttagagtgatgacacccgatctgagagagcggctggaaaacctgagaaagaagcctgaaaatatcccccagcccatcagcaatacatctagagccaacctgaataagctgctgaccgattacaccgaaatgaagaaggcgatcctgcatgtgtactgggaagagttccagaaggaccctgtgggcctgatgagccgggtggcccagcctgccagcaagaagatcgatcagaacaagctgaaacctgagatggacgagaagggcaacctgaccaccgccggctttgcctgctctcagtgtggccagcccctgttcgtgtacaagctggagcaggtgtctgagaagggcaaggcttacaccaactacttcggacggtgcaatgtggccgagcacgaaaagctgatcctgctggcccagctgaagcccgagaaggatagcgacgaagccgtgacatatagcctgggaaagtttgggcagagggccctggatttctacagcattcatgtgaccaaggagtccacccaccccgtgaagcccctggcccagatcgccggaaacagatacgcctccggacctgtgggaaaggccctgagcgacgcatgtatgggcacaatcgcctccttcctgtctaagtaccaggacatcatcatcgaacaccagaaggtggtgaagggcaaccagaagagactggagagcctgcgggagctggccggcaaggaaaacctggaataccctagcgtgaccctgccacctcagcctcacaccaaggagggcgttgatgcctacaacgaagtgatcgcccgggtgcgaatgtgggtgaacctgaacctgtggcagaagctgaagctaagcagagatgatgccaagcctctgctgagactgaagggattcccttcctttcctctggtcgagagacaggccaacgaagtggactggtgggacatggtgtgtaacgtgaagaagctgatcaacgagaaaaaggaggatggcaaggtgttttggcagaatctggctggctacaagagacaggaagccctgagaccatacctgagcagcgaggaagatcggaagaagggaaagaaattcgctcggtaccagctgggcgacctgctgctgcacctggaaaagaagcacggcgaggactggggaaaggtgtacgacgaggcctgggagcggattgacaagaaagtggaaggcctgagcaagcacatcaagctggaagaggaacggagaagcgaggacgcccagagcaaggccgccctgaccgactggctgcgggctaaggccagcttcgtgatcgagggcctgaaggaggccgacaaggacgagttctgcagatgcgagctgaagctgcagaagtggtacggggacctgcggggaaagcccttcgccatcgaagccgagaacagcatcctggacatcagcggcttcagcaagcagtacaactgtgccttcatctggcagaaggacggcgtgaagaagctgaacctgtacctgatcatcaactacttcaagggcggcaagctgcggttcaagaagatcaaacctgaagccttcgaagccaacagattctacaccgtgatcaacaaaaagagcggcgagatcgtgcccatggaggtgaacttcaacttcgacgaccccaacctgatcatcctgcctctggcctttggcaagagacagggcagagaattcatctggaacgacctgctgtccctggaaaccggcagcctgaagctggccaacggaagagtgatcgagaagacactgtacaacagaagaacccggcaggatgagcctgccctgttcgtggccctgaccttcgagcggcgggaggtcctggactcctccaatatcaaaccaatgaacctgatcggcgtggcaagaggcgaaaacatccccgccgtgatcgccctgaccgaccccgagggctgcccactgagccggtttaaggatagcctgggaaacccaacccacatcctgagaatcggcgagagctataaggagaagcagcggaccatccaggccaagaaggaggtggagcagcggagagccggcggctacagccggaagtacgccagcaaagccaagaatctggcagacgatatggtgagaaacaccgctagagatctgctgtactacgccgtgacccaggatgccatgctgatcttcgccaacctgagccggggcttcggccggcagggcaagcggaccttcatggccgagagacagtacacacggatggaggactggctgaccgccaagctggcctacgagggcctgagcaagacctacctgtccaagacactggcccagtacacctccaagacatgcagcaactgtgggtttaccatcaccagcgccgactacgacagggtgctggagaagctgaagaagacagcaacaggctggatgaccacaattaacggcaaggagctgaaggtggagggccagattacctactacaacagatacaagagacagaacgtagtcaaggacctgtccgtcgagctggatagactgagcgaagaatctgtgaacaacgacatctcctcctggacaaagggcagaagcggagaagctctgagcctcctgaagaaaagattctcccatagacccgtgcaggagaagttcgtgtgcctgaactgcggcttcgagacacacgcagccgagcaagccgccctgaacatcgccagatcctggctgttcctgcggagccaggagtacaagaaataccagacaaacaagacaaccggcaacaccgataagagagccttcgtcgagacctggcagtccttttaccggaagaagcttaaggaggtgtggaaacctgccgtgcggtctggcggatctggcggaggctcctacccccgagcccgtgaggttcgccgacgtggccgtgtacttcagcctggaggagtggggctgcctgcagcccgcccagagggccctgtacagggacgtgatgagggagacctacggccacctgggcgccctgggcttcaggggcaccaagcccgccctgatcagctgggtggagaaggaggccgagctgtggggccccgacgccagggaccccgaggtgggcgagtgcctgaccgaggccgacggatctggctccggcagcggccccaagaaaaagagaaaagtctaagctgccttctgcggggcttgccttctggccatgcccttcttctctcccttgcacctgtacctcttggtctttgaataaagcctgagtaggaaggctagcaaaaaaaaaaaaaaaaaaaaaaaaaaaaaaaaaaaaaaaaaaaaaaaaaaaaaaaaaaaaaaaaaaaaaaaaaaaaaaaa

SEQ ID NO: 16835 - RNA, 9485 nt, synthetic construct
  source 1..9485: mol_type = other RNA
aggaaataagagagaaaagaagagtaagaagaaatataagagccaccatggcccctaagaagaagcgtaaagtgagccggatggaacgcctcgtctacgaggtgcggcagaagtgcagaaacatcgaggacatctgcatctcctgcggatctctgaacgtgaccctggagcacccactgttcatcggcggcatgtgccagaactgtaaaaactgttttctggagtgtgcctatcaatacgacgatgacggctaccagagctactgcaccatctgttgcggcggaagagaggtgctgatgtgtggaaataacaactgctgccggtgcttctgcgtggaatgcgtggacctgctggtgggccccggcgccgcccaggccgctattaaggaagatccttggaactgctacatgtgcggccacaagggcacatacggcctgctgagacggagagaggactggcctagcagactgcagatgttcttcgccaataaccacgaccaggagttcgacccccctaaggtgtaccctcccgtccccgccgagaagagaaagcccatccgggtcctgagcctgttcgatggcatcgccaccggtctgctggtgctgaaggacctgggcatccaggtggataggtacattgcctccgaggtgtgcgaggactccatcaccgtgggaatggtgcgtcatcagggcaagatcatgtacgtgggcgacgtgcggagcgtgacacagaagcatatccaggagtggggccctttcgacctggtgatcggcggcagcccttgcaatgacctgagcatcgtgaacccagcccggaagggcctgtacgagggaaccggcagactgttcttcgagttttacagactgctgcacgacgcccggcctaaggaaggcgacgaccggcccttcttttggctgttcgagaatgtggtggccatgggagtcagcgacaagcgggatattagccggttcctggagagcaaccccgtgatgatcgatgccaaggaagtgagcgccgcccaccgggccagatacttctggggcaatctgcctggcatgaacagacccctggccagcaccgtgaacgacaagctggagctgcaggagtgcctggagcacggccggatcgccaagttcagcaaggtgagaaccatcaccacccgaagcaacagcatcaaacaaggcaaggaccagcactttcctgtgttcatgaacgagaaggaggacatcctgtggtgtaccgagatggagagagtgttcgggttcccagtccactacacagatgtcagcaacatgtctagactggccagacagagactgctgggaagaagctggtccgtccctgtgatcagacacctgttcgcccctctgaaggagtacttcgcctgcgtgagcagcggcaacagcaacgccaacagccggggccccagcttctctagcggcctggtgccactgtccctgagagggagccacatgggccccatggagatctacaaaaccgtgagcgcctggaagcggcagcctgtgcgcgtgctgagcctgtttcggaatatcgataaagtcctgaaaagcctgggattcctggagagcggctctggctccggcggtggcaccctgaagtacgtggaggatgtgacaaacgtggtcagacgggatgtggagaagtggggccccttcgatctggtgtacggcagcacccaacccctgggcagctcttgtgaccggtgccctggctggtacatgtttcagttccaccggatcctgcagtacgccctgccgagacaggagtcccagcggccattcttttggattttcatggacaacttgctgctgaccgaggatgaccaggaaactaccactcggttcctgcagaccgaagccgtgaccctgcaggacgtgagaggccgggactaccagaacgccatgcgggtgtggtccaacatccctggactgaaaagcaagcacgcacctctgacccctaaagaagaggagtacctgcaggcccaggtgcggagcagaagcaagctggacgcccctaaggtggatctgctggtgaagaattgcctcctgcccctgagagagtacttcaagtatttcagccagaatagtctgcccctgggaggcagcggcggcggcgccctggtgacatttgaggacgtcgccgtgcggttcacccaggaggaatgggctctgctggatccttctcagaaaatcctgtaccgggacgtgatgagagagacataccggaatctgacctccgtgggcatcaactgggaatgttgggaccttgaagcctgcttcagaagcctgggaagaaacctgagagtgcaggtggtgaagagaaagtgcgagctgaccaacagcggcccctgcgccgagggcggcccaagcagcggcgcccctcctcccagcggcggcagcccagccggctccccaacctctaccgaggagggcacctctgagtccgccacccccgagagcggccctggcacctccaccgagcccagcgagggcagcgcacccggcagccctgccggcagccccacctccacagaggagggaaccagcaccgagcccagcgaaggcagcgccccaggcaccagcaccgagcctagtgagcaggagattaaacggatcaacaagatcagaagaagacttgtgaaagacagcaacaccaagaaggccggcaagacaggccccatgaaaaccctgctggttagagtgatgacacccgatctgagagagcggctggaaaacctgagaaagaagcctgaaaatatcccccagcccatcagcaatacatctagagccaacctgaataagctgctgaccgattacaccgaaatgaagaaggcgatcctgcatgtgtactgggaagagttccagaaggaccctgtgggcctgatgagccgggtggcccagcctgccagcaagaagatcgatcagaacaagctgaaacctgagatggacgagaagggcaacctgaccaccgccggctttgcctgctctcagtgtggccagcccctgttcgtgtacaagctggagcaggtgtctgagaagggcaaggcttacaccaactacttcggacggtgcaatgtggccgagcacgaaaagctgatcctgctggcccagctgaagcccgagaaggatagcgacgaagccgtgacatatagcctgggaaagtttgggcagagggccctggatttctacagcattcatgtgaccaaggagtccacccaccccgtgaagcccctggcccagatcgccggaaacagatacgcctccggacctgtgggaaaggccctgagcgacgcatgtatgggcacaatcgcctccttcctgtctaagtaccaggacatcatcatcgaacaccagaaggtggtgaagggcaaccagaagagactggagagcctgcgggagctggccggcaaggaaaacctggaataccctagcgtgaccctgccacctcagcctcacaccaaggagggcgttgatgcctacaacgaagtgatcgcccgggtgcgaatgtgggtgaacctgaacctgtggcagaagctgaagctaagcagagatgatgccaagcctctgctgagactgaagggattcccttcctttcctctggtcgagagacaggccaacgaagtggactggtgggacatggtgtgtaacgtgaagaagctgatcaacgagaaaaaggaggatggcaaggtgttttggcagaatctggctggctacaagagacaggaagccctgagaccatacctgagcagcgaggaagatcggaagaagggaaagaaattcgctcggtaccagctgggcgacctgctgctgcacctggaaaagaagcacggcgaggactggggaaaggtgtacgacgaggcctgggagcggattgacaagaaagtggaaggcctgagcaagcacatcaagctggaagaggaacggagaagcgaggacgcccagagcaaggccgccctgaccgactggctgcgggctaaggccagcttcgtgatcgagggcctgaaggaggccgacaaggacgagttctgcagatgcgagctgaagctgcagaagtggtacggggacctgcggggaaagcccttcgccatcgaagccgagaacagcatcctggacatcagcggcttcagcaagcagtacaactgtgccttcatctggcagaaggacggcgtgaagaagctgaacctgtacctgatcatcaactacttcaagggcggcaagctgcggttcaagaagatcaaacctgaagccttcgaagccaacagattctacaccgtgatcaacaaaaagagcggcgagatcgtgcccatggaggtgaacttcaacttcgacgaccccaacctgatcatcctgcctctggcctttggcaagagacagggcagagaattcatctggaacgacctgctgtccctggaaaccggcagcctgaagctggccaacggaagagtgatcgagaagacactgtacaacagaagaacccggcaggatgagcctgccctgttcgtggccctgaccttcgagcggcgggaggtcctggactcctccaatatcaaaccaatgaacctgatcggcgtggcaagaggcgaaaacatccccgccgtgatcgccctgaccgaccccgagggctgcccactgagccggtttaaggatagcctgggaaacccaacccacatcctgagaatcggcgagagctataaggagaagcagcggaccatccaggccaagaaggaggtggagcagcggagagccggcggctacagccggaagtacgccagcaaagccaagaatctggcagacgatatggtgagaaacaccgctagagatctgctgtactacgccgtgacccaggatgccatgctgatcttcgccaacctgagccggggcttcggccggcagggcaagcggaccttcatggccgagagacagtacacacggatggaggactggctgaccgccaagctggcctacgagggcctgagcaagacctacctgtccaagacactggcccagtacacctccaagacatgcagcaactgtgggtttaccatcaccagcgccgactacgacagggtgctggagaagctgaagaagacagcaacaggctggatgaccacaattaacggcaaggagctgaaggtggagggccagattacctactacaacagatacaagagacagaacgtagtcaaggacctgtccgtcgagctggatagactgagcgaagaatctgtgaacaacgacatctcctcctggacaaagggcagaagcggagaagctctgagcctcctgaagaaaagattctcccatagacccgtgcaggagaagttcgtgtgcctgaactgcggcttcgagacacacgcagccgagcaagccgccctgaacatcgccagatcctggctgttcctgcggagccaggagtacaagaaataccagacaaacaagacaaccggcaacaccgataagagagccttcgtcgagacctggcagtccttttaccggaagaagcttaaggaggtgtggaaacctgccgtgcggtctggcggatctggcggaggctccaccatgaccaccgtgagcagcaccgccaggccccaggagagcgtggccttcgacgacgtggccgtgtacttcaccaagaaggagtgggccatcatggtgcccgaccagagggccctgtacagggacgtgatgctggagaactacgaggccgtggccttcgtggtgccccccaccagcaagcccgccctggtgagccacctggagcagggcaaggagccctgcttcacccagccccagggcgtgggcggcccaagcagcggcgcccctcctcccagcggcggcagcccagccggctccccaacctctaccgaggagggcacctctgagtccgccacccccgagagcggccctggcacctccaccgagcccagcgagggcagcgcacccggcagccctgccggcagccccacctccacagaggagggaaccagcaccgagcccagcgaaggcagcgccccaggcaccagcaccgagcctagtgagcaggagattaaacggatcaacaagatcagaagaagacttgtgaaagacagcaacaccaagaaggccggcaagacaggccccatgaaaaccctgctggttagagtgatgacacccgatctgagagagcggctggaaaacctgagaaagaagcctgaaaatatcccccagcccatcagcaatacatctagagccaacctgaataagctgctgaccgattacaccgaaatgaagaaggcgatcctgcatgtgtactgggaagagttccagaaggaccctgtgggcctgatgagccgggtggcccagcctgccagcaagaagatcgatcagaacaagctgaaacctgagatggacgagaagggcaacctgaccaccgccggctttgcctgctctcagtgtggccagcccctgttcgtgtacaagctggagcaggtgtctgagaagggcaaggcttacaccaactacttcggacggtgcaatgtggccgagcacgaaaagctgatcctgctggcccagctgaagcccgagaaggatagcgacgaagccgtgacatatagcctgggaaagtttgggcagagggccctggatttctacagcattcatgtgaccaaggagtccacccaccccgtgaagcccctggcccagatcgccggaaacagatacgcctccggacctgtgggaaaggccctgagcgacgcatgtatgggcacaatcgcctccttcctgtctaagtaccaggacatcatcatcgaacaccagaaggtggtgaagggcaaccagaagagactggagagcctgcgggagctggccggcaaggaaaacctggaataccctagcgtgaccctgccacctcagcctcacaccaaggagggcgttgatgcctacaacgaagtgatcgcccgggtgcgaatgtgggtgaacctgaacctgtggcagaagctgaagctaagcagagatgatgccaagcctctgctgagactgaagggattcccttcctttcctctggtcgagagacaggccaacgaagtggactggtgggacatggtgtgtaacgtgaagaagctgatcaacgagaaaaaggaggatggcaaggtgttttggcagaatctggctggctacaagagacaggaagccctgagaccatacctgagcagcgaggaagatcggaagaagggaaagaaattcgctcggtaccagctgggcgacctgctgctgcacctggaaaagaagcacggcgaggactggggaaaggtgtacgacgaggcctgggagcggattgacaagaaagtggaaggcctgagcaagcacatcaagctggaagaggaacggagaagcgaggacgcccagagcaaggccgccctgaccgactggctgcgggctaaggccagcttcgtgatcgagggcctgaaggaggccgacaaggacgagttctgcagatgcgagctgaagctgcagaagtggtacggggacctgcggggaaagcccttcgccatcgaagccgagaacagcatcctggacatcagcggcttcagcaagcagtacaactgtgccttcatctggcagaaggacggcgtgaagaagctgaacctgtacctgatcatcaactacttcaagggcggcaagctgcggttcaagaagatcaaacctgaagccttcgaagccaacagattctacaccgtgatcaacaaaaagagcggcgagatcgtgcccatggaggtgaacttcaacttcgacgaccccaacctgatcatcctgcctctggcctttggcaagagacagggcagagaattcatctggaacgacctgctgtccctggaaaccggcagcctgaagctggccaacggaagagtgatcgagaagacactgtacaacagaagaacccggcaggatgagcctgccctgttcgtggccctgaccttcgagcggcgggaggtcctggactcctccaatatcaaaccaatgaacctgatcggcgtggcaagaggcgaaaacatccccgccgtgatcgccctgaccgaccccgagggctgcccactgagccggtttaaggatagcctgggaaacccaacccacatcctgagaatcggcgagagctataaggagaagcagcggaccatccaggccaagaaggaggtggagcagcggagagccggcggctacagccggaagtacgccagcaaagccaagaatctggcagacgatatggtgagaaacaccgctagagatctgctgtactacgccgtgacccaggatgccatgctgatcttcgccaacctgagccggggcttcggccggcagggcaagcggaccttcatggccgagagacagtacacacggatggaggactggctgaccgccaagctggcctacgagggcctgagcaagacctacctgtccaagacactggcccagtacacctccaagacatgcagcaactgtgggtttaccatcaccagcgccgactacgacagggtgctggagaagctgaagaagacagcaacaggctggatgaccacaattaacggcaaggagctgaaggtggagggccagattacctactacaacagatacaagagacagaacgtagtcaaggacctgtccgtcgagctggatagactgagcgaagaatctgtgaacaacgacatctcctcctggacaaagggcagaagcggagaagctctgagcctcctgaagaaaagattctcccatagacccgtgcaggagaagttcgtgtgcctgaactgcggcttcgagacacacgcagccgagcaagccgccctgaacatcgccagatcctggctgttcctgcggagccaggagtacaagaaataccagacaaacaagacaaccggcaacaccgataagagagccttcgtcgagacctggcagtccttttaccggaagaagcttaaggaggtgtggaaacctgccgtgcggtctggcggatctggcggaggctcctaccatgaccaccgtgagcagcaccgccaggccccaggagagcgtggccttcgacgacgtggccgtgtacttcaccaagaaggagtgggccatcatggtgcccgaccagagggccctgtacagggacgtgatgctggagaactacgaggccgtggccttcgtggtgccccccaccagcaagcccgccctggtgagccacctggagcagggcaaggagccctgcttcacccagccccagggcgtgggatctggctccggcagcggccccaagaaaaagagaaaagtctaagctgccttctgcggggcttgccttctggccatgcccttcttctctcccttgcacctgtacctcttggtctttgaataaagcctgagtaggaaggctagcaaaaaaaaaaaaaaaaaaaaaaaaaaaaaaaaaaaaaaaaaaaaaaaaaaaaaaaaaaaaaaaaaaaaaaaaaaaaaaaa

SEQ ID NO: 16836 - RNA, 9485 nt, synthetic construct
  source 1..9485: mol_type = other RNA
aggaaataagagagaaaagaagagtaagaagaaatataagagccaccatggcccctaagaagaagcgtaaagtgagccggatggaacgcctcgtctacgaggtgcggcagaagtgcagaaacatcgaggacatctgcatctcctgcggatctctgaacgtgaccctggagcacccactgttcatcggcggcatgtgccagaactgtaaaaactgttttctggagtgtgcctatcaatacgacgatgacggctaccagagctactgcaccatctgttgcggcggaagagaggtgctgatgtgtggaaataacaactgctgccggtgcttctgcgtggaatgcgtggacctgctggtgggccccggcgccgcccaggccgctattaaggaagatccttggaactgctacatgtgcggccacaagggcacatacggcctgctgagacggagagaggactggcctagcagactgcagatgttcttcgccaataaccacgaccaggagttcgacccccctaaggtgtaccctcccgtccccgccgagaagagaaagcccatccgggtcctgagcctgttcgatggcatcgccaccggtctgctggtgctgaaggacctgggcatccaggtggataggtacattgcctccgaggtgtgcgaggactccatcaccgtgggaatggtgcgtcatcagggcaagatcatgtacgtgggcgacgtgcggagcgtgacacagaagcatatccaggagtggggccctttcgacctggtgatcggcggcagcccttgcaatgacctgagcatcgtgaacccagcccggaagggcctgtacgagggaaccggcagactgttcttcgagttttacagactgctgcacgacgcccggcctaaggaaggcgacgaccggcccttcttttggctgttcgagaatgtggtggccatgggagtcagcgacaagcgggatattagccggttcctggagagcaaccccgtgatgatcgatgccaaggaagtgagcgccgcccaccgggccagatacttctggggcaatctgcctggcatgaacagacccctggccagcaccgtgaacgacaagctggagctgcaggagtgcctggagcacggccggatcgccaagttcagcaaggtgagaaccatcaccacccgaagcaacagcatcaaacaaggcaaggaccagcactttcctgtgttcatgaacgagaaggaggacatcctgtggtgtaccgagatggagagagtgttcgggttcccagtccactacacagatgtcagcaacatgtctagactggccagacagagactgctgggaagaagctggtccgtccctgtgatcagacacctgttcgcccctctgaaggagtacttcgcctgcgtgagcagcggcaacagcaacgccaacagccggggccccagcttctctagcggcctggtgccactgtccctgagagggagccacatgggccccatggagatctacaaaaccgtgagcgcctggaagcggcagcctgtgcgcgtgctgagcctgtttcggaatatcgataaagtcctgaaaagcctgggattcctggagagcggctctggctccggcggtggcaccctgaagtacgtggaggatgtgacaaacgtggtcagacgggatgtggagaagtggggccccttcgatctggtgtacggcagcacccaacccctgggcagctcttgtgaccggtgccctggctggtacatgtttcagttccaccggatcctgcagtacgccctgccgagacaggagtcccagcggccattcttttggattttcatggacaacttgctgctgaccgaggatgaccaggaaactaccactcggttcctgcagaccgaagccgtgaccctgcaggacgtgagaggccgggactaccagaacgccatgcgggtgtggtccaacatccctggactgaaaagcaagcacgcacctctgacccctaaagaagaggagtacctgcaggcccaggtgcggagcagaagcaagctggacgcccctaaggtggatctgctggtgaagaattgcctcctgcccctgagagagtacttcaagtatttcagccagaatagtctgcccctgggaggcagcggcggcggcgccctggtgacatttgaggacgtcgccgtgcggttcacccaggaggaatgggctctgctggatccttctcagaaaatcctgtaccgggacgtgatgagagagacataccggaatctgacctccgtgggcatcaactgggaatgttgggaccttgaagcctgcttcagaagcctgggaagaaacctgagagtgcaggtggtgaagagaaagtgcgagctgaccaacagcggcccctgcgccgagggcggcccaagcagcggcgcccctcctcccagcggcggcagcccagccggctccccaacctctaccgaggagggcacctctgagtccgccacccccgagagcggccctggcacctccaccgagcccagcgagggcagcgcacccggcagccctgccggcagccccacctccacagaggagggaaccagcaccgagcccagcgaaggcagcgccccaggcaccagcaccgagcctagtgagcaggagattaaacggatcaacaagatcagaagaagacttgtgaaagacagcaacaccaagaaggccggcaagacaggccccatgaaaaccctgctggttagagtgatgacacccgatctgagagagcggctggaaaacctgagaaagaagcctgaaaatatcccccagcccatcagcaatacatctagagccaacctgaataagctgctgaccgattacaccgaaatgaagaaggcgatcctgcatgtgtactgggaagagttccagaaggaccctgtgggcctgatgagccgggtggcccagcctgccagcaagaagatcgatcagaacaagctgaaacctgagatggacgagaagggcaacctgaccaccgccggctttgcctgctctcagtgtggccagcccctgttcgtgtacaagctggagcaggtgtctgagaagggcaaggcttacaccaactacttcggacggtgcaatgtggccgagcacgaaaagctgatcctgctggcccagctgaagcccgagaaggatagcgacgaagccgtgacatatagcctgggaaagtttgggcagagggccctggatttctacagcattcatgtgaccaaggagtccacccaccccgtgaagcccctggcccagatcgccggaaacagatacgcctccggacctgtgggaaaggccctgagcgacgcatgtatgggcacaatcgcctccttcctgtctaagtaccaggacatcatcatcgaacaccagaaggtggtgaagggcaaccagaagagactggagagcctgcgggagctggccggcaaggaaaacctggaataccctagcgtgaccctgccacctcagcctcacaccaaggagggcgttgatgcctacaacgaagtgatcgcccgggtgcgaatgtgggtgaacctgaacctgtggcagaagctgaagctaagcagagatgatgccaagcctctgctgagactgaagggattcccttcctttcctctggtcgagagacaggccaacgaagtggactggtgggacatggtgtgtaacgtgaagaagctgatcaacgagaaaaaggaggatggcaaggtgttttggcagaatctggctggctacaagagacaggaagccctgagaccatacctgagcagcgaggaagatcggaagaagggaaagaaattcgctcggtaccagctgggcgacctgctgctgcacctggaaaagaagcacggcgaggactggggaaaggtgtacgacgaggcctgggagcggattgacaagaaagtggaaggcctgagcaagcacatcaagctggaagaggaacggagaagcgaggacgcccagagcaaggccgccctgaccgactggctgcgggctaaggccagcttcgtgatcgagggcctgaaggaggccgacaaggacgagttctgcagatgcgagctgaagctgcagaagtggtacggggacctgcggggaaagcccttcgccatcgaagccgagaacagcatcctggacatcagcggcttcagcaagcagtacaactgtgccttcatctggcagaaggacggcgtgaagaagctgaacctgtacctgatcatcaactacttcaagggcggcaagctgcggttcaagaagatcaaacctgaagccttcgaagccaacagattctacaccgtgatcaacaaaaagagcggcgagatcgtgcccatggaggtgaacttcaacttcgacgaccccaacctgatcatcctgcctctggcctttggcaagagacagggcagagaattcatctggaacgacctgctgtccctggaaaccggcagcctgaagctggccaacggaagagtgatcgagaagacactgtacaacagaagaacccggcaggatgagcctgccctgttcgtggccctgaccttcgagcggcgggaggtcctggactcctccaatatcaaaccaatgaacctgatcggcgtggcaagaggcgaaaacatccccgccgtgatcgccctgaccgaccccgagggctgcccactgagccggtttaaggatagcctgggaaacccaacccacatcctgagaatcggcgagagctataaggagaagcagcggaccatccaggccaagaaggaggtggagcagcggagagccggcggctacagccggaagtacgccagcaaagccaagaatctggcagacgatatggtgagaaacaccgctagagatctgctgtactacgccgtgacccaggatgccatgctgatcttcgccaacctgagccggggcttcggccggcagggcaagcggaccttcatggccgagagacagtacacacggatggaggactggctgaccgccaagctggcctacgagggcctgagcaagacctacctgtccaagacactggcccagtacacctccaagacatgcagcaactgtgggtttaccatcaccagcgccgactacgacagggtgctggagaagctgaagaagacagcaacaggctggatgaccacaattaacggcaaggagctgaaggtggagggccagattacctactacaacagatacaagagacagaacgtagtcaaggacctgtccgtcgagctggatagactgagcgaagaatctgtgaacaacgacatctcctcctggacaaagggcagaagcggagaagctctgagcctcctgaagaaaagattctcccatagacccgtgcaggagaagttcgtgtgcctgaactgcggcttcgagacacacgcagccgagcaagccgccctgaacatcgccagatcctggctgttcctgcggagccaggagtacaagaaataccagacaaacaagacaaccggcaacaccgataagagagccttcgtcgagacctggcagtccttttaccggaagaagcttaaggaggtgtggaaacctgccgtgcggtctggcggatctggcggaggctccttccagggccccgtgaccttcagggacgtggccatcgacttcagccaggaggagtggaagtggctgcagcccgcccagagggacctgtacaggtgcgtgatgctggagaactacggccacctggtgagcctgggcctgagcatcagcaagcccgacgtggtgagcctgctggagcagggcaaggagccctggctggagcagggcgacgtgaggaggaacctgttcagcgtgagccagagcaacggcggcccaagcagcggcgcccctcctcccagcggcggcagcccagccggctccccaacctctaccgaggagggcacctctgagtccgccacccccgagagcggccctggcacctccaccgagcccagcgagggcagcgcacccggcagccctgccggcagccccacctccacagaggagggaaccagcaccgagcccagcgaaggcagcgccccaggcaccagcaccgagcctagtgagcaggagattaaacggatcaacaagatcagaagaagacttgtgaaagacagcaacaccaagaaggccggcaagacaggccccatgaaaaccctgctggttagagtgatgacacccgatctgagagagcggctggaaaacctgagaaagaagcctgaaaatatcccccagcccatcagcaatacatctagagccaacctgaataagctgctgaccgattacaccgaaatgaagaaggcgatcctgcatgtgtactgggaagagttccagaaggaccctgtgggcctgatgagccgggtggcccagcctgccagcaagaagatcgatcagaacaagctgaaacctgagatggacgagaagggcaacctgaccaccgccggctttgcctgctctcagtgtggccagcccctgttcgtgtacaagctggagcaggtgtctgagaagggcaaggcttacaccaactacttcggacggtgcaatgtggccgagcacgaaaagctgatcctgctggcccagctgaagcccgagaaggatagcgacgaagccgtgacatatagcctgggaaagtttgggcagagggccctggatttctacagcattcatgtgaccaaggagtccacccaccccgtgaagcccctggcccagatcgccggaaacagatacgcctccggacctgtgggaaaggccctgagcgacgcatgtatgggcacaatcgcctccttcctgtctaagtaccaggacatcatcatcgaacaccagaaggtggtgaagggcaaccagaagagactggagagcctgcgggagctggccggcaaggaaaacctggaataccctagcgtgaccctgccacctcagcctcacaccaaggagggcgttgatgcctacaacgaagtgatcgcccgggtgcgaatgtgggtgaacctgaacctgtggcagaagctgaagctaagcagagatgatgccaagcctctgctgagactgaagggattcccttcctttcctctggtcgagagacaggccaacgaagtggactggtgggacatggtgtgtaacgtgaagaagctgatcaacgagaaaaaggaggatggcaaggtgttttggcagaatctggctggctacaagagacaggaagccctgagaccatacctgagcagcgaggaagatcggaagaagggaaagaaattcgctcggtaccagctgggcgacctgctgctgcacctggaaaagaagcacggcgaggactggggaaaggtgtacgacgaggcctgggagcggattgacaagaaagtggaaggcctgagcaagcacatcaagctggaagaggaacggagaagcgaggacgcccagagcaaggccgccctgaccgactggctgcgggctaaggccagcttcgtgatcgagggcctgaaggaggccgacaaggacgagttctgcagatgcgagctgaagctgcagaagtggtacggggacctgcggggaaagcccttcgccatcgaagccgagaacagcatcctggacatcagcggcttcagcaagcagtacaactgtgccttcatctggcagaaggacggcgtgaagaagctgaacctgtacctgatcatcaactacttcaagggcggcaagctgcggttcaagaagatcaaacctgaagccttcgaagccaacagattctacaccgtgatcaacaaaaagagcggcgagatcgtgcccatggaggtgaacttcaacttcgacgaccccaacctgatcatcctgcctctggcctttggcaagagacagggcagagaattcatctggaacgacctgctgtccctggaaaccggcagcctgaagctggccaacggaagagtgatcgagaagacactgtacaacagaagaacccggcaggatgagcctgccctgttcgtggccctgaccttcgagcggcgggaggtcctggactcctccaatatcaaaccaatgaacctgatcggcgtggcaagaggcgaaaacatccccgccgtgatcgccctgaccgaccccgagggctgcccactgagccggtttaaggatagcctgggaaacccaacccacatcctgagaatcggcgagagctataaggagaagcagcggaccatccaggccaagaaggaggtggagcagcggagagccggcggctacagccggaagtacgccagcaaagccaagaatctggcagacgatatggtgagaaacaccgctagagatctgctgtactacgccgtgacccaggatgccatgctgatcttcgccaacctgagccggggcttcggccggcagggcaagcggaccttcatggccgagagacagtacacacggatggaggactggctgaccgccaagctggcctacgagggcctgagcaagacctacctgtccaagacactggcccagtacacctccaagacatgcagcaactgtgggtttaccatcaccagcgccgactacgacagggtgctggagaagctgaagaagacagcaacaggctggatgaccacaattaacggcaaggagctgaaggtggagggccagattacctactacaacagatacaagagacagaacgtagtcaaggacctgtccgtcgagctggatagactgagcgaagaatctgtgaacaacgacatctcctcctggacaaagggcagaagcggagaagctctgagcctcctgaagaaaagattctcccatagacccgtgcaggagaagttcgtgtgcctgaactgcggcttcgagacacacgcagccgagcaagccgccctgaacatcgccagatcctggctgttcctgcggagccaggagtacaagaaataccagacaaacaagacaaccggcaacaccgataagagagccttcgtcgagacctggcagtccttttaccggaagaagcttaaggaggtgtggaaacctgccgtgcggtctggcggatctggcggaggctcctttccagggccccgtgaccttcagggacgtggccatcgacttcagccaggaggagtggaagtggctgcagcccgcccagagggacctgtacaggtgcgtgatgctggagaactacggccacctggtgagcctgggcctgagcatcagcaagcccgacgtggtgagcctgctggagcagggcaaggagccctggctggagcagggcgacgtgaggaggaacctgttcagcgtgagccagagcaacggatctggctccggcagcggccccaagaaaaagagaaaagtctaagctgccttctgcggggcttgccttctggccatgcccttcttctctcccttgcacctgtacctcttggtctttgaataaagcctgagtaggaaggctagcaaaaaaaaaaaaaaaaaaaaaaaaaaaaaaaaaaaaaaaaaaaaaaaaaaaaaaaaaaaaaaaaaaaaaaaaaaaaaaaa

SEQ ID NO: 16837 - RNA, 9485 nt, synthetic construct
  source 1..9485: mol_type = other RNA
aggaaataagagagaaaagaagagtaagaagaaatataagagccaccatggcccctaagaagaagcgtaaagtgagccggatggaacgcctcgtctacgaggtgcggcagaagtgcagaaacatcgaggacatctgcatctcctgcggatctctgaacgtgaccctggagcacccactgttcatcggcggcatgtgccagaactgtaaaaactgttttctggagtgtgcctatcaatacgacgatgacggctaccagagctactgcaccatctgttgcggcggaagagaggtgctgatgtgtggaaataacaactgctgccggtgcttctgcgtggaatgcgtggacctgctggtgggccccggcgccgcccaggccgctattaaggaagatccttggaactgctacatgtgcggccacaagggcacatacggcctgctgagacggagagaggactggcctagcagactgcagatgttcttcgccaataaccacgaccaggagttcgacccccctaaggtgtaccctcccgtccccgccgagaagagaaagcccatccgggtcctgagcctgttcgatggcatcgccaccggtctgctggtgctgaaggacctgggcatccaggtggataggtacattgcctccgaggtgtgcgaggactccatcaccgtgggaatggtgcgtcatcagggcaagatcatgtacgtgggcgacgtgcggagcgtgacacagaagcatatccaggagtggggccctttcgacctggtgatcggcggcagcccttgcaatgacctgagcatcgtgaacccagcccggaagggcctgtacgagggaaccggcagactgttcttcgagttttacagactgctgcacgacgcccggcctaaggaaggcgacgaccggcccttcttttggctgttcgagaatgtggtggccatgggagtcagcgacaagcgggatattagccggttcctggagagcaaccccgtgatgatcgatgccaaggaagtgagcgccgcccaccgggccagatacttctggggcaatctgcctggcatgaacagacccctggccagcaccgtgaacgacaagctggagctgcaggagtgcctggagcacggccggatcgccaagttcagcaaggtgagaaccatcaccacccgaagcaacagcatcaaacaaggcaaggaccagcactttcctgtgttcatgaacgagaaggaggacatcctgtggtgtaccgagatggagagagtgttcgggttcccagtccactacacagatgtcagcaacatgtctagactggccagacagagactgctgggaagaagctggtccgtccctgtgatcagacacctgttcgcccctctgaaggagtacttcgcctgcgtgagcagcggcaacagcaacgccaacagccggggccccagcttctctagcggcctggtgccactgtccctgagagggagccacatgggccccatggagatctacaaaaccgtgagcgcctggaagcggcagcctgtgcgcgtgctgagcctgtttcggaatatcgataaagtcctgaaaagcctgggattcctggagagcggctctggctccggcggtggcaccctgaagtacgtggaggatgtgacaaacgtggtcagacgggatgtggagaagtggggccccttcgatctggtgtacggcagcacccaacccctgggcagctcttgtgaccggtgccctggctggtacatgtttcagttccaccggatcctgcagtacgccctgccgagacaggagtcccagcggccattcttttggattttcatggacaacttgctgctgaccgaggatgaccaggaaactaccactcggttcctgcagaccgaagccgtgaccctgcaggacgtgagaggccgggactaccagaacgccatgcgggtgtggtccaacatccctggactgaaaagcaagcacgcacctctgacccctaaagaagaggagtacctgcaggcccaggtgcggagcagaagcaagctggacgcccctaaggtggatctgctggtgaagaattgcctcctgcccctgagagagtacttcaagtatttcagccagaatagtctgcccctgggaggcagcggcggcggcgccctggtgacatttgaggacgtcgccgtgcggttcacccaggaggaatgggctctgctggatccttctcagaaaatcctgtaccgggacgtgatgagagagacataccggaatctgacctccgtgggcatcaactgggaatgttgggaccttgaagcctgcttcagaagcctgggaagaaacctgagagtgcaggtggtgaagagaaagtgcgagctgaccaacagcggcccctgcgccgagggcggcccaagcagcggcgcccctcctcccagcggcggcagcccagccggctccccaacctctaccgaggagggcacctctgagtccgccacccccgagagcggccctggcacctccaccgagcccagcgagggcagcgcacccggcagccctgccggcagccccacctccacagaggagggaaccagcaccgagcccagcgaaggcagcgccccaggcaccagcaccgagcctagtgagcaggagattaaacggatcaacaagatcagaagaagacttgtgaaagacagcaacaccaagaaggccggcaagacaggccccatgaaaaccctgctggttagagtgatgacacccgatctgagagagcggctggaaaacctgagaaagaagcctgaaaatatcccccagcccatcagcaatacatctagagccaacctgaataagctgctgaccgattacaccgaaatgaagaaggcgatcctgcatgtgtactgggaagagttccagaaggaccctgtgggcctgatgagccgggtggcccagcctgccagcaagaagatcgatcagaacaagctgaaacctgagatggacgagaagggcaacctgaccaccgccggctttgcctgctctcagtgtggccagcccctgttcgtgtacaagctggagcaggtgtctgagaagggcaaggcttacaccaactacttcggacggtgcaatgtggccgagcacgaaaagctgatcctgctggcccagctgaagcccgagaaggatagcgacgaagccgtgacatatagcctgggaaagtttgggcagagggccctggatttctacagcattcatgtgaccaaggagtccacccaccccgtgaagcccctggcccagatcgccggaaacagatacgcctccggacctgtgggaaaggccctgagcgacgcatgtatgggcacaatcgcctccttcctgtctaagtaccaggacatcatcatcgaacaccagaaggtggtgaagggcaaccagaagagactggagagcctgcgggagctggccggcaaggaaaacctggaataccctagcgtgaccctgccacctcagcctcacaccaaggagggcgttgatgcctacaacgaagtgatcgcccgggtgcgaatgtgggtgaacctgaacctgtggcagaagctgaagctaagcagagatgatgccaagcctctgctgagactgaagggattcccttcctttcctctggtcgagagacaggccaacgaagtggactggtgggacatggtgtgtaacgtgaagaagctgatcaacgagaaaaaggaggatggcaaggtgttttggcagaatctggctggctacaagagacaggaagccctgagaccatacctgagcagcgaggaagatcggaagaagggaaagaaattcgctcggtaccagctgggcgacctgctgctgcacctggaaaagaagcacggcgaggactggggaaaggtgtacgacgaggcctgggagcggattgacaagaaagtggaaggcctgagcaagcacatcaagctggaagaggaacggagaagcgaggacgcccagagcaaggccgccctgaccgactggctgcgggctaaggccagcttcgtgatcgagggcctgaaggaggccgacaaggacgagttctgcagatgcgagctgaagctgcagaagtggtacggggacctgcggggaaagcccttcgccatcgaagccgagaacagcatcctggacatcagcggcttcagcaagcagtacaactgtgccttcatctggcagaaggacggcgtgaagaagctgaacctgtacctgatcatcaactacttcaagggcggcaagctgcggttcaagaagatcaaacctgaagccttcgaagccaacagattctacaccgtgatcaacaaaaagagcggcgagatcgtgcccatggaggtgaacttcaacttcgacgaccccaacctgatcatcctgcctctggcctttggcaagagacagggcagagaattcatctggaacgacctgctgtccctggaaaccggcagcctgaagctggccaacggaagagtgatcgagaagacactgtacaacagaagaacccggcaggatgagcctgccctgttcgtggccctgaccttcgagcggcgggaggtcctggactcctccaatatcaaaccaatgaacctgatcggcgtggcaagaggcgaaaacatccccgccgtgatcgccctgaccgaccccgagggctgcccactgagccggtttaaggatagcctgggaaacccaacccacatcctgagaatcggcgagagctataaggagaagcagcggaccatccaggccaagaaggaggtggagcagcggagagccggcggctacagccggaagtacgccagcaaagccaagaatctggcagacgatatggtgagaaacaccgctagagatctgctgtactacgccgtgacccaggatgccatgctgatcttcgccaacctgagccggggcttcggccggcagggcaagcggaccttcatggccgagagacagtacacacggatggaggactggctgaccgccaagctggcctacgagggcctgagcaagacctacctgtccaagacactggcccagtacacctccaagacatgcagcaactgtgggtttaccatcaccagcgccgactacgacagggtgctggagaagctgaagaagacagcaacaggctggatgaccacaattaacggcaaggagctgaaggtggagggccagattacctactacaacagatacaagagacagaacgtagtcaaggacctgtccgtcgagctggatagactgagcgaagaatctgtgaacaacgacatctcctcctggacaaagggcagaagcggagaagctctgagcctcctgaagaaaagattctcccatagacccgtgcaggagaagttcgtgtgcctgaactgcggcttcgagacacacgcagccgagcaagccgccctgaacatcgccagatcctggctgttcctgcggagccaggagtacaagaaataccagacaaacaagacaaccggcaacaccgataagagagccttcgtcgagacctggcagtccttttaccggaagaagcttaaggaggtgtggaaacctgccgtgcggtctggcggatctggcggaggctccgcccagatgctggtgaccttcaaggacgtggccgtgaccttcacccaggaggagtggaggcagctggacctgacccagaggaccctgtacagggaggtgatgctggagacctgcggcctgctggtgagcctgggccacagggtgcccaagcccgagctggtgcacctgctggagcacggccaggagctgtggaccgtgaagaggggcctgagcgaccccacctgcgccggcgacaggacccagggcggcccaagcagcggcgcccctcctcccagcggcggcagcccagccggctccccaacctctaccgaggagggcacctctgagtccgccacccccgagagcggccctggcacctccaccgagcccagcgagggcagcgcacccggcagccctgccggcagccccacctccacagaggagggaaccagcaccgagcccagcgaaggcagcgccccaggcaccagcaccgagcctagtgagcaggagattaaacggatcaacaagatcagaagaagacttgtgaaagacagcaacaccaagaaggccggcaagacaggccccatgaaaaccctgctggttagagtgatgacacccgatctgagagagcggctggaaaacctgagaaagaagcctgaaaatatcccccagcccatcagcaatacatctagagccaacctgaataagctgctgaccgattacaccgaaatgaagaaggcgatcctgcatgtgtactgggaagagttccagaaggaccctgtgggcctgatgagccgggtggcccagcctgccagcaagaagatcgatcagaacaagctgaaacctgagatggacgagaagggcaacctgaccaccgccggctttgcctgctctcagtgtggccagcccctgttcgtgtacaagctggagcaggtgtctgagaagggcaaggcttacaccaactacttcggacggtgcaatgtggccgagcacgaaaagctgatcctgctggcccagctgaagcccgagaaggatagcgacgaagccgtgacatatagcctgggaaagtttgggcagagggccctggatttctacagcattcatgtgaccaaggagtccacccaccccgtgaagcccctggcccagatcgccggaaacagatacgcctccggacctgtgggaaaggccctgagcgacgcatgtatgggcacaatcgcctccttcctgtctaagtaccaggacatcatcatcgaacaccagaaggtggtgaagggcaaccagaagagactggagagcctgcgggagctggccggcaaggaaaacctggaataccctagcgtgaccctgccacctcagcctcacaccaaggagggcgttgatgcctacaacgaagtgatcgcccgggtgcgaatgtgggtgaacctgaacctgtggcagaagctgaagctaagcagagatgatgccaagcctctgctgagactgaagggattcccttcctttcctctggtcgagagacaggccaacgaagtggactggtgggacatggtgtgtaacgtgaagaagctgatcaacgagaaaaaggaggatggcaaggtgttttggcagaatctggctggctacaagagacaggaagccctgagaccatacctgagcagcgaggaagatcggaagaagggaaagaaattcgctcggtaccagctgggcgacctgctgctgcacctggaaaagaagcacggcgaggactggggaaaggtgtacgacgaggcctgggagcggattgacaagaaagtggaaggcctgagcaagcacatcaagctggaagaggaacggagaagcgaggacgcccagagcaaggccgccctgaccgactggctgcgggctaaggccagcttcgtgatcgagggcctgaaggaggccgacaaggacgagttctgcagatgcgagctgaagctgcagaagtggtacggggacctgcggggaaagcccttcgccatcgaagccgagaacagcatcctggacatcagcggcttcagcaagcagtacaactgtgccttcatctggcagaaggacggcgtgaagaagctgaacctgtacctgatcatcaactacttcaagggcggcaagctgcggttcaagaagatcaaacctgaagccttcgaagccaacagattctacaccgtgatcaacaaaaagagcggcgagatcgtgcccatggaggtgaacttcaacttcgacgaccccaacctgatcatcctgcctctggcctttggcaagagacagggcagagaattcatctggaacgacctgctgtccctggaaaccggcagcctgaagctggccaacggaagagtgatcgagaagacactgtacaacagaagaacccggcaggatgagcctgccctgttcgtggccctgaccttcgagcggcgggaggtcctggactcctccaatatcaaaccaatgaacctgatcggcgtggcaagaggcgaaaacatccccgccgtgatcgccctgaccgaccccgagggctgcccactgagccggtttaaggatagcctgggaaacccaacccacatcctgagaatcggcgagagctataaggagaagcagcggaccatccaggccaagaaggaggtggagcagcggagagccggcggctacagccggaagtacgccagcaaagccaagaatctggcagacgatatggtgagaaacaccgctagagatctgctgtactacgccgtgacccaggatgccatgctgatcttcgccaacctgagccggggcttcggccggcagggcaagcggaccttcatggccgagagacagtacacacggatggaggactggctgaccgccaagctggcctacgagggcctgagcaagacctacctgtccaagacactggcccagtacacctccaagacatgcagcaactgtgggtttaccatcaccagcgccgactacgacagggtgctggagaagctgaagaagacagcaacaggctggatgaccacaattaacggcaaggagctgaaggtggagggccagattacctactacaacagatacaagagacagaacgtagtcaaggacctgtccgtcgagctggatagactgagcgaagaatctgtgaacaacgacatctcctcctggacaaagggcagaagcggagaagctctgagcctcctgaagaaaagattctcccatagacccgtgcaggagaagttcgtgtgcctgaactgcggcttcgagacacacgcagccgagcaagccgccctgaacatcgccagatcctggctgttcctgcggagccaggagtacaagaaataccagacaaacaagacaaccggcaacaccgataagagagccttcgtcgagacctggcagtccttttaccggaagaagcttaaggaggtgtggaaacctgccgtgcggtctggcggatctggcggaggctcctgcccagatgctggtgaccttcaaggacgtggccgtgaccttcacccaggaggagtggaggcagctggacctgacccagaggaccctgtacagggaggtgatgctggagacctgcggcctgctggtgagcctgggccacagggtgcccaagcccgagctggtgcacctgctggagcacggccaggagctgtggaccgtgaagaggggcctgagcgaccccacctgcgccggcgacaggacccagggatctggctccggcagcggccccaagaaaaagagaaaagtctaagctgccttctgcggggcttgccttctggccatgcccttcttctctcccttgcacctgtacctcttggtctttgaataaagcctgagtaggaaggctagcaaaaaaaaaaaaaaaaaaaaaaaaaaaaaaaaaaaaaaaaaaaaaaaaaaaaaaaaaaaaaaaaaaaaaaaaaaaaaaaa

SEQ ID NO: 16838 - RNA, 9485 nt, synthetic construct
  source 1..9485: mol_type = other RNA
aggaaataagagagaaaagaagagtaagaagaaatataagagccaccatggcccctaagaagaagcgtaaagtgagccggatggaacgcctcgtctacgaggtgcggcagaagtgcagaaacatcgaggacatctgcatctcctgcggatctctgaacgtgaccctggagcacccactgttcatcggcggcatgtgccagaactgtaaaaactgttttctggagtgtgcctatcaatacgacgatgacggctaccagagctactgcaccatctgttgcggcggaagagaggtgctgatgtgtggaaataacaactgctgccggtgcttctgcgtggaatgcgtggacctgctggtgggccccggcgccgcccaggccgctattaaggaagatccttggaactgctacatgtgcggccacaagggcacatacggcctgctgagacggagagaggactggcctagcagactgcagatgttcttcgccaataaccacgaccaggagttcgacccccctaaggtgtaccctcccgtccccgccgagaagagaaagcccatccgggtcctgagcctgttcgatggcatcgccaccggtctgctggtgctgaaggacctgggcatccaggtggataggtacattgcctccgaggtgtgcgaggactccatcaccgtgggaatggtgcgtcatcagggcaagatcatgtacgtgggcgacgtgcggagcgtgacacagaagcatatccaggagtggggccctttcgacctggtgatcggcggcagcccttgcaatgacctgagcatcgtgaacccagcccggaagggcctgtacgagggaaccggcagactgttcttcgagttttacagactgctgcacgacgcccggcctaaggaaggcgacgaccggcccttcttttggctgttcgagaatgtggtggccatgggagtcagcgacaagcgggatattagccggttcctggagagcaaccccgtgatgatcgatgccaaggaagtgagcgccgcccaccgggccagatacttctggggcaatctgcctggcatgaacagacccctggccagcaccgtgaacgacaagctggagctgcaggagtgcctggagcacggccggatcgccaagttcagcaaggtgagaaccatcaccacccgaagcaacagcatcaaacaaggcaaggaccagcactttcctgtgttcatgaacgagaaggaggacatcctgtggtgtaccgagatggagagagtgttcgggttcccagtccactacacagatgtcagcaacatgtctagactggccagacagagactgctgggaagaagctggtccgtccctgtgatcagacacctgttcgcccctctgaaggagtacttcgcctgcgtgagcagcggcaacagcaacgccaacagccggggccccagcttctctagcggcctggtgccactgtccctgagagggagccacatgggccccatggagatctacaaaaccgtgagcgcctggaagcggcagcctgtgcgcgtgctgagcctgtttcggaatatcgataaagtcctgaaaagcctgggattcctggagagcggctctggctccggcggtggcaccctgaagtacgtggaggatgtgacaaacgtggtcagacgggatgtggagaagtggggccccttcgatctggtgtacggcagcacccaacccctgggcagctcttgtgaccggtgccctggctggtacatgtttcagttccaccggatcctgcagtacgccctgccgagacaggagtcccagcggccattcttttggattttcatggacaacttgctgctgaccgaggatgaccaggaaactaccactcggttcctgcagaccgaagccgtgaccctgcaggacgtgagaggccgggactaccagaacgccatgcgggtgtggtccaacatccctggactgaaaagcaagcacgcacctctgacccctaaagaagaggagtacctgcaggcccaggtgcggagcagaagcaagctggacgcccctaaggtggatctgctggtgaagaattgcctcctgcccctgagagagtacttcaagtatttcagccagaatagtctgcccctgggaggcagcggcggcggcgccctggtgacatttgaggacgtcgccgtgcggttcacccaggaggaatgggctctgctggatccttctcagaaaatcctgtaccgggacgtgatgagagagacataccggaatctgacctccgtgggcatcaactgggaatgttgggaccttgaagcctgcttcagaagcctgggaagaaacctgagagtgcaggtggtgaagagaaagtgcgagctgaccaacagcggcccctgcgccgagggcggcccaagcagcggcgcccctcctcccagcggcggcagcccagccggctccccaacctctaccgaggagggcacctctgagtccgccacccccgagagcggccctggcacctccaccgagcccagcgagggcagcgcacccggcagccctgccggcagccccacctccacagaggagggaaccagcaccgagcccagcgaaggcagcgccccaggcaccagcaccgagcctagtgagcaggagattaaacggatcaacaagatcagaagaagacttgtgaaagacagcaacaccaagaaggccggcaagacaggccccatgaaaaccctgctggttagagtgatgacacccgatctgagagagcggctggaaaacctgagaaagaagcctgaaaatatcccccagcccatcagcaatacatctagagccaacctgaataagctgctgaccgattacaccgaaatgaagaaggcgatcctgcatgtgtactgggaagagttccagaaggaccctgtgggcctgatgagccgggtggcccagcctgccagcaagaagatcgatcagaacaagctgaaacctgagatggacgagaagggcaacctgaccaccgccggctttgcctgctctcagtgtggccagcccctgttcgtgtacaagctggagcaggtgtctgagaagggcaaggcttacaccaactacttcggacggtgcaatgtggccgagcacgaaaagctgatcctgctggcccagctgaagcccgagaaggatagcgacgaagccgtgacatatagcctgggaaagtttgggcagagggccctggatttctacagcattcatgtgaccaaggagtccacccaccccgtgaagcccctggcccagatcgccggaaacagatacgcctccggacctgtgggaaaggccctgagcgacgcatgtatgggcacaatcgcctccttcctgtctaagtaccaggacatcatcatcgaacaccagaaggtggtgaagggcaaccagaagagactggagagcctgcgggagctggccggcaaggaaaacctggaataccctagcgtgaccctgccacctcagcctcacaccaaggagggcgttgatgcctacaacgaagtgatcgcccgggtgcgaatgtgggtgaacctgaacctgtggcagaagctgaagctaagcagagatgatgccaagcctctgctgagactgaagggattcccttcctttcctctggtcgagagacaggccaacgaagtggactggtgggacatggtgtgtaacgtgaagaagctgatcaacgagaaaaaggaggatggcaaggtgttttggcagaatctggctggctacaagagacaggaagccctgagaccatacctgagcagcgaggaagatcggaagaagggaaagaaattcgctcggtaccagctgggcgacctgctgctgcacctggaaaagaagcacggcgaggactggggaaaggtgtacgacgaggcctgggagcggattgacaagaaagtggaaggcctgagcaagcacatcaagctggaagaggaacggagaagcgaggacgcccagagcaaggccgccctgaccgactggctgcgggctaaggccagcttcgtgatcgagggcctgaaggaggccgacaaggacgagttctgcagatgcgagctgaagctgcagaagtggtacggggacctgcggggaaagcccttcgccatcgaagccgagaacagcatcctggacatcagcggcttcagcaagcagtacaactgtgccttcatctggcagaaggacggcgtgaagaagctgaacctgtacctgatcatcaactacttcaagggcggcaagctgcggttcaagaagatcaaacctgaagccttcgaagccaacagattctacaccgtgatcaacaaaaagagcggcgagatcgtgcccatggaggtgaacttcaacttcgacgaccccaacctgatcatcctgcctctggcctttggcaagagacagggcagagaattcatctggaacgacctgctgtccctggaaaccggcagcctgaagctggccaacggaagagtgatcgagaagacactgtacaacagaagaacccggcaggatgagcctgccctgttcgtggccctgaccttcgagcggcgggaggtcctggactcctccaatatcaaaccaatgaacctgatcggcgtggcaagaggcgaaaacatccccgccgtgatcgccctgaccgaccccgagggctgcccactgagccggtttaaggatagcctgggaaacccaacccacatcctgagaatcggcgagagctataaggagaagcagcggaccatccaggccaagaaggaggtggagcagcggagagccggcggctacagccggaagtacgccagcaaagccaagaatctggcagacgatatggtgagaaacaccgctagagatctgctgtactacgccgtgacccaggatgccatgctgatcttcgccaacctgagccggggcttcggccggcagggcaagcggaccttcatggccgagagacagtacacacggatggaggactggctgaccgccaagctggcctacgagggcctgagcaagacctacctgtccaagacactggcccagtacacctccaagacatgcagcaactgtgggtttaccatcaccagcgccgactacgacagggtgctggagaagctgaagaagacagcaacaggctggatgaccacaattaacggcaaggagctgaaggtggagggccagattacctactacaacagatacaagagacagaacgtagtcaaggacctgtccgtcgagctggatagactgagcgaagaatctgtgaacaacgacatctcctcctggacaaagggcagaagcggagaagctctgagcctcctgaagaaaagattctcccatagacccgtgcaggagaagttcgtgtgcctgaactgcggcttcgagacacacgcagccgagcaagccgccctgaacatcgccagatcctggctgttcctgcggagccaggagtacaagaaataccagacaaacaagacaaccggcaacaccgataagagagccttcgtcgagacctggcagtccttttaccggaagaagcttaaggaggtgtggaaacctgccgtgcggtctggcggatctggcggaggctccaggcccagggccctgaagttcgtggacgtggccgtgtacttcagcagcgaggagtggggctgcctgaggcccgcccagagggccctgtacagggacgtgatgagggagacctacggccacctgggcgccctgggcttccccggccccaagcccgccctgatcagctggatggagcaggagagcgaggcctggagcagcgccgcccaggaccccgagaacggcgagagcctgggcggcgccaggggcggcccaagcagcggcgcccctcctcccagcggcggcagcccagccggctccccaacctctaccgaggagggcacctctgagtccgccacccccgagagcggccctggcacctccaccgagcccagcgagggcagcgcacccggcagccctgccggcagccccacctccacagaggagggaaccagcaccgagcccagcgaaggcagcgccccaggcaccagcaccgagcctagtgagcaggagattaaacggatcaacaagatcagaagaagacttgtgaaagacagcaacaccaagaaggccggcaagacaggccccatgaaaaccctgctggttagagtgatgacacccgatctgagagagcggctggaaaacctgagaaagaagcctgaaaatatcccccagcccatcagcaatacatctagagccaacctgaataagctgctgaccgattacaccgaaatgaagaaggcgatcctgcatgtgtactgggaagagttccagaaggaccctgtgggcctgatgagccgggtggcccagcctgccagcaagaagatcgatcagaacaagctgaaacctgagatggacgagaagggcaacctgaccaccgccggctttgcctgctctcagtgtggccagcccctgttcgtgtacaagctggagcaggtgtctgagaagggcaaggcttacaccaactacttcggacggtgcaatgtggccgagcacgaaaagctgatcctgctggcccagctgaagcccgagaaggatagcgacgaagccgtgacatatagcctgggaaagtttgggcagagggccctggatttctacagcattcatgtgaccaaggagtccacccaccccgtgaagcccctggcccagatcgccggaaacagatacgcctccggacctgtgggaaaggccctgagcgacgcatgtatgggcacaatcgcctccttcctgtctaagtaccaggacatcatcatcgaacaccagaaggtggtgaagggcaaccagaagagactggagagcctgcgggagctggccggcaaggaaaacctggaataccctagcgtgaccctgccacctcagcctcacaccaaggagggcgttgatgcctacaacgaagtgatcgcccgggtgcgaatgtgggtgaacctgaacctgtggcagaagctgaagctaagcagagatgatgccaagcctctgctgagactgaagggattcccttcctttcctctggtcgagagacaggccaacgaagtggactggtgggacatggtgtgtaacgtgaagaagctgatcaacgagaaaaaggaggatggcaaggtgttttggcagaatctggctggctacaagagacaggaagccctgagaccatacctgagcagcgaggaagatcggaagaagggaaagaaattcgctcggtaccagctgggcgacctgctgctgcacctggaaaagaagcacggcgaggactggggaaaggtgtacgacgaggcctgggagcggattgacaagaaagtggaaggcctgagcaagcacatcaagctggaagaggaacggagaagcgaggacgcccagagcaaggccgccctgaccgactggctgcgggctaaggccagcttcgtgatcgagggcctgaaggaggccgacaaggacgagttctgcagatgcgagctgaagctgcagaagtggtacggggacctgcggggaaagcccttcgccatcgaagccgagaacagcatcctggacatcagcggcttcagcaagcagtacaactgtgccttcatctggcagaaggacggcgtgaagaagctgaacctgtacctgatcatcaactacttcaagggcggcaagctgcggttcaagaagatcaaacctgaagccttcgaagccaacagattctacaccgtgatcaacaaaaagagcggcgagatcgtgcccatggaggtgaacttcaacttcgacgaccccaacctgatcatcctgcctctggcctttggcaagagacagggcagagaattcatctggaacgacctgctgtccctggaaaccggcagcctgaagctggccaacggaagagtgatcgagaagacactgtacaacagaagaacccggcaggatgagcctgccctgttcgtggccctgaccttcgagcggcgggaggtcctggactcctccaatatcaaaccaatgaacctgatcggcgtggcaagaggcgaaaacatccccgccgtgatcgccctgaccgaccccgagggctgcccactgagccggtttaaggatagcctgggaaacccaacccacatcctgagaatcggcgagagctataaggagaagcagcggaccatccaggccaagaaggaggtggagcagcggagagccggcggctacagccggaagtacgccagcaaagccaagaatctggcagacgatatggtgagaaacaccgctagagatctgctgtactacgccgtgacccaggatgccatgctgatcttcgccaacctgagccggggcttcggccggcagggcaagcggaccttcatggccgagagacagtacacacggatggaggactggctgaccgccaagctggcctacgagggcctgagcaagacctacctgtccaagacactggcccagtacacctccaagacatgcagcaactgtgggtttaccatcaccagcgccgactacgacagggtgctggagaagctgaagaagacagcaacaggctggatgaccacaattaacggcaaggagctgaaggtggagggccagattacctactacaacagatacaagagacagaacgtagtcaaggacctgtccgtcgagctggatagactgagcgaagaatctgtgaacaacgacatctcctcctggacaaagggcagaagcggagaagctctgagcctcctgaagaaaagattctcccatagacccgtgcaggagaagttcgtgtgcctgaactgcggcttcgagacacacgcagccgagcaagccgccctgaacatcgccagatcctggctgttcctgcggagccaggagtacaagaaataccagacaaacaagacaaccggcaacaccgataagagagccttcgtcgagacctggcagtccttttaccggaagaagcttaaggaggtgtggaaacctgccgtgcggtctggcggatctggcggaggctcctaggcccagggccctgaagttcgtggacgtggccgtgtacttcagcagcgaggagtggggctgcctgaggcccgcccagagggccctgtacagggacgtgatgagggagacctacggccacctgggcgccctgggcttccccggccccaagcccgccctgatcagctggatggagcaggagagcgaggcctggagcagcgccgcccaggaccccgagaacggcgagagcctgggcggcgccaggggatctggctccggcagcggccccaagaaaaagagaaaagtctaagctgccttctgcggggcttgccttctggccatgcccttcttctctcccttgcacctgtacctcttggtctttgaataaagcctgagtaggaaggctagcaaaaaaaaaaaaaaaaaaaaaaaaaaaaaaaaaaaaaaaaaaaaaaaaaaaaaaaaaaaaaaaaaaaaaaaaaaaaaaaa

SEQ ID NO: 16839 - RNA, 9485 nt, synthetic construct
  source 1..9485: mol_type = other RNA
aggaaataagagagaaaagaagagtaagaagaaatataagagccaccatggcccctaagaagaagcgtaaagtgagccggatggaacgcctcgtctacgaggtgcggcagaagtgcagaaacatcgaggacatctgcatctcctgcggatctctgaacgtgaccctggagcacccactgttcatcggcggcatgtgccagaactgtaaaaactgttttctggagtgtgcctatcaatacgacgatgacggctaccagagctactgcaccatctgttgcggcggaagagaggtgctgatgtgtggaaataacaactgctgccggtgcttctgcgtggaatgcgtggacctgctggtgggccccggcgccgcccaggccgctattaaggaagatccttggaactgctacatgtgcggccacaagggcacatacggcctgctgagacggagagaggactggcctagcagactgcagatgttcttcgccaataaccacgaccaggagttcgacccccctaaggtgtaccctcccgtccccgccgagaagagaaagcccatccgggtcctgagcctgttcgatggcatcgccaccggtctgctggtgctgaaggacctgggcatccaggtggataggtacattgcctccgaggtgtgcgaggactccatcaccgtgggaatggtgcgtcatcagggcaagatcatgtacgtgggcgacgtgcggagcgtgacacagaagcatatccaggagtggggccctttcgacctggtgatcggcggcagcccttgcaatgacctgagcatcgtgaacccagcccggaagggcctgtacgagggaaccggcagactgttcttcgagttttacagactgctgcacgacgcccggcctaaggaaggcgacgaccggcccttcttttggctgttcgagaatgtggtggccatgggagtcagcgacaagcgggatattagccggttcctggagagcaaccccgtgatgatcgatgccaaggaagtgagcgccgcccaccgggccagatacttctggggcaatctgcctggcatgaacagacccctggccagcaccgtgaacgacaagctggagctgcaggagtgcctggagcacggccggatcgccaagttcagcaaggtgagaaccatcaccacccgaagcaacagcatcaaacaaggcaaggaccagcactttcctgtgttcatgaacgagaaggaggacatcctgtggtgtaccgagatggagagagtgttcgggttcccagtccactacacagatgtcagcaacatgtctagactggccagacagagactgctgggaagaagctggtccgtccctgtgatcagacacctgttcgcccctctgaaggagtacttcgcctgcgtgagcagcggcaacagcaacgccaacagccggggccccagcttctctagcggcctggtgccactgtccctgagagggagccacatgggccccatggagatctacaaaaccgtgagcgcctggaagcggcagcctgtgcgcgtgctgagcctgtttcggaatatcgataaagtcctgaaaagcctgggattcctggagagcggctctggctccggcggtggcaccctgaagtacgtggaggatgtgacaaacgtggtcagacgggatgtggagaagtggggccccttcgatctggtgtacggcagcacccaacccctgggcagctcttgtgaccggtgccctggctggtacatgtttcagttccaccggatcctgcagtacgccctgccgagacaggagtcccagcggccattcttttggattttcatggacaacttgctgctgaccgaggatgaccaggaaactaccactcggttcctgcagaccgaagccgtgaccctgcaggacgtgagaggccgggactaccagaacgccatgcgggtgtggtccaacatccctggactgaaaagcaagcacgcacctctgacccctaaagaagaggagtacctgcaggcccaggtgcggagcagaagcaagctggacgcccctaaggtggatctgctggtgaagaattgcctcctgcccctgagagagtacttcaagtatttcagccagaatagtctgcccctgggaggcagcggcggcggcgccctggtgacatttgaggacgtcgccgtgcggttcacccaggaggaatgggctctgctggatccttctcagaaaatcctgtaccgggacgtgatgagagagacataccggaatctgacctccgtgggcatcaactgggaatgttgggaccttgaagcctgcttcagaagcctgggaagaaacctgagagtgcaggtggtgaagagaaagtgcgagctgaccaacagcggcccctgcgccgagggcggcccaagcagcggcgcccctcctcccagcggcggcagcccagccggctccccaacctctaccgaggagggcacctctgagtccgccacccccgagagcggccctggcacctccaccgagcccagcgagggcagcgcacccggcagccctgccggcagccccacctccacagaggagggaaccagcaccgagcccagcgaaggcagcgccccaggcaccagcaccgagcctagtgagcaggagattaaacggatcaacaagatcagaagaagacttgtgaaagacagcaacaccaagaaggccggcaagacaggccccatgaaaaccctgctggttagagtgatgacacccgatctgagagagcggctggaaaacctgagaaagaagcctgaaaatatcccccagcccatcagcaatacatctagagccaacctgaataagctgctgaccgattacaccgaaatgaagaaggcgatcctgcatgtgtactgggaagagttccagaaggaccctgtgggcctgatgagccgggtggcccagcctgccagcaagaagatcgatcagaacaagctgaaacctgagatggacgagaagggcaacctgaccaccgccggctttgcctgctctcagtgtggccagcccctgttcgtgtacaagctggagcaggtgtctgagaagggcaaggcttacaccaactacttcggacggtgcaatgtggccgagcacgaaaagctgatcctgctggcccagctgaagcccgagaaggatagcgacgaagccgtgacatatagcctgggaaagtttgggcagagggccctggatttctacagcattcatgtgaccaaggagtccacccaccccgtgaagcccctggcccagatcgccggaaacagatacgcctccggacctgtgggaaaggccctgagcgacgcatgtatgggcacaatcgcctccttcctgtctaagtaccaggacatcatcatcgaacaccagaaggtggtgaagggcaaccagaagagactggagagcctgcgggagctggccggcaaggaaaacctggaataccctagcgtgaccctgccacctcagcctcacaccaaggagggcgttgatgcctacaacgaagtgatcgcccgggtgcgaatgtgggtgaacctgaacctgtggcagaagctgaagctaagcagagatgatgccaagcctctgctgagactgaagggattcccttcctttcctctggtcgagagacaggccaacgaagtggactggtgggacatggtgtgtaacgtgaagaagctgatcaacgagaaaaaggaggatggcaaggtgttttggcagaatctggctggctacaagagacaggaagccctgagaccatacctgagcagcgaggaagatcggaagaagggaaagaaattcgctcggtaccagctgggcgacctgctgctgcacctggaaaagaagcacggcgaggactggggaaaggtgtacgacgaggcctgggagcggattgacaagaaagtggaaggcctgagcaagcacatcaagctggaagaggaacggagaagcgaggacgcccagagcaaggccgccctgaccgactggctgcgggctaaggccagcttcgtgatcgagggcctgaaggaggccgacaaggacgagttctgcagatgcgagctgaagctgcagaagtggtacggggacctgcggggaaagcccttcgccatcgaagccgagaacagcatcctggacatcagcggcttcagcaagcagtacaactgtgccttcatctggcagaaggacggcgtgaagaagctgaacctgtacctgatcatcaactacttcaagggcggcaagctgcggttcaagaagatcaaacctgaagccttcgaagccaacagattctacaccgtgatcaacaaaaagagcggcgagatcgtgcccatggaggtgaacttcaacttcgacgaccccaacctgatcatcctgcctctggcctttggcaagagacagggcagagaattcatctggaacgacctgctgtccctggaaaccggcagcctgaagctggccaacggaagagtgatcgagaagacactgtacaacagaagaacccggcaggatgagcctgccctgttcgtggccctgaccttcgagcggcgggaggtcctggactcctccaatatcaaaccaatgaacctgatcggcgtggcaagaggcgaaaacatccccgccgtgatcgccctgaccgaccccgagggctgcccactgagccggtttaaggatagcctgggaaacccaacccacatcctgagaatcggcgagagctataaggagaagcagcggaccatccaggccaagaaggaggtggagcagcggagagccggcggctacagccggaagtacgccagcaaagccaagaatctggcagacgatatggtgagaaacaccgctagagatctgctgtactacgccgtgacccaggatgccatgctgatcttcgccaacctgagccggggcttcggccggcagggcaagcggaccttcatggccgagagacagtacacacggatggaggactggctgaccgccaagctggcctacgagggcctgagcaagacctacctgtccaagacactggcccagtacacctccaagacatgcagcaactgtgggtttaccatcaccagcgccgactacgacagggtgctggagaagctgaagaagacagcaacaggctggatgaccacaattaacggcaaggagctgaaggtggagggccagattacctactacaacagatacaagagacagaacgtagtcaaggacctgtccgtcgagctggatagactgagcgaagaatctgtgaacaacgacatctcctcctggacaaagggcagaagcggagaagctctgagcctcctgaagaaaagattctcccatagacccgtgcaggagaagttcgtgtgcctgaactgcggcttcgagacacacgcagccgagcaagccgccctgaacatcgccagatcctggctgttcctgcggagccaggagtacaagaaataccagacaaacaagacaaccggcaacaccgataagagagccttcgtcgagacctggcagtccttttaccggaagaagcttaaggaggtgtggaaacctgccgtgcggtctggcggatctggcggaggctccttccagggccccgtgaccttcgacgaggtggccgtgtacttcaccaaggaggagtgggccctgctggaccccgcccagagggccctgtacagggacgtgatgcaggagaactacgagaccgtgaccagcctgggcctgcccgtgagcaggcccgacgtgatcagccagatggagcagggcgaggagccctgggccagcgccctgcagggcagcgaggacaggctgatcctgaggggcatctgcggcggcccaagcagcggcgcccctcctcccagcggcggcagcccagccggctccccaacctctaccgaggagggcacctctgagtccgccacccccgagagcggccctggcacctccaccgagcccagcgagggcagcgcacccggcagccctgccggcagccccacctccacagaggagggaaccagcaccgagcccagcgaaggcagcgccccaggcaccagcaccgagcctagtgagcaggagattaaacggatcaacaagatcagaagaagacttgtgaaagacagcaacaccaagaaggccggcaagacaggccccatgaaaaccctgctggttagagtgatgacacccgatctgagagagcggctggaaaacctgagaaagaagcctgaaaatatcccccagcccatcagcaatacatctagagccaacctgaataagctgctgaccgattacaccgaaatgaagaaggcgatcctgcatgtgtactgggaagagttccagaaggaccctgtgggcctgatgagccgggtggcccagcctgccagcaagaagatcgatcagaacaagctgaaacctgagatggacgagaagggcaacctgaccaccgccggctttgcctgctctcagtgtggccagcccctgttcgtgtacaagctggagcaggtgtctgagaagggcaaggcttacaccaactacttcggacggtgcaatgtggccgagcacgaaaagctgatcctgctggcccagctgaagcccgagaaggatagcgacgaagccgtgacatatagcctgggaaagtttgggcagagggccctggatttctacagcattcatgtgaccaaggagtccacccaccccgtgaagcccctggcccagatcgccggaaacagatacgcctccggacctgtgggaaaggccctgagcgacgcatgtatgggcacaatcgcctccttcctgtctaagtaccaggacatcatcatcgaacaccagaaggtggtgaagggcaaccagaagagactggagagcctgcgggagctggccggcaaggaaaacctggaataccctagcgtgaccctgccacctcagcctcacaccaaggagggcgttgatgcctacaacgaagtgatcgcccgggtgcgaatgtgggtgaacctgaacctgtggcagaagctgaagctaagcagagatgatgccaagcctctgctgagactgaagggattcccttcctttcctctggtcgagagacaggccaacgaagtggactggtgggacatggtgtgtaacgtgaagaagctgatcaacgagaaaaaggaggatggcaaggtgttttggcagaatctggctggctacaagagacaggaagccctgagaccatacctgagcagcgaggaagatcggaagaagggaaagaaattcgctcggtaccagctgggcgacctgctgctgcacctggaaaagaagcacggcgaggactggggaaaggtgtacgacgaggcctgggagcggattgacaagaaagtggaaggcctgagcaagcacatcaagctggaagaggaacggagaagcgaggacgcccagagcaaggccgccctgaccgactggctgcgggctaaggccagcttcgtgatcgagggcctgaaggaggccgacaaggacgagttctgcagatgcgagctgaagctgcagaagtggtacggggacctgcggggaaagcccttcgccatcgaagccgagaacagcatcctggacatcagcggcttcagcaagcagtacaactgtgccttcatctggcagaaggacggcgtgaagaagctgaacctgtacctgatcatcaactacttcaagggcggcaagctgcggttcaagaagatcaaacctgaagccttcgaagccaacagattctacaccgtgatcaacaaaaagagcggcgagatcgtgcccatggaggtgaacttcaacttcgacgaccccaacctgatcatcctgcctctggcctttggcaagagacagggcagagaattcatctggaacgacctgctgtccctggaaaccggcagcctgaagctggccaacggaagagtgatcgagaagacactgtacaacagaagaacccggcaggatgagcctgccctgttcgtggccctgaccttcgagcggcgggaggtcctggactcctccaatatcaaaccaatgaacctgatcggcgtggcaagaggcgaaaacatccccgccgtgatcgccctgaccgaccccgagggctgcccactgagccggtttaaggatagcctgggaaacccaacccacatcctgagaatcggcgagagctataaggagaagcagcggaccatccaggccaagaaggaggtggagcagcggagagccggcggctacagccggaagtacgccagcaaagccaagaatctggcagacgatatggtgagaaacaccgctagagatctgctgtactacgccgtgacccaggatgccatgctgatcttcgccaacctgagccggggcttcggccggcagggcaagcggaccttcatggccgagagacagtacacacggatggaggactggctgaccgccaagctggcctacgagggcctgagcaagacctacctgtccaagacactggcccagtacacctccaagacatgcagcaactgtgggtttaccatcaccagcgccgactacgacagggtgctggagaagctgaagaagacagcaacaggctggatgaccacaattaacggcaaggagctgaaggtggagggccagattacctactacaacagatacaagagacagaacgtagtcaaggacctgtccgtcgagctggatagactgagcgaagaatctgtgaacaacgacatctcctcctggacaaagggcagaagcggagaagctctgagcctcctgaagaaaagattctcccatagacccgtgcaggagaagttcgtgtgcctgaactgcggcttcgagacacacgcagccgagcaagccgccctgaacatcgccagatcctggctgttcctgcggagccaggagtacaagaaataccagacaaacaagacaaccggcaacaccgataagagagccttcgtcgagacctggcagtccttttaccggaagaagcttaaggaggtgtggaaacctgccgtgcggtctggcggatctggcggaggctcctttccagggccccgtgaccttcgacgaggtggccgtgtacttcaccaaggaggagtgggccctgctggaccccgcccagagggccctgtacagggacgtgatgcaggagaactacgagaccgtgaccagcctgggcctgcccgtgagcaggcccgacgtgatcagccagatggagcagggcgaggagccctgggccagcgccctgcagggcagcgaggacaggctgatcctgaggggcatctgcggatctggctccggcagcggccccaagaaaaagagaaaagtctaagctgccttctgcggggcttgccttctggccatgcccttcttctctcccttgcacctgtacctcttggtctttgaataaagcctgagtaggaaggctagcaaaaaaaaaaaaaaaaaaaaaaaaaaaaaaaaaaaaaaaaaaaaaaaaaaaaaaaaaaaaaaaaaaaaaaaaaaaaaaaa

SEQ ID NO: 16840 - RNA, 9485 nt, synthetic construct
  source 1..9485: mol_type = other RNA
aggaaataagagagaaaagaagagtaagaagaaatataagagccaccatggcccctaagaagaagcgtaaagtgagccggatggaacgcctcgtctacgaggtgcggcagaagtgcagaaacatcgaggacatctgcatctcctgcggatctctgaacgtgaccctggagcacccactgttcatcggcggcatgtgccagaactgtaaaaactgttttctggagtgtgcctatcaatacgacgatgacggctaccagagctactgcaccatctgttgcggcggaagagaggtgctgatgtgtggaaataacaactgctgccggtgcttctgcgtggaatgcgtggacctgctggtgggccccggcgccgcccaggccgctattaaggaagatccttggaactgctacatgtgcggccacaagggcacatacggcctgctgagacggagagaggactggcctagcagactgcagatgttcttcgccaataaccacgaccaggagttcgacccccctaaggtgtaccctcccgtccccgccgagaagagaaagcccatccgggtcctgagcctgttcgatggcatcgccaccggtctgctggtgctgaaggacctgggcatccaggtggataggtacattgcctccgaggtgtgcgaggactccatcaccgtgggaatggtgcgtcatcagggcaagatcatgtacgtgggcgacgtgcggagcgtgacacagaagcatatccaggagtggggccctttcgacctggtgatcggcggcagcccttgcaatgacctgagcatcgtgaacccagcccggaagggcctgtacgagggaaccggcagactgttcttcgagttttacagactgctgcacgacgcccggcctaaggaaggcgacgaccggcccttcttttggctgttcgagaatgtggtggccatgggagtcagcgacaagcgggatattagccggttcctggagagcaaccccgtgatgatcgatgccaaggaagtgagcgccgcccaccgggccagatacttctggggcaatctgcctggcatgaacagacccctggccagcaccgtgaacgacaagctggagctgcaggagtgcctggagcacggccggatcgccaagttcagcaaggtgagaaccatcaccacccgaagcaacagcatcaaacaaggcaaggaccagcactttcctgtgttcatgaacgagaaggaggacatcctgtggtgtaccgagatggagagagtgttcgggttcccagtccactacacagatgtcagcaacatgtctagactggccagacagagactgctgggaagaagctggtccgtccctgtgatcagacacctgttcgcccctctgaaggagtacttcgcctgcgtgagcagcggcaacagcaacgccaacagccggggccccagcttctctagcggcctggtgccactgtccctgagagggagccacatgggccccatggagatctacaaaaccgtgagcgcctggaagcggcagcctgtgcgcgtgctgagcctgtttcggaatatcgataaagtcctgaaaagcctgggattcctggagagcggctctggctccggcggtggcaccctgaagtacgtggaggatgtgacaaacgtggtcagacgggatgtggagaagtggggccccttcgatctggtgtacggcagcacccaacccctgggcagctcttgtgaccggtgccctggctggtacatgtttcagttccaccggatcctgcagtacgccctgccgagacaggagtcccagcggccattcttttggattttcatggacaacttgctgctgaccgaggatgaccaggaaactaccactcggttcctgcagaccgaagccgtgaccctgcaggacgtgagaggccgggactaccagaacgccatgcgggtgtggtccaacatccctggactgaaaagcaagcacgcacctctgacccctaaagaagaggagtacctgcaggcccaggtgcggagcagaagcaagctggacgcccctaaggtggatctgctggtgaagaattgcctcctgcccctgagagagtacttcaagtatttcagccagaatagtctgcccctgggaggcagcggcggcggcgccctggtgacatttgaggacgtcgccgtgcggttcacccaggaggaatgggctctgctggatccttctcagaaaatcctgtaccgggacgtgatgagagagacataccggaatctgacctccgtgggcatcaactgggaatgttgggaccttgaagcctgcttcagaagcctgggaagaaacctgagagtgcaggtggtgaagagaaagtgcgagctgaccaacagcggcccctgcgccgagggcggcccaagcagcggcgcccctcctcccagcggcggcagcccagccggctccccaacctctaccgaggagggcacctctgagtccgccacccccgagagcggccctggcacctccaccgagcccagcgagggcagcgcacccggcagccctgccggcagccccacctccacagaggagggaaccagcaccgagcccagcgaaggcagcgccccaggcaccagcaccgagcctagtgagcaggagattaaacggatcaacaagatcagaagaagacttgtgaaagacagcaacaccaagaaggccggcaagacaggccccatgaaaaccctgctggttagagtgatgacacccgatctgagagagcggctggaaaacctgagaaagaagcctgaaaatatcccccagcccatcagcaatacatctagagccaacctgaataagctgctgaccgattacaccgaaatgaagaaggcgatcctgcatgtgtactgggaagagttccagaaggaccctgtgggcctgatgagccgggtggcccagcctgccagcaagaagatcgatcagaacaagctgaaacctgagatggacgagaagggcaacctgaccaccgccggctttgcctgctctcagtgtggccagcccctgttcgtgtacaagctggagcaggtgtctgagaagggcaaggcttacaccaactacttcggacggtgcaatgtggccgagcacgaaaagctgatcctgctggcccagctgaagcccgagaaggatagcgacgaagccgtgacatatagcctgggaaagtttgggcagagggccctggatttctacagcattcatgtgaccaaggagtccacccaccccgtgaagcccctggcccagatcgccggaaacagatacgcctccggacctgtgggaaaggccctgagcgacgcatgtatgggcacaatcgcctccttcctgtctaagtaccaggacatcatcatcgaacaccagaaggtggtgaagggcaaccagaagagactggagagcctgcgggagctggccggcaaggaaaacctggaataccctagcgtgaccctgccacctcagcctcacaccaaggagggcgttgatgcctacaacgaagtgatcgcccgggtgcgaatgtgggtgaacctgaacctgtggcagaagctgaagctaagcagagatgatgccaagcctctgctgagactgaagggattcccttcctttcctctggtcgagagacaggccaacgaagtggactggtgggacatggtgtgtaacgtgaagaagctgatcaacgagaaaaaggaggatggcaaggtgttttggcagaatctggctggctacaagagacaggaagccctgagaccatacctgagcagcgaggaagatcggaagaagggaaagaaattcgctcggtaccagctgggcgacctgctgctgcacctggaaaagaagcacggcgaggactggggaaaggtgtacgacgaggcctgggagcggattgacaagaaagtggaaggcctgagcaagcacatcaagctggaagaggaacggagaagcgaggacgcccagagcaaggccgccctgaccgactggctgcgggctaaggccagcttcgtgatcgagggcctgaaggaggccgacaaggacgagttctgcagatgcgagctgaagctgcagaagtggtacggggacctgcggggaaagcccttcgccatcgaagccgagaacagcatcctggacatcagcggcttcagcaagcagtacaactgtgccttcatctggcagaaggacggcgtgaagaagctgaacctgtacctgatcatcaactacttcaagggcggcaagctgcggttcaagaagatcaaacctgaagccttcgaagccaacagattctacaccgtgatcaacaaaaagagcggcgagatcgtgcccatggaggtgaacttcaacttcgacgaccccaacctgatcatcctgcctctggcctttggcaagagacagggcagagaattcatctggaacgacctgctgtccctggaaaccggcagcctgaagctggccaacggaagagtgatcgagaagacactgtacaacagaagaacccggcaggatgagcctgccctgttcgtggccctgaccttcgagcggcgggaggtcctggactcctccaatatcaaaccaatgaacctgatcggcgtggcaagaggcgaaaacatccccgccgtgatcgccctgaccgaccccgagggctgcccactgagccggtttaaggatagcctgggaaacccaacccacatcctgagaatcggcgagagctataaggagaagcagcggaccatccaggccaagaaggaggtggagcagcggagagccggcggctacagccggaagtacgccagcaaagccaagaatctggcagacgatatggtgagaaacaccgctagagatctgctgtactacgccgtgacccaggatgccatgctgatcttcgccaacctgagccggggcttcggccggcagggcaagcggaccttcatggccgagagacagtacacacggatggaggactggctgaccgccaagctggcctacgagggcctgagcaagacctacctgtccaagacactggcccagtacacctccaagacatgcagcaactgtgggtttaccatcaccagcgccgactacgacagggtgctggagaagctgaagaagacagcaacaggctggatgaccacaattaacggcaaggagctgaaggtggagggccagattacctactacaacagatacaagagacagaacgtagtcaaggacctgtccgtcgagctggatagactgagcgaagaatctgtgaacaacgacatctcctcctggacaaagggcagaagcggagaagctctgagcctcctgaagaaaagattctcccatagacccgtgcaggagaagttcgtgtgcctgaactgcggcttcgagacacacgcagccgagcaagccgccctgaacatcgccagatcctggctgttcctgcggagccaggagtacaagaaataccagacaaacaagacaaccggcaacaccgataagagagccttcgtcgagacctggcagtccttttaccggaagaagcttaaggaggtgtggaaacctgccgtgcggtctggcggatctggcggaggctccatgaccatgctgcaggacagcttcagcttcgacgacctgagcgtggacttcacccagaaggagtggcagctgctggaccccagccagaagaacctgtacaaggacgtgatgctggagaactacagcagcctggtgagcctgggctacgaggccatgaagcccgacgtgatcttcaagctggagcagggcgaggagccctggatcggcgacgaggagatccccagcagctggagccccgacatcggcggcccaagcagcggcgcccctcctcccagcggcggcagcccagccggctccccaacctctaccgaggagggcacctctgagtccgccacccccgagagcggccctggcacctccaccgagcccagcgagggcagcgcacccggcagccctgccggcagccccacctccacagaggagggaaccagcaccgagcccagcgaaggcagcgccccaggcaccagcaccgagcctagtgagcaggagattaaacggatcaacaagatcagaagaagacttgtgaaagacagcaacaccaagaaggccggcaagacaggccccatgaaaaccctgctggttagagtgatgacacccgatctgagagagcggctggaaaacctgagaaagaagcctgaaaatatcccccagcccatcagcaatacatctagagccaacctgaataagctgctgaccgattacaccgaaatgaagaaggcgatcctgcatgtgtactgggaagagttccagaaggaccctgtgggcctgatgagccgggtggcccagcctgccagcaagaagatcgatcagaacaagctgaaacctgagatggacgagaagggcaacctgaccaccgccggctttgcctgctctcagtgtggccagcccctgttcgtgtacaagctggagcaggtgtctgagaagggcaaggcttacaccaactacttcggacggtgcaatgtggccgagcacgaaaagctgatcctgctggcccagctgaagcccgagaaggatagcgacgaagccgtgacatatagcctgggaaagtttgggcagagggccctggatttctacagcattcatgtgaccaaggagtccacccaccccgtgaagcccctggcccagatcgccggaaacagatacgcctccggacctgtgggaaaggccctgagcgacgcatgtatgggcacaatcgcctccttcctgtctaagtaccaggacatcatcatcgaacaccagaaggtggtgaagggcaaccagaagagactggagagcctgcgggagctggccggcaaggaaaacctggaataccctagcgtgaccctgccacctcagcctcacaccaaggagggcgttgatgcctacaacgaagtgatcgcccgggtgcgaatgtgggtgaacctgaacctgtggcagaagctgaagctaagcagagatgatgccaagcctctgctgagactgaagggattcccttcctttcctctggtcgagagacaggccaacgaagtggactggtgggacatggtgtgtaacgtgaagaagctgatcaacgagaaaaaggaggatggcaaggtgttttggcagaatctggctggctacaagagacaggaagccctgagaccatacctgagcagcgaggaagatcggaagaagggaaagaaattcgctcggtaccagctgggcgacctgctgctgcacctggaaaagaagcacggcgaggactggggaaaggtgtacgacgaggcctgggagcggattgacaagaaagtggaaggcctgagcaagcacatcaagctggaagaggaacggagaagcgaggacgcccagagcaaggccgccctgaccgactggctgcgggctaaggccagcttcgtgatcgagggcctgaaggaggccgacaaggacgagttctgcagatgcgagctgaagctgcagaagtggtacggggacctgcggggaaagcccttcgccatcgaagccgagaacagcatcctggacatcagcggcttcagcaagcagtacaactgtgccttcatctggcagaaggacggcgtgaagaagctgaacctgtacctgatcatcaactacttcaagggcggcaagctgcggttcaagaagatcaaacctgaagccttcgaagccaacagattctacaccgtgatcaacaaaaagagcggcgagatcgtgcccatggaggtgaacttcaacttcgacgaccccaacctgatcatcctgcctctggcctttggcaagagacagggcagagaattcatctggaacgacctgctgtccctggaaaccggcagcctgaagctggccaacggaagagtgatcgagaagacactgtacaacagaagaacccggcaggatgagcctgccctgttcgtggccctgaccttcgagcggcgggaggtcctggactcctccaatatcaaaccaatgaacctgatcggcgtggcaagaggcgaaaacatccccgccgtgatcgccctgaccgaccccgagggctgcccactgagccggtttaaggatagcctgggaaacccaacccacatcctgagaatcggcgagagctataaggagaagcagcggaccatccaggccaagaaggaggtggagcagcggagagccggcggctacagccggaagtacgccagcaaagccaagaatctggcagacgatatggtgagaaacaccgctagagatctgctgtactacgccgtgacccaggatgccatgctgatcttcgccaacctgagccggggcttcggccggcagggcaagcggaccttcatggccgagagacagtacacacggatggaggactggctgaccgccaagctggcctacgagggcctgagcaagacctacctgtccaagacactggcccagtacacctccaagacatgcagcaactgtgggtttaccatcaccagcgccgactacgacagggtgctggagaagctgaagaagacagcaacaggctggatgaccacaattaacggcaaggagctgaaggtggagggccagattacctactacaacagatacaagagacagaacgtagtcaaggacctgtccgtcgagctggatagactgagcgaagaatctgtgaacaacgacatctcctcctggacaaagggcagaagcggagaagctctgagcctcctgaagaaaagattctcccatagacccgtgcaggagaagttcgtgtgcctgaactgcggcttcgagacacacgcagccgagcaagccgccctgaacatcgccagatcctggctgttcctgcggagccaggagtacaagaaataccagacaaacaagacaaccggcaacaccgataagagagccttcgtcgagacctggcagtccttttaccggaagaagcttaaggaggtgtggaaacctgccgtgcggtctggcggatctggcggaggctcctatgaccatgctgcaggacagcttcagcttcgacgacctgagcgtggacttcacccagaaggagtggcagctgctggaccccagccagaagaacctgtacaaggacgtgatgctggagaactacagcagcctggtgagcctgggctacgaggccatgaagcccgacgtgatcttcaagctggagcagggcgaggagccctggatcggcgacgaggagatccccagcagctggagccccgacatcggatctggctccggcagcggccccaagaaaaagagaaaagtctaagctgccttctgcggggcttgccttctggccatgcccttcttctctcccttgcacctgtacctcttggtctttgaataaagcctgagtaggaaggctagcaaaaaaaaaaaaaaaaaaaaaaaaaaaaaaaaaaaaaaaaaaaaaaaaaaaaaaaaaaaaaaaaaaaaaaaaaaaaaaaa

SEQ ID NO: 16841 - RNA, 9485 nt, synthetic construct
  source 1..9485: mol_type = other RNA
aggaaataagagagaaaagaagagtaagaagaaatataagagccaccatggcccctaagaagaagcgtaaagtgagccggatggaacgcctcgtctacgaggtgcggcagaagtgcagaaacatcgaggacatctgcatctcctgcggatctctgaacgtgaccctggagcacccactgttcatcggcggcatgtgccagaactgtaaaaactgttttctggagtgtgcctatcaatacgacgatgacggctaccagagctactgcaccatctgttgcggcggaagagaggtgctgatgtgtggaaataacaactgctgccggtgcttctgcgtggaatgcgtggacctgctggtgggccccggcgccgcccaggccgctattaaggaagatccttggaactgctacatgtgcggccacaagggcacatacggcctgctgagacggagagaggactggcctagcagactgcagatgttcttcgccaataaccacgaccaggagttcgacccccctaaggtgtaccctcccgtccccgccgagaagagaaagcccatccgggtcctgagcctgttcgatggcatcgccaccggtctgctggtgctgaaggacctgggcatccaggtggataggtacattgcctccgaggtgtgcgaggactccatcaccgtgggaatggtgcgtcatcagggcaagatcatgtacgtgggcgacgtgcggagcgtgacacagaagcatatccaggagtggggccctttcgacctggtgatcggcggcagcccttgcaatgacctgagcatcgtgaacccagcccggaagggcctgtacgagggaaccggcagactgttcttcgagttttacagactgctgcacgacgcccggcctaaggaaggcgacgaccggcccttcttttggctgttcgagaatgtggtggccatgggagtcagcgacaagcgggatattagccggttcctggagagcaaccccgtgatgatcgatgccaaggaagtgagcgccgcccaccgggccagatacttctggggcaatctgcctggcatgaacagacccctggccagcaccgtgaacgacaagctggagctgcaggagtgcctggagcacggccggatcgccaagttcagcaaggtgagaaccatcaccacccgaagcaacagcatcaaacaaggcaaggaccagcactttcctgtgttcatgaacgagaaggaggacatcctgtggtgtaccgagatggagagagtgttcgggttcccagtccactacacagatgtcagcaacatgtctagactggccagacagagactgctgggaagaagctggtccgtccctgtgatcagacacctgttcgcccctctgaaggagtacttcgcctgcgtgagcagcggcaacagcaacgccaacagccggggccccagcttctctagcggcctggtgccactgtccctgagagggagccacatgggccccatggagatctacaaaaccgtgagcgcctggaagcggcagcctgtgcgcgtgctgagcctgtttcggaatatcgataaagtcctgaaaagcctgggattcctggagagcggctctggctccggcggtggcaccctgaagtacgtggaggatgtgacaaacgtggtcagacgggatgtggagaagtggggccccttcgatctggtgtacggcagcacccaacccctgggcagctcttgtgaccggtgccctggctggtacatgtttcagttccaccggatcctgcagtacgccctgccgagacaggagtcccagcggccattcttttggattttcatggacaacttgctgctgaccgaggatgaccaggaaactaccactcggttcctgcagaccgaagccgtgaccctgcaggacgtgagaggccgggactaccagaacgccatgcgggtgtggtccaacatccctggactgaaaagcaagcacgcacctctgacccctaaagaagaggagtacctgcaggcccaggtgcggagcagaagcaagctggacgcccctaaggtggatctgctggtgaagaattgcctcctgcccctgagagagtacttcaagtatttcagccagaatagtctgcccctgggaggcagcggcggcggcgccctggtgacatttgaggacgtcgccgtgcggttcacccaggaggaatgggctctgctggatccttctcagaaaatcctgtaccgggacgtgatgagagagacataccggaatctgacctccgtgggcatcaactgggaatgttgggaccttgaagcctgcttcagaagcctgggaagaaacctgagagtgcaggtggtgaagagaaagtgcgagctgaccaacagcggcccctgcgccgagggcggcccaagcagcggcgcccctcctcccagcggcggcagcccagccggctccccaacctctaccgaggagggcacctctgagtccgccacccccgagagcggccctggcacctccaccgagcccagcgagggcagcgcacccggcagccctgccggcagccccacctccacagaggagggaaccagcaccgagcccagcgaaggcagcgccccaggcaccagcaccgagcctagtgagcaggagattaaacggatcaacaagatcagaagaagacttgtgaaagacagcaacaccaagaaggccggcaagacaggccccatgaaaaccctgctggttagagtgatgacacccgatctgagagagcggctggaaaacctgagaaagaagcctgaaaatatcccccagcccatcagcaatacatctagagccaacctgaataagctgctgaccgattacaccgaaatgaagaaggcgatcctgcatgtgtactgggaagagttccagaaggaccctgtgggcctgatgagccgggtggcccagcctgccagcaagaagatcgatcagaacaagctgaaacctgagatggacgagaagggcaacctgaccaccgccggctttgcctgctctcagtgtggccagcccctgttcgtgtacaagctggagcaggtgtctgagaagggcaaggcttacaccaactacttcggacggtgcaatgtggccgagcacgaaaagctgatcctgctggcccagctgaagcccgagaaggatagcgacgaagccgtgacatatagcctgggaaagtttgggcagagggccctggatttctacagcattcatgtgaccaaggagtccacccaccccgtgaagcccctggcccagatcgccggaaacagatacgcctccggacctgtgggaaaggccctgagcgacgcatgtatgggcacaatcgcctccttcctgtctaagtaccaggacatcatcatcgaacaccagaaggtggtgaagggcaaccagaagagactggagagcctgcgggagctggccggcaaggaaaacctggaataccctagcgtgaccctgccacctcagcctcacaccaaggagggcgttgatgcctacaacgaagtgatcgcccgggtgcgaatgtgggtgaacctgaacctgtggcagaagctgaagctaagcagagatgatgccaagcctctgctgagactgaagggattcccttcctttcctctggtcgagagacaggccaacgaagtggactggtgggacatggtgtgtaacgtgaagaagctgatcaacgagaaaaaggaggatggcaaggtgttttggcagaatctggctggctacaagagacaggaagccctgagaccatacctgagcagcgaggaagatcggaagaagggaaagaaattcgctcggtaccagctgggcgacctgctgctgcacctggaaaagaagcacggcgaggactggggaaaggtgtacgacgaggcctgggagcggattgacaagaaagtggaaggcctgagcaagcacatcaagctggaagaggaacggagaagcgaggacgcccagagcaaggccgccctgaccgactggctgcgggctaaggccagcttcgtgatcgagggcctgaaggaggccgacaaggacgagttctgcagatgcgagctgaagctgcagaagtggtacggggacctgcggggaaagcccttcgccatcgaagccgagaacagcatcctggacatcagcggcttcagcaagcagtacaactgtgccttcatctggcagaaggacggcgtgaagaagctgaacctgtacctgatcatcaactacttcaagggcggcaagctgcggttcaagaagatcaaacctgaagccttcgaagccaacagattctacaccgtgatcaacaaaaagagcggcgagatcgtgcccatggaggtgaacttcaacttcgacgaccccaacctgatcatcctgcctctggcctttggcaagagacagggcagagaattcatctggaacgacctgctgtccctggaaaccggcagcctgaagctggccaacggaagagtgatcgagaagacactgtacaacagaagaacccggcaggatgagcctgccctgttcgtggccctgaccttcgagcggcgggaggtcctggactcctccaatatcaaaccaatgaacctgatcggcgtggcaagaggcgaaaacatccccgccgtgatcgccctgaccgaccccgagggctgcccactgagccggtttaaggatagcctgggaaacccaacccacatcctgagaatcggcgagagctataaggagaagcagcggaccatccaggccaagaaggaggtggagcagcggagagccggcggctacagccggaagtacgccagcaaagccaagaatctggcagacgatatggtgagaaacaccgctagagatctgctgtactacgccgtgacccaggatgccatgctgatcttcgccaacctgagccggggcttcggccggcagggcaagcggaccttcatggccgagagacagtacacacggatggaggactggctgaccgccaagctggcctacgagggcctgagcaagacctacctgtccaagacactggcccagtacacctccaagacatgcagcaactgtgggtttaccatcaccagcgccgactacgacagggtgctggagaagctgaagaagacagcaacaggctggatgaccacaattaacggcaaggagctgaaggtggagggccagattacctactacaacagatacaagagacagaacgtagtcaaggacctgtccgtcgagctggatagactgagcgaagaatctgtgaacaacgacatctcctcctggacaaagggcagaagcggagaagctctgagcctcctgaagaaaagattctcccatagacccgtgcaggagaagttcgtgtgcctgaactgcggcttcgagacacacgcagccgagcaagccgccctgaacatcgccagatcctggctgttcctgcggagccaggagtacaagaaataccagacaaacaagacaaccggcaacaccgataagagagccttcgtcgagacctggcagtccttttaccggaagaagcttaaggaggtgtggaaacctgccgtgcggtctggcggatctggcggaggctccttccccatgcccgtgaccttcgaggaggtggccgtgtacttcacccagggccagggcgccctgctggaccccgcccagagggccctgtacagggacgtgatgcaggagaactacaagatggtgaccagcctggccggcttccccatccccaagcccgacctgatcgcccagctggagaggggcgaggagccctgggtgcccgacctgcaggccgacgaggagagggagagccccaggggcaccggcggcccaagcagcggcgcccctcctcccagcggcggcagcccagccggctccccaacctctaccgaggagggcacctctgagtccgccacccccgagagcggccctggcacctccaccgagcccagcgagggcagcgcacccggcagccctgccggcagccccacctccacagaggagggaaccagcaccgagcccagcgaaggcagcgccccaggcaccagcaccgagcctagtgagcaggagattaaacggatcaacaagatcagaagaagacttgtgaaagacagcaacaccaagaaggccggcaagacaggccccatgaaaaccctgctggttagagtgatgacacccgatctgagagagcggctggaaaacctgagaaagaagcctgaaaatatcccccagcccatcagcaatacatctagagccaacctgaataagctgctgaccgattacaccgaaatgaagaaggcgatcctgcatgtgtactgggaagagttccagaaggaccctgtgggcctgatgagccgggtggcccagcctgccagcaagaagatcgatcagaacaagctgaaacctgagatggacgagaagggcaacctgaccaccgccggctttgcctgctctcagtgtggccagcccctgttcgtgtacaagctggagcaggtgtctgagaagggcaaggcttacaccaactacttcggacggtgcaatgtggccgagcacgaaaagctgatcctgctggcccagctgaagcccgagaaggatagcgacgaagccgtgacatatagcctgggaaagtttgggcagagggccctggatttctacagcattcatgtgaccaaggagtccacccaccccgtgaagcccctggcccagatcgccggaaacagatacgcctccggacctgtgggaaaggccctgagcgacgcatgtatgggcacaatcgcctccttcctgtctaagtaccaggacatcatcatcgaacaccagaaggtggtgaagggcaaccagaagagactggagagcctgcgggagctggccggcaaggaaaacctggaataccctagcgtgaccctgccacctcagcctcacaccaaggagggcgttgatgcctacaacgaagtgatcgcccgggtgcgaatgtgggtgaacctgaacctgtggcagaagctgaagctaagcagagatgatgccaagcctctgctgagactgaagggattcccttcctttcctctggtcgagagacaggccaacgaagtggactggtgggacatggtgtgtaacgtgaagaagctgatcaacgagaaaaaggaggatggcaaggtgttttggcagaatctggctggctacaagagacaggaagccctgagaccatacctgagcagcgaggaagatcggaagaagggaaagaaattcgctcggtaccagctgggcgacctgctgctgcacctggaaaagaagcacggcgaggactggggaaaggtgtacgacgaggcctgggagcggattgacaagaaagtggaaggcctgagcaagcacatcaagctggaagaggaacggagaagcgaggacgcccagagcaaggccgccctgaccgactggctgcgggctaaggccagcttcgtgatcgagggcctgaaggaggccgacaaggacgagttctgcagatgcgagctgaagctgcagaagtggtacggggacctgcggggaaagcccttcgccatcgaagccgagaacagcatcctggacatcagcggcttcagcaagcagtacaactgtgccttcatctggcagaaggacggcgtgaagaagctgaacctgtacctgatcatcaactacttcaagggcggcaagctgcggttcaagaagatcaaacctgaagccttcgaagccaacagattctacaccgtgatcaacaaaaagagcggcgagatcgtgcccatggaggtgaacttcaacttcgacgaccccaacctgatcatcctgcctctggcctttggcaagagacagggcagagaattcatctggaacgacctgctgtccctggaaaccggcagcctgaagctggccaacggaagagtgatcgagaagacactgtacaacagaagaacccggcaggatgagcctgccctgttcgtggccctgaccttcgagcggcgggaggtcctggactcctccaatatcaaaccaatgaacctgatcggcgtggcaagaggcgaaaacatccccgccgtgatcgccctgaccgaccccgagggctgcccactgagccggtttaaggatagcctgggaaacccaacccacatcctgagaatcggcgagagctataaggagaagcagcggaccatccaggccaagaaggaggtggagcagcggagagccggcggctacagccggaagtacgccagcaaagccaagaatctggcagacgatatggtgagaaacaccgctagagatctgctgtactacgccgtgacccaggatgccatgctgatcttcgccaacctgagccggggcttcggccggcagggcaagcggaccttcatggccgagagacagtacacacggatggaggactggctgaccgccaagctggcctacgagggcctgagcaagacctacctgtccaagacactggcccagtacacctccaagacatgcagcaactgtgggtttaccatcaccagcgccgactacgacagggtgctggagaagctgaagaagacagcaacaggctggatgaccacaattaacggcaaggagctgaaggtggagggccagattacctactacaacagatacaagagacagaacgtagtcaaggacctgtccgtcgagctggatagactgagcgaagaatctgtgaacaacgacatctcctcctggacaaagggcagaagcggagaagctctgagcctcctgaagaaaagattctcccatagacccgtgcaggagaagttcgtgtgcctgaactgcggcttcgagacacacgcagccgagcaagccgccctgaacatcgccagatcctggctgttcctgcggagccaggagtacaagaaataccagacaaacaagacaaccggcaacaccgataagagagccttcgtcgagacctggcagtccttttaccggaagaagcttaaggaggtgtggaaacctgccgtgcggtctggcggatctggcggaggctcctttccccatgcccgtgaccttcgaggaggtggccgtgtacttcacccagggccagggcgccctgctggaccccgcccagagggccctgtacagggacgtgatgcaggagaactacaagatggtgaccagcctggccggcttccccatccccaagcccgacctgatcgcccagctggagaggggcgaggagccctgggtgcccgacctgcaggccgacgaggagagggagagccccaggggcaccggatctggctccggcagcggccccaagaaaaagagaaaagtctaagctgccttctgcggggcttgccttctggccatgcccttcttctctcccttgcacctgtacctcttggtctttgaataaagcctgagtaggaaggctagcaaaaaaaaaaaaaaaaaaaaaaaaaaaaaaaaaaaaaaaaaaaaaaaaaaaaaaaaaaaaaaaaaaaaaaaaaaaaaaaa

SEQ ID NO: 16842 - RNA, 9485 nt, synthetic construct
  source 1..9485: mol_type = other RNA
aggaaataagagagaaaagaagagtaagaagaaatataagagccaccatggcccctaagaagaagcgtaaagtgagccggatggaacgcctcgtctacgaggtgcggcagaagtgcagaaacatcgaggacatctgcatctcctgcggatctctgaacgtgaccctggagcacccactgttcatcggcggcatgtgccagaactgtaaaaactgttttctggagtgtgcctatcaatacgacgatgacggctaccagagctactgcaccatctgttgcggcggaagagaggtgctgatgtgtggaaataacaactgctgccggtgcttctgcgtggaatgcgtggacctgctggtgggccccggcgccgcccaggccgctattaaggaagatccttggaactgctacatgtgcggccacaagggcacatacggcctgctgagacggagagaggactggcctagcagactgcagatgttcttcgccaataaccacgaccaggagttcgacccccctaaggtgtaccctcccgtccccgccgagaagagaaagcccatccgggtcctgagcctgttcgatggcatcgccaccggtctgctggtgctgaaggacctgggcatccaggtggataggtacattgcctccgaggtgtgcgaggactccatcaccgtgggaatggtgcgtcatcagggcaagatcatgtacgtgggcgacgtgcggagcgtgacacagaagcatatccaggagtggggccctttcgacctggtgatcggcggcagcccttgcaatgacctgagcatcgtgaacccagcccggaagggcctgtacgagggaaccggcagactgttcttcgagttttacagactgctgcacgacgcccggcctaaggaaggcgacgaccggcccttcttttggctgttcgagaatgtggtggccatgggagtcagcgacaagcgggatattagccggttcctggagagcaaccccgtgatgatcgatgccaaggaagtgagcgccgcccaccgggccagatacttctggggcaatctgcctggcatgaacagacccctggccagcaccgtgaacgacaagctggagctgcaggagtgcctggagcacggccggatcgccaagttcagcaaggtgagaaccatcaccacccgaagcaacagcatcaaacaaggcaaggaccagcactttcctgtgttcatgaacgagaaggaggacatcctgtggtgtaccgagatggagagagtgttcgggttcccagtccactacacagatgtcagcaacatgtctagactggccagacagagactgctgggaagaagctggtccgtccctgtgatcagacacctgttcgcccctctgaaggagtacttcgcctgcgtgagcagcggcaacagcaacgccaacagccggggccccagcttctctagcggcctggtgccactgtccctgagagggagccacatgggccccatggagatctacaaaaccgtgagcgcctggaagcggcagcctgtgcgcgtgctgagcctgtttcggaatatcgataaagtcctgaaaagcctgggattcctggagagcggctctggctccggcggtggcaccctgaagtacgtggaggatgtgacaaacgtggtcagacgggatgtggagaagtggggccccttcgatctggtgtacggcagcacccaacccctgggcagctcttgtgaccggtgccctggctggtacatgtttcagttccaccggatcctgcagtacgccctgccgagacaggagtcccagcggccattcttttggattttcatggacaacttgctgctgaccgaggatgaccaggaaactaccactcggttcctgcagaccgaagccgtgaccctgcaggacgtgagaggccgggactaccagaacgccatgcgggtgtggtccaacatccctggactgaaaagcaagcacgcacctctgacccctaaagaagaggagtacctgcaggcccaggtgcggagcagaagcaagctggacgcccctaaggtggatctgctggtgaagaattgcctcctgcccctgagagagtacttcaagtatttcagccagaatagtctgcccctgggaggcagcggcggcggcgccctggtgacatttgaggacgtcgccgtgcggttcacccaggaggaatgggctctgctggatccttctcagaaaatcctgtaccgggacgtgatgagagagacataccggaatctgacctccgtgggcatcaactgggaatgttgggaccttgaagcctgcttcagaagcctgggaagaaacctgagagtgcaggtggtgaagagaaagtgcgagctgaccaacagcggcccctgcgccgagggcggcccaagcagcggcgcccctcctcccagcggcggcagcccagccggctccccaacctctaccgaggagggcacctctgagtccgccacccccgagagcggccctggcacctccaccgagcccagcgagggcagcgcacccggcagccctgccggcagccccacctccacagaggagggaaccagcaccgagcccagcgaaggcagcgccccaggcaccagcaccgagcctagtgagcaggagattaaacggatcaacaagatcagaagaagacttgtgaaagacagcaacaccaagaaggccggcaagacaggccccatgaaaaccctgctggttagagtgatgacacccgatctgagagagcggctggaaaacctgagaaagaagcctgaaaatatcccccagcccatcagcaatacatctagagccaacctgaataagctgctgaccgattacaccgaaatgaagaaggcgatcctgcatgtgtactgggaagagttccagaaggaccctgtgggcctgatgagccgggtggcccagcctgccagcaagaagatcgatcagaacaagctgaaacctgagatggacgagaagggcaacctgaccaccgccggctttgcctgctctcagtgtggccagcccctgttcgtgtacaagctggagcaggtgtctgagaagggcaaggcttacaccaactacttcggacggtgcaatgtggccgagcacgaaaagctgatcctgctggcccagctgaagcccgagaaggatagcgacgaagccgtgacatatagcctgggaaagtttgggcagagggccctggatttctacagcattcatgtgaccaaggagtccacccaccccgtgaagcccctggcccagatcgccggaaacagatacgcctccggacctgtgggaaaggccctgagcgacgcatgtatgggcacaatcgcctccttcctgtctaagtaccaggacatcatcatcgaacaccagaaggtggtgaagggcaaccagaagagactggagagcctgcgggagctggccggcaaggaaaacctggaataccctagcgtgaccctgccacctcagcctcacaccaaggagggcgttgatgcctacaacgaagtgatcgcccgggtgcgaatgtgggtgaacctgaacctgtggcagaagctgaagctaagcagagatgatgccaagcctctgctgagactgaagggattcccttcctttcctctggtcgagagacaggccaacgaagtggactggtgggacatggtgtgtaacgtgaagaagctgatcaacgagaaaaaggaggatggcaaggtgttttggcagaatctggctggctacaagagacaggaagccctgagaccatacctgagcagcgaggaagatcggaagaagggaaagaaattcgctcggtaccagctgggcgacctgctgctgcacctggaaaagaagcacggcgaggactggggaaaggtgtacgacgaggcctgggagcggattgacaagaaagtggaaggcctgagcaagcacatcaagctggaagaggaacggagaagcgaggacgcccagagcaaggccgccctgaccgactggctgcgggctaaggccagcttcgtgatcgagggcctgaaggaggccgacaaggacgagttctgcagatgcgagctgaagctgcagaagtggtacggggacctgcggggaaagcccttcgccatcgaagccgagaacagcatcctggacatcagcggcttcagcaagcagtacaactgtgccttcatctggcagaaggacggcgtgaagaagctgaacctgtacctgatcatcaactacttcaagggcggcaagctgcggttcaagaagatcaaacctgaagccttcgaagccaacagattctacaccgtgatcaacaaaaagagcggcgagatcgtgcccatggaggtgaacttcaacttcgacgaccccaacctgatcatcctgcctctggcctttggcaagagacagggcagagaattcatctggaacgacctgctgtccctggaaaccggcagcctgaagctggccaacggaagagtgatcgagaagacactgtacaacagaagaacccggcaggatgagcctgccctgttcgtggccctgaccttcgagcggcgggaggtcctggactcctccaatatcaaaccaatgaacctgatcggcgtggcaagaggcgaaaacatccccgccgtgatcgccctgaccgaccccgagggctgcccactgagccggtttaaggatagcctgggaaacccaacccacatcctgagaatcggcgagagctataaggagaagcagcggaccatccaggccaagaaggaggtggagcagcggagagccggcggctacagccggaagtacgccagcaaagccaagaatctggcagacgatatggtgagaaacaccgctagagatctgctgtactacgccgtgacccaggatgccatgctgatcttcgccaacctgagccggggcttcggccggcagggcaagcggaccttcatggccgagagacagtacacacggatggaggactggctgaccgccaagctggcctacgagggcctgagcaagacctacctgtccaagacactggcccagtacacctccaagacatgcagcaactgtgggtttaccatcaccagcgccgactacgacagggtgctggagaagctgaagaagacagcaacaggctggatgaccacaattaacggcaaggagctgaaggtggagggccagattacctactacaacagatacaagagacagaacgtagtcaaggacctgtccgtcgagctggatagactgagcgaagaatctgtgaacaacgacatctcctcctggacaaagggcagaagcggagaagctctgagcctcctgaagaaaagattctcccatagacccgtgcaggagaagttcgtgtgcctgaactgcggcttcgagacacacgcagccgagcaagccgccctgaacatcgccagatcctggctgttcctgcggagccaggagtacaagaaataccagacaaacaagacaaccggcaacaccgataagagagccttcgtcgagacctggcagtccttttaccggaagaagcttaaggaggtgtggaaacctgccgtgcggtctggcggatctggcggaggctccctgctgaccttcgaggacgtggccgtgttcttcagcgaggaggagtggaagctgctgaaccccacccagaagatcctgtacagcgacgtgatgcaggagaactacgagaccgtgatcagcctgggcctgaagctgaagaacgacaccggcaacgaccagcccatcagcctgagcaccctggagctgcaggccagcggctgcaaggtgctgaggaaggccagggtgaaggtggcccagaagaccggcggcccaagcagcggcgcccctcctcccagcggcggcagcccagccggctccccaacctctaccgaggagggcacctctgagtccgccacccccgagagcggccctggcacctccaccgagcccagcgagggcagcgcacccggcagccctgccggcagccccacctccacagaggagggaaccagcaccgagcccagcgaaggcagcgccccaggcaccagcaccgagcctagtgagcaggagattaaacggatcaacaagatcagaagaagacttgtgaaagacagcaacaccaagaaggccggcaagacaggccccatgaaaaccctgctggttagagtgatgacacccgatctgagagagcggctggaaaacctgagaaagaagcctgaaaatatcccccagcccatcagcaatacatctagagccaacctgaataagctgctgaccgattacaccgaaatgaagaaggcgatcctgcatgtgtactgggaagagttccagaaggaccctgtgggcctgatgagccgggtggcccagcctgccagcaagaagatcgatcagaacaagctgaaacctgagatggacgagaagggcaacctgaccaccgccggctttgcctgctctcagtgtggccagcccctgttcgtgtacaagctggagcaggtgtctgagaagggcaaggcttacaccaactacttcggacggtgcaatgtggccgagcacgaaaagctgatcctgctggcccagctgaagcccgagaaggatagcgacgaagccgtgacatatagcctgggaaagtttgggcagagggccctggatttctacagcattcatgtgaccaaggagtccacccaccccgtgaagcccctggcccagatcgccggaaacagatacgcctccggacctgtgggaaaggccctgagcgacgcatgtatgggcacaatcgcctccttcctgtctaagtaccaggacatcatcatcgaacaccagaaggtggtgaagggcaaccagaagagactggagagcctgcgggagctggccggcaaggaaaacctggaataccctagcgtgaccctgccacctcagcctcacaccaaggagggcgttgatgcctacaacgaagtgatcgcccgggtgcgaatgtgggtgaacctgaacctgtggcagaagctgaagctaagcagagatgatgccaagcctctgctgagactgaagggattcccttcctttcctctggtcgagagacaggccaacgaagtggactggtgggacatggtgtgtaacgtgaagaagctgatcaacgagaaaaaggaggatggcaaggtgttttggcagaatctggctggctacaagagacaggaagccctgagaccatacctgagcagcgaggaagatcggaagaagggaaagaaattcgctcggtaccagctgggcgacctgctgctgcacctggaaaagaagcacggcgaggactggggaaaggtgtacgacgaggcctgggagcggattgacaagaaagtggaaggcctgagcaagcacatcaagctggaagaggaacggagaagcgaggacgcccagagcaaggccgccctgaccgactggctgcgggctaaggccagcttcgtgatcgagggcctgaaggaggccgacaaggacgagttctgcagatgcgagctgaagctgcagaagtggtacggggacctgcggggaaagcccttcgccatcgaagccgagaacagcatcctggacatcagcggcttcagcaagcagtacaactgtgccttcatctggcagaaggacggcgtgaagaagctgaacctgtacctgatcatcaactacttcaagggcggcaagctgcggttcaagaagatcaaacctgaagccttcgaagccaacagattctacaccgtgatcaacaaaaagagcggcgagatcgtgcccatggaggtgaacttcaacttcgacgaccccaacctgatcatcctgcctctggcctttggcaagagacagggcagagaattcatctggaacgacctgctgtccctggaaaccggcagcctgaagctggccaacggaagagtgatcgagaagacactgtacaacagaagaacccggcaggatgagcctgccctgttcgtggccctgaccttcgagcggcgggaggtcctggactcctccaatatcaaaccaatgaacctgatcggcgtggcaagaggcgaaaacatccccgccgtgatcgccctgaccgaccccgagggctgcccactgagccggtttaaggatagcctgggaaacccaacccacatcctgagaatcggcgagagctataaggagaagcagcggaccatccaggccaagaaggaggtggagcagcggagagccggcggctacagccggaagtacgccagcaaagccaagaatctggcagacgatatggtgagaaacaccgctagagatctgctgtactacgccgtgacccaggatgccatgctgatcttcgccaacctgagccggggcttcggccggcagggcaagcggaccttcatggccgagagacagtacacacggatggaggactggctgaccgccaagctggcctacgagggcctgagcaagacctacctgtccaagacactggcccagtacacctccaagacatgcagcaactgtgggtttaccatcaccagcgccgactacgacagggtgctggagaagctgaagaagacagcaacaggctggatgaccacaattaacggcaaggagctgaaggtggagggccagattacctactacaacagatacaagagacagaacgtagtcaaggacctgtccgtcgagctggatagactgagcgaagaatctgtgaacaacgacatctcctcctggacaaagggcagaagcggagaagctctgagcctcctgaagaaaagattctcccatagacccgtgcaggagaagttcgtgtgcctgaactgcggcttcgagacacacgcagccgagcaagccgccctgaacatcgccagatcctggctgttcctgcggagccaggagtacaagaaataccagacaaacaagacaaccggcaacaccgataagagagccttcgtcgagacctggcagtccttttaccggaagaagcttaaggaggtgtggaaacctgccgtgcggtctggcggatctggcggaggctcctctgctgaccttcgaggacgtggccgtgttcttcagcgaggaggagtggaagctgctgaaccccacccagaagatcctgtacagcgacgtgatgcaggagaactacgagaccgtgatcagcctgggcctgaagctgaagaacgacaccggcaacgaccagcccatcagcctgagcaccctggagctgcaggccagcggctgcaaggtgctgaggaaggccagggtgaaggtggcccagaagaccggatctggctccggcagcggccccaagaaaaagagaaaagtctaagctgccttctgcggggcttgccttctggccatgcccttcttctctcccttgcacctgtacctcttggtctttgaataaagcctgagtaggaaggctagcaaaaaaaaaaaaaaaaaaaaaaaaaaaaaaaaaaaaaaaaaaaaaaaaaaaaaaaaaaaaaaaaaaaaaaaaaaaaaaaa

SEQ ID NO: 16843 - RNA, 9485 nt, synthetic construct
  source 1..9485: mol_type = other RNA
aggaaataagagagaaaagaagagtaagaagaaatataagagccaccatggcccctaagaagaagcgtaaagtgagccggatggaacgcctcgtctacgaggtgcggcagaagtgcagaaacatcgaggacatctgcatctcctgcggatctctgaacgtgaccctggagcacccactgttcatcggcggcatgtgccagaactgtaaaaactgttttctggagtgtgcctatcaatacgacgatgacggctaccagagctactgcaccatctgttgcggcggaagagaggtgctgatgtgtggaaataacaactgctgccggtgcttctgcgtggaatgcgtggacctgctggtgggccccggcgccgcccaggccgctattaaggaagatccttggaactgctacatgtgcggccacaagggcacatacggcctgctgagacggagagaggactggcctagcagactgcagatgttcttcgccaataaccacgaccaggagttcgacccccctaaggtgtaccctcccgtccccgccgagaagagaaagcccatccgggtcctgagcctgttcgatggcatcgccaccggtctgctggtgctgaaggacctgggcatccaggtggataggtacattgcctccgaggtgtgcgaggactccatcaccgtgggaatggtgcgtcatcagggcaagatcatgtacgtgggcgacgtgcggagcgtgacacagaagcatatccaggagtggggccctttcgacctggtgatcggcggcagcccttgcaatgacctgagcatcgtgaacccagcccggaagggcctgtacgagggaaccggcagactgttcttcgagttttacagactgctgcacgacgcccggcctaaggaaggcgacgaccggcccttcttttggctgttcgagaatgtggtggccatgggagtcagcgacaagcgggatattagccggttcctggagagcaaccccgtgatgatcgatgccaaggaagtgagcgccgcccaccgggccagatacttctggggcaatctgcctggcatgaacagacccctggccagcaccgtgaacgacaagctggagctgcaggagtgcctggagcacggccggatcgccaagttcagcaaggtgagaaccatcaccacccgaagcaacagcatcaaacaaggcaaggaccagcactttcctgtgttcatgaacgagaaggaggacatcctgtggtgtaccgagatggagagagtgttcgggttcccagtccactacacagatgtcagcaacatgtctagactggccagacagagactgctgggaagaagctggtccgtccctgtgatcagacacctgttcgcccctctgaaggagtacttcgcctgcgtgagcagcggcaacagcaacgccaacagccggggccccagcttctctagcggcctggtgccactgtccctgagagggagccacatgggccccatggagatctacaaaaccgtgagcgcctggaagcggcagcctgtgcgcgtgctgagcctgtttcggaatatcgataaagtcctgaaaagcctgggattcctggagagcggctctggctccggcggtggcaccctgaagtacgtggaggatgtgacaaacgtggtcagacgggatgtggagaagtggggccccttcgatctggtgtacggcagcacccaacccctgggcagctcttgtgaccggtgccctggctggtacatgtttcagttccaccggatcctgcagtacgccctgccgagacaggagtcccagcggccattcttttggattttcatggacaacttgctgctgaccgaggatgaccaggaaactaccactcggttcctgcagaccgaagccgtgaccctgcaggacgtgagaggccgggactaccagaacgccatgcgggtgtggtccaacatccctggactgaaaagcaagcacgcacctctgacccctaaagaagaggagtacctgcaggcccaggtgcggagcagaagcaagctggacgcccctaaggtggatctgctggtgaagaattgcctcctgcccctgagagagtacttcaagtatttcagccagaatagtctgcccctgggaggcagcggcggcggcgccctggtgacatttgaggacgtcgccgtgcggttcacccaggaggaatgggctctgctggatccttctcagaaaatcctgtaccgggacgtgatgagagagacataccggaatctgacctccgtgggcatcaactgggaatgttgggaccttgaagcctgcttcagaagcctgggaagaaacctgagagtgcaggtggtgaagagaaagtgcgagctgaccaacagcggcccctgcgccgagggcggcccaagcagcggcgcccctcctcccagcggcggcagcccagccggctccccaacctctaccgaggagggcacctctgagtccgccacccccgagagcggccctggcacctccaccgagcccagcgagggcagcgcacccggcagccctgccggcagccccacctccacagaggagggaaccagcaccgagcccagcgaaggcagcgccccaggcaccagcaccgagcctagtgagcaggagattaaacggatcaacaagatcagaagaagacttgtgaaagacagcaacaccaagaaggccggcaagacaggccccatgaaaaccctgctggttagagtgatgacacccgatctgagagagcggctggaaaacctgagaaagaagcctgaaaatatcccccagcccatcagcaatacatctagagccaacctgaataagctgctgaccgattacaccgaaatgaagaaggcgatcctgcatgtgtactgggaagagttccagaaggaccctgtgggcctgatgagccgggtggcccagcctgccagcaagaagatcgatcagaacaagctgaaacctgagatggacgagaagggcaacctgaccaccgccggctttgcctgctctcagtgtggccagcccctgttcgtgtacaagctggagcaggtgtctgagaagggcaaggcttacaccaactacttcggacggtgcaatgtggccgagcacgaaaagctgatcctgctggcccagctgaagcccgagaaggatagcgacgaagccgtgacatatagcctgggaaagtttgggcagagggccctggatttctacagcattcatgtgaccaaggagtccacccaccccgtgaagcccctggcccagatcgccggaaacagatacgcctccggacctgtgggaaaggccctgagcgacgcatgtatgggcacaatcgcctccttcctgtctaagtaccaggacatcatcatcgaacaccagaaggtggtgaagggcaaccagaagagactggagagcctgcgggagctggccggcaaggaaaacctggaataccctagcgtgaccctgccacctcagcctcacaccaaggagggcgttgatgcctacaacgaagtgatcgcccgggtgcgaatgtgggtgaacctgaacctgtggcagaagctgaagctaagcagagatgatgccaagcctctgctgagactgaagggattcccttcctttcctctggtcgagagacaggccaacgaagtggactggtgggacatggtgtgtaacgtgaagaagctgatcaacgagaaaaaggaggatggcaaggtgttttggcagaatctggctggctacaagagacaggaagccctgagaccatacctgagcagcgaggaagatcggaagaagggaaagaaattcgctcggtaccagctgggcgacctgctgctgcacctggaaaagaagcacggcgaggactggggaaaggtgtacgacgaggcctgggagcggattgacaagaaagtggaaggcctgagcaagcacatcaagctggaagaggaacggagaagcgaggacgcccagagcaaggccgccctgaccgactggctgcgggctaaggccagcttcgtgatcgagggcctgaaggaggccgacaaggacgagttctgcagatgcgagctgaagctgcagaagtggtacggggacctgcggggaaagcccttcgccatcgaagccgagaacagcatcctggacatcagcggcttcagcaagcagtacaactgtgccttcatctggcagaaggacggcgtgaagaagctgaacctgtacctgatcatcaactacttcaagggcggcaagctgcggttcaagaagatcaaacctgaagccttcgaagccaacagattctacaccgtgatcaacaaaaagagcggcgagatcgtgcccatggaggtgaacttcaacttcgacgaccccaacctgatcatcctgcctctggcctttggcaagagacagggcagagaattcatctggaacgacctgctgtccctggaaaccggcagcctgaagctggccaacggaagagtgatcgagaagacactgtacaacagaagaacccggcaggatgagcctgccctgttcgtggccctgaccttcgagcggcgggaggtcctggactcctccaatatcaaaccaatgaacctgatcggcgtggcaagaggcgaaaacatccccgccgtgatcgccctgaccgaccccgagggctgcccactgagccggtttaaggatagcctgggaaacccaacccacatcctgagaatcggcgagagctataaggagaagcagcggaccatccaggccaagaaggaggtggagcagcggagagccggcggctacagccggaagtacgccagcaaagccaagaatctggcagacgatatggtgagaaacaccgctagagatctgctgtactacgccgtgacccaggatgccatgctgatcttcgccaacctgagccggggcttcggccggcagggcaagcggaccttcatggccgagagacagtacacacggatggaggactggctgaccgccaagctggcctacgagggcctgagcaagacctacctgtccaagacactggcccagtacacctccaagacatgcagcaactgtgggtttaccatcaccagcgccgactacgacagggtgctggagaagctgaagaagacagcaacaggctggatgaccacaattaacggcaaggagctgaaggtggagggccagattacctactacaacagatacaagagacagaacgtagtcaaggacctgtccgtcgagctggatagactgagcgaagaatctgtgaacaacgacatctcctcctggacaaagggcagaagcggagaagctctgagcctcctgaagaaaagattctcccatagacccgtgcaggagaagttcgtgtgcctgaactgcggcttcgagacacacgcagccgagcaagccgccctgaacatcgccagatcctggctgttcctgcggagccaggagtacaagaaataccagacaaacaagacaaccggcaacaccgataagagagccttcgtcgagacctggcagtccttttaccggaagaagcttaaggaggtgtggaaacctgccgtgcggtctggcggatctggcggaggctcctggaaggagctgctgagcttcgaggacgtggccctgttcttcaccagggaggagtggaaccagctggactgggcccagaaggacctgtacagggacgtgatgctggagaactacaggaacctgatcctgctgggcttccagttccccaagcccgaggtgatctgccagctggagcagtgggaggagccctggatcctggacctgcccagggccggcaccaggaaggccagcggcagcgcctgcggcggcccaagcagcggcgcccctcctcccagcggcggcagcccagccggctccccaacctctaccgaggagggcacctctgagtccgccacccccgagagcggccctggcacctccaccgagcccagcgagggcagcgcacccggcagccctgccggcagccccacctccacagaggagggaaccagcaccgagcccagcgaaggcagcgccccaggcaccagcaccgagcctagtgagcaggagattaaacggatcaacaagatcagaagaagacttgtgaaagacagcaacaccaagaaggccggcaagacaggccccatgaaaaccctgctggttagagtgatgacacccgatctgagagagcggctggaaaacctgagaaagaagcctgaaaatatcccccagcccatcagcaatacatctagagccaacctgaataagctgctgaccgattacaccgaaatgaagaaggcgatcctgcatgtgtactgggaagagttccagaaggaccctgtgggcctgatgagccgggtggcccagcctgccagcaagaagatcgatcagaacaagctgaaacctgagatggacgagaagggcaacctgaccaccgccggctttgcctgctctcagtgtggccagcccctgttcgtgtacaagctggagcaggtgtctgagaagggcaaggcttacaccaactacttcggacggtgcaatgtggccgagcacgaaaagctgatcctgctggcccagctgaagcccgagaaggatagcgacgaagccgtgacatatagcctgggaaagtttgggcagagggccctggatttctacagcattcatgtgaccaaggagtccacccaccccgtgaagcccctggcccagatcgccggaaacagatacgcctccggacctgtgggaaaggccctgagcgacgcatgtatgggcacaatcgcctccttcctgtctaagtaccaggacatcatcatcgaacaccagaaggtggtgaagggcaaccagaagagactggagagcctgcgggagctggccggcaaggaaaacctggaataccctagcgtgaccctgccacctcagcctcacaccaaggagggcgttgatgcctacaacgaagtgatcgcccgggtgcgaatgtgggtgaacctgaacctgtggcagaagctgaagctaagcagagatgatgccaagcctctgctgagactgaagggattcccttcctttcctctggtcgagagacaggccaacgaagtggactggtgggacatggtgtgtaacgtgaagaagctgatcaacgagaaaaaggaggatggcaaggtgttttggcagaatctggctggctacaagagacaggaagccctgagaccatacctgagcagcgaggaagatcggaagaagggaaagaaattcgctcggtaccagctgggcgacctgctgctgcacctggaaaagaagcacggcgaggactggggaaaggtgtacgacgaggcctgggagcggattgacaagaaagtggaaggcctgagcaagcacatcaagctggaagaggaacggagaagcgaggacgcccagagcaaggccgccctgaccgactggctgcgggctaaggccagcttcgtgatcgagggcctgaaggaggccgacaaggacgagttctgcagatgcgagctgaagctgcagaagtggtacggggacctgcggggaaagcccttcgccatcgaagccgagaacagcatcctggacatcagcggcttcagcaagcagtacaactgtgccttcatctggcagaaggacggcgtgaagaagctgaacctgtacctgatcatcaactacttcaagggcggcaagctgcggttcaagaagatcaaacctgaagccttcgaagccaacagattctacaccgtgatcaacaaaaagagcggcgagatcgtgcccatggaggtgaacttcaacttcgacgaccccaacctgatcatcctgcctctggcctttggcaagagacagggcagagaattcatctggaacgacctgctgtccctggaaaccggcagcctgaagctggccaacggaagagtgatcgagaagacactgtacaacagaagaacccggcaggatgagcctgccctgttcgtggccctgaccttcgagcggcgggaggtcctggactcctccaatatcaaaccaatgaacctgatcggcgtggcaagaggcgaaaacatccccgccgtgatcgccctgaccgaccccgagggctgcccactgagccggtttaaggatagcctgggaaacccaacccacatcctgagaatcggcgagagctataaggagaagcagcggaccatccaggccaagaaggaggtggagcagcggagagccggcggctacagccggaagtacgccagcaaagccaagaatctggcagacgatatggtgagaaacaccgctagagatctgctgtactacgccgtgacccaggatgccatgctgatcttcgccaacctgagccggggcttcggccggcagggcaagcggaccttcatggccgagagacagtacacacggatggaggactggctgaccgccaagctggcctacgagggcctgagcaagacctacctgtccaagacactggcccagtacacctccaagacatgcagcaactgtgggtttaccatcaccagcgccgactacgacagggtgctggagaagctgaagaagacagcaacaggctggatgaccacaattaacggcaaggagctgaaggtggagggccagattacctactacaacagatacaagagacagaacgtagtcaaggacctgtccgtcgagctggatagactgagcgaagaatctgtgaacaacgacatctcctcctggacaaagggcagaagcggagaagctctgagcctcctgaagaaaagattctcccatagacccgtgcaggagaagttcgtgtgcctgaactgcggcttcgagacacacgcagccgagcaagccgccctgaacatcgccagatcctggctgttcctgcggagccaggagtacaagaaataccagacaaacaagacaaccggcaacaccgataagagagccttcgtcgagacctggcagtccttttaccggaagaagcttaaggaggtgtggaaacctgccgtgcggtctggcggatctggcggaggctccttggaaggagctgctgagcttcgaggacgtggccctgttcttcaccagggaggagtggaaccagctggactgggcccagaaggacctgtacagggacgtgatgctggagaactacaggaacctgatcctgctgggcttccagttccccaagcccgaggtgatctgccagctggagcagtgggaggagccctggatcctggacctgcccagggccggcaccaggaaggccagcggcagcgcctgcggatctggctccggcagcggccccaagaaaaagagaaaagtctaagctgccttctgcggggcttgccttctggccatgcccttcttctctcccttgcacctgtacctcttggtctttgaataaagcctgagtaggaaggctagcaaaaaaaaaaaaaaaaaaaaaaaaaaaaaaaaaaaaaaaaaaaaaaaaaaaaaaaaaaaaaaaaaaaaaaaaaaaaaaaa

SEQ ID NO: 16844 - RNA, 9485 nt, synthetic construct
  source 1..9485: mol_type = other RNA
aggaaataagagagaaaagaagagtaagaagaaatataagagccaccatggcccctaagaagaagcgtaaagtgagccggatggaacgcctcgtctacgaggtgcggcagaagtgcagaaacatcgaggacatctgcatctcctgcggatctctgaacgtgaccctggagcacccactgttcatcggcggcatgtgccagaactgtaaaaactgttttctggagtgtgcctatcaatacgacgatgacggctaccagagctactgcaccatctgttgcggcggaagagaggtgctgatgtgtggaaataacaactgctgccggtgcttctgcgtggaatgcgtggacctgctggtgggccccggcgccgcccaggccgctattaaggaagatccttggaactgctacatgtgcggccacaagggcacatacggcctgctgagacggagagaggactggcctagcagactgcagatgttcttcgccaataaccacgaccaggagttcgacccccctaaggtgtaccctcccgtccccgccgagaagagaaagcccatccgggtcctgagcctgttcgatggcatcgccaccggtctgctggtgctgaaggacctgggcatccaggtggataggtacattgcctccgaggtgtgcgaggactccatcaccgtgggaatggtgcgtcatcagggcaagatcatgtacgtgggcgacgtgcggagcgtgacacagaagcatatccaggagtggggccctttcgacctggtgatcggcggcagcccttgcaatgacctgagcatcgtgaacccagcccggaagggcctgtacgagggaaccggcagactgttcttcgagttttacagactgctgcacgacgcccggcctaaggaaggcgacgaccggcccttcttttggctgttcgagaatgtggtggccatgggagtcagcgacaagcgggatattagccggttcctggagagcaaccccgtgatgatcgatgccaaggaagtgagcgccgcccaccgggccagatacttctggggcaatctgcctggcatgaacagacccctggccagcaccgtgaacgacaagctggagctgcaggagtgcctggagcacggccggatcgccaagttcagcaaggtgagaaccatcaccacccgaagcaacagcatcaaacaaggcaaggaccagcactttcctgtgttcatgaacgagaaggaggacatcctgtggtgtaccgagatggagagagtgttcgggttcccagtccactacacagatgtcagcaacatgtctagactggccagacagagactgctgggaagaagctggtccgtccctgtgatcagacacctgttcgcccctctgaaggagtacttcgcctgcgtgagcagcggcaacagcaacgccaacagccggggccccagcttctctagcggcctggtgccactgtccctgagagggagccacatgggccccatggagatctacaaaaccgtgagcgcctggaagcggcagcctgtgcgcgtgctgagcctgtttcggaatatcgataaagtcctgaaaagcctgggattcctggagagcggctctggctccggcggtggcaccctgaagtacgtggaggatgtgacaaacgtggtcagacgggatgtggagaagtggggccccttcgatctggtgtacggcagcacccaacccctgggcagctcttgtgaccggtgccctggctggtacatgtttcagttccaccggatcctgcagtacgccctgccgagacaggagtcccagcggccattcttttggattttcatggacaacttgctgctgaccgaggatgaccaggaaactaccactcggttcctgcagaccgaagccgtgaccctgcaggacgtgagaggccgggactaccagaacgccatgcgggtgtggtccaacatccctggactgaaaagcaagcacgcacctctgacccctaaagaagaggagtacctgcaggcccaggtgcggagcagaagcaagctggacgcccctaaggtggatctgctggtgaagaattgcctcctgcccctgagagagtacttcaagtatttcagccagaatagtctgcccctgggaggcagcggcggcggcgccctggtgacatttgaggacgtcgccgtgcggttcacccaggaggaatgggctctgctggatccttctcagaaaatcctgtaccgggacgtgatgagagagacataccggaatctgacctccgtgggcatcaactgggaatgttgggaccttgaagcctgcttcagaagcctgggaagaaacctgagagtgcaggtggtgaagagaaagtgcgagctgaccaacagcggcccctgcgccgagggcggcccaagcagcggcgcccctcctcccagcggcggcagcccagccggctccccaacctctaccgaggagggcacctctgagtccgccacccccgagagcggccctggcacctccaccgagcccagcgagggcagcgcacccggcagccctgccggcagccccacctccacagaggagggaaccagcaccgagcccagcgaaggcagcgccccaggcaccagcaccgagcctagtgagcaggagattaaacggatcaacaagatcagaagaagacttgtgaaagacagcaacaccaagaaggccggcaagacaggccccatgaaaaccctgctggttagagtgatgacacccgatctgagagagcggctggaaaacctgagaaagaagcctgaaaatatcccccagcccatcagcaatacatctagagccaacctgaataagctgctgaccgattacaccgaaatgaagaaggcgatcctgcatgtgtactgggaagagttccagaaggaccctgtgggcctgatgagccgggtggcccagcctgccagcaagaagatcgatcagaacaagctgaaacctgagatggacgagaagggcaacctgaccaccgccggctttgcctgctctcagtgtggccagcccctgttcgtgtacaagctggagcaggtgtctgagaagggcaaggcttacaccaactacttcggacggtgcaatgtggccgagcacgaaaagctgatcctgctggcccagctgaagcccgagaaggatagcgacgaagccgtgacatatagcctgggaaagtttgggcagagggccctggatttctacagcattcatgtgaccaaggagtccacccaccccgtgaagcccctggcccagatcgccggaaacagatacgcctccggacctgtgggaaaggccctgagcgacgcatgtatgggcacaatcgcctccttcctgtctaagtaccaggacatcatcatcgaacaccagaaggtggtgaagggcaaccagaagagactggagagcctgcgggagctggccggcaaggaaaacctggaataccctagcgtgaccctgccacctcagcctcacaccaaggagggcgttgatgcctacaacgaagtgatcgcccgggtgcgaatgtgggtgaacctgaacctgtggcagaagctgaagctaagcagagatgatgccaagcctctgctgagactgaagggattcccttcctttcctctggtcgagagacaggccaacgaagtggactggtgggacatggtgtgtaacgtgaagaagctgatcaacgagaaaaaggaggatggcaaggtgttttggcagaatctggctggctacaagagacaggaagccctgagaccatacctgagcagcgaggaagatcggaagaagggaaagaaattcgctcggtaccagctgggcgacctgctgctgcacctggaaaagaagcacggcgaggactggggaaaggtgtacgacgaggcctgggagcggattgacaagaaagtggaaggcctgagcaagcacatcaagctggaagaggaacggagaagcgaggacgcccagagcaaggccgccctgaccgactggctgcgggctaaggccagcttcgtgatcgagggcctgaaggaggccgacaaggacgagttctgcagatgcgagctgaagctgcagaagtggtacggggacctgcggggaaagcccttcgccatcgaagccgagaacagcatcctggacatcagcggcttcagcaagcagtacaactgtgccttcatctggcagaaggacggcgtgaagaagctgaacctgtacctgatcatcaactacttcaagggcggcaagctgcggttcaagaagatcaaacctgaagccttcgaagccaacagattctacaccgtgatcaacaaaaagagcggcgagatcgtgcccatggaggtgaacttcaacttcgacgaccccaacctgatcatcctgcctctggcctttggcaagagacagggcagagaattcatctggaacgacctgctgtccctggaaaccggcagcctgaagctggccaacggaagagtgatcgagaagacactgtacaacagaagaacccggcaggatgagcctgccctgttcgtggccctgaccttcgagcggcgggaggtcctggactcctccaatatcaaaccaatgaacctgatcggcgtggcaagaggcgaaaacatccccgccgtgatcgccctgaccgaccccgagggctgcccactgagccggtttaaggatagcctgggaaacccaacccacatcctgagaatcggcgagagctataaggagaagcagcggaccatccaggccaagaaggaggtggagcagcggagagccggcggctacagccggaagtacgccagcaaagccaagaatctggcagacgatatggtgagaaacaccgctagagatctgctgtactacgccgtgacccaggatgccatgctgatcttcgccaacctgagccggggcttcggccggcagggcaagcggaccttcatggccgagagacagtacacacggatggaggactggctgaccgccaagctggcctacgagggcctgagcaagacctacctgtccaagacactggcccagtacacctccaagacatgcagcaactgtgggtttaccatcaccagcgccgactacgacagggtgctggagaagctgaagaagacagcaacaggctggatgaccacaattaacggcaaggagctgaaggtggagggccagattacctactacaacagatacaagagacagaacgtagtcaaggacctgtccgtcgagctggatagactgagcgaagaatctgtgaacaacgacatctcctcctggacaaagggcagaagcggagaagctctgagcctcctgaagaaaagattctcccatagacccgtgcaggagaagttcgtgtgcctgaactgcggcttcgagacacacgcagccgagcaagccgccctgaacatcgccagatcctggctgttcctgcggagccaggagtacaagaaataccagacaaacaagacaaccggcaacaccgataagagagccttcgtcgagacctggcagtccttttaccggaagaagcttaaggaggtgtggaaacctgccgtgcggtctggcggatctggcggaggctcccagggcctgctgaccttcggcgacgtggccatcgagttcagccaggaggagtggaggtgcctgagccacacccagagggagctgtacagggacgtgatgctggagaactacggccacctgctgttcctgggcctgatcgtgagcaagcccgacctggtgagcctgctggagcagaggaaggagccctgggacgtgaagaggaagaagaccgtggtgttcgaccccgccgtgagcagccacggcggcggcccaagcagcggcgcccctcctcccagcggcggcagcccagccggctccccaacctctaccgaggagggcacctctgagtccgccacccccgagagcggccctggcacctccaccgagcccagcgagggcagcgcacccggcagccctgccggcagccccacctccacagaggagggaaccagcaccgagcccagcgaaggcagcgccccaggcaccagcaccgagcctagtgagcaggagattaaacggatcaacaagatcagaagaagacttgtgaaagacagcaacaccaagaaggccggcaagacaggccccatgaaaaccctgctggttagagtgatgacacccgatctgagagagcggctggaaaacctgagaaagaagcctgaaaatatcccccagcccatcagcaatacatctagagccaacctgaataagctgctgaccgattacaccgaaatgaagaaggcgatcctgcatgtgtactgggaagagttccagaaggaccctgtgggcctgatgagccgggtggcccagcctgccagcaagaagatcgatcagaacaagctgaaacctgagatggacgagaagggcaacctgaccaccgccggctttgcctgctctcagtgtggccagcccctgttcgtgtacaagctggagcaggtgtctgagaagggcaaggcttacaccaactacttcggacggtgcaatgtggccgagcacgaaaagctgatcctgctggcccagctgaagcccgagaaggatagcgacgaagccgtgacatatagcctgggaaagtttgggcagagggccctggatttctacagcattcatgtgaccaaggagtccacccaccccgtgaagcccctggcccagatcgccggaaacagatacgcctccggacctgtgggaaaggccctgagcgacgcatgtatgggcacaatcgcctccttcctgtctaagtaccaggacatcatcatcgaacaccagaaggtggtgaagggcaaccagaagagactggagagcctgcgggagctggccggcaaggaaaacctggaataccctagcgtgaccctgccacctcagcctcacaccaaggagggcgttgatgcctacaacgaagtgatcgcccgggtgcgaatgtgggtgaacctgaacctgtggcagaagctgaagctaagcagagatgatgccaagcctctgctgagactgaagggattcccttcctttcctctggtcgagagacaggccaacgaagtggactggtgggacatggtgtgtaacgtgaagaagctgatcaacgagaaaaaggaggatggcaaggtgttttggcagaatctggctggctacaagagacaggaagccctgagaccatacctgagcagcgaggaagatcggaagaagggaaagaaattcgctcggtaccagctgggcgacctgctgctgcacctggaaaagaagcacggcgaggactggggaaaggtgtacgacgaggcctgggagcggattgacaagaaagtggaaggcctgagcaagcacatcaagctggaagaggaacggagaagcgaggacgcccagagcaaggccgccctgaccgactggctgcgggctaaggccagcttcgtgatcgagggcctgaaggaggccgacaaggacgagttctgcagatgcgagctgaagctgcagaagtggtacggggacctgcggggaaagcccttcgccatcgaagccgagaacagcatcctggacatcagcggcttcagcaagcagtacaactgtgccttcatctggcagaaggacggcgtgaagaagctgaacctgtacctgatcatcaactacttcaagggcggcaagctgcggttcaagaagatcaaacctgaagccttcgaagccaacagattctacaccgtgatcaacaaaaagagcggcgagatcgtgcccatggaggtgaacttcaacttcgacgaccccaacctgatcatcctgcctctggcctttggcaagagacagggcagagaattcatctggaacgacctgctgtccctggaaaccggcagcctgaagctggccaacggaagagtgatcgagaagacactgtacaacagaagaacccggcaggatgagcctgccctgttcgtggccctgaccttcgagcggcgggaggtcctggactcctccaatatcaaaccaatgaacctgatcggcgtggcaagaggcgaaaacatccccgccgtgatcgccctgaccgaccccgagggctgcccactgagccggtttaaggatagcctgggaaacccaacccacatcctgagaatcggcgagagctataaggagaagcagcggaccatccaggccaagaaggaggtggagcagcggagagccggcggctacagccggaagtacgccagcaaagccaagaatctggcagacgatatggtgagaaacaccgctagagatctgctgtactacgccgtgacccaggatgccatgctgatcttcgccaacctgagccggggcttcggccggcagggcaagcggaccttcatggccgagagacagtacacacggatggaggactggctgaccgccaagctggcctacgagggcctgagcaagacctacctgtccaagacactggcccagtacacctccaagacatgcagcaactgtgggtttaccatcaccagcgccgactacgacagggtgctggagaagctgaagaagacagcaacaggctggatgaccacaattaacggcaaggagctgaaggtggagggccagattacctactacaacagatacaagagacagaacgtagtcaaggacctgtccgtcgagctggatagactgagcgaagaatctgtgaacaacgacatctcctcctggacaaagggcagaagcggagaagctctgagcctcctgaagaaaagattctcccatagacccgtgcaggagaagttcgtgtgcctgaactgcggcttcgagacacacgcagccgagcaagccgccctgaacatcgccagatcctggctgttcctgcggagccaggagtacaagaaataccagacaaacaagacaaccggcaacaccgataagagagccttcgtcgagacctggcagtccttttaccggaagaagcttaaggaggtgtggaaacctgccgtgcggtctggcggatctggcggaggctcctcagggcctgctgaccttcggcgacgtggccatcgagttcagccaggaggagtggaggtgcctgagccacacccagagggagctgtacagggacgtgatgctggagaactacggccacctgctgttcctgggcctgatcgtgagcaagcccgacctggtgagcctgctggagcagaggaaggagccctgggacgtgaagaggaagaagaccgtggtgttcgaccccgccgtgagcagccacggcggatctggctccggcagcggccccaagaaaaagagaaaagtctaagctgccttctgcggggcttgccttctggccatgcccttcttctctcccttgcacctgtacctcttggtctttgaataaagcctgagtaggaaggctagcaaaaaaaaaaaaaaaaaaaaaaaaaaaaaaaaaaaaaaaaaaaaaaaaaaaaaaaaaaaaaaaaaaaaaaaaaaaaaaaa

SEQ ID NO: 16845 - RNA, 9485 nt, synthetic construct
  source 1..9485: mol_type = other RNA
aggaaataagagagaaaagaagagtaagaagaaatataagagccaccatggcccctaagaagaagcgtaaagtgagccggatggaacgcctcgtctacgaggtgcggcagaagtgcagaaacatcgaggacatctgcatctcctgcggatctctgaacgtgaccctggagcacccactgttcatcggcggcatgtgccagaactgtaaaaactgttttctggagtgtgcctatcaatacgacgatgacggctaccagagctactgcaccatctgttgcggcggaagagaggtgctgatgtgtggaaataacaactgctgccggtgcttctgcgtggaatgcgtggacctgctggtgggccccggcgccgcccaggccgctattaaggaagatccttggaactgctacatgtgcggccacaagggcacatacggcctgctgagacggagagaggactggcctagcagactgcagatgttcttcgccaataaccacgaccaggagttcgacccccctaaggtgtaccctcccgtccccgccgagaagagaaagcccatccgggtcctgagcctgttcgatggcatcgccaccggtctgctggtgctgaaggacctgggcatccaggtggataggtacattgcctccgaggtgtgcgaggactccatcaccgtgggaatggtgcgtcatcagggcaagatcatgtacgtgggcgacgtgcggagcgtgacacagaagcatatccaggagtggggccctttcgacctggtgatcggcggcagcccttgcaatgacctgagcatcgtgaacccagcccggaagggcctgtacgagggaaccggcagactgttcttcgagttttacagactgctgcacgacgcccggcctaaggaaggcgacgaccggcccttcttttggctgttcgagaatgtggtggccatgggagtcagcgacaagcgggatattagccggttcctggagagcaaccccgtgatgatcgatgccaaggaagtgagcgccgcccaccgggccagatacttctggggcaatctgcctggcatgaacagacccctggccagcaccgtgaacgacaagctggagctgcaggagtgcctggagcacggccggatcgccaagttcagcaaggtgagaaccatcaccacccgaagcaacagcatcaaacaaggcaaggaccagcactttcctgtgttcatgaacgagaaggaggacatcctgtggtgtaccgagatggagagagtgttcgggttcccagtccactacacagatgtcagcaacatgtctagactggccagacagagactgctgggaagaagctggtccgtccctgtgatcagacacctgttcgcccctctgaaggagtacttcgcctgcgtgagcagcggcaacagcaacgccaacagccggggccccagcttctctagcggcctggtgccactgtccctgagagggagccacatgggccccatggagatctacaaaaccgtgagcgcctggaagcggcagcctgtgcgcgtgctgagcctgtttcggaatatcgataaagtcctgaaaagcctgggattcctggagagcggctctggctccggcggtggcaccctgaagtacgtggaggatgtgacaaacgtggtcagacgggatgtggagaagtggggccccttcgatctggtgtacggcagcacccaacccctgggcagctcttgtgaccggtgccctggctggtacatgtttcagttccaccggatcctgcagtacgccctgccgagacaggagtcccagcggccattcttttggattttcatggacaacttgctgctgaccgaggatgaccaggaaactaccactcggttcctgcagaccgaagccgtgaccctgcaggacgtgagaggccgggactaccagaacgccatgcgggtgtggtccaacatccctggactgaaaagcaagcacgcacctctgacccctaaagaagaggagtacctgcaggcccaggtgcggagcagaagcaagctggacgcccctaaggtggatctgctggtgaagaattgcctcctgcccctgagagagtacttcaagtatttcagccagaatagtctgcccctgggaggcagcggcggcggcgccctggtgacatttgaggacgtcgccgtgcggttcacccaggaggaatgggctctgctggatccttctcagaaaatcctgtaccgggacgtgatgagagagacataccggaatctgacctccgtgggcatcaactgggaatgttgggaccttgaagcctgcttcagaagcctgggaagaaacctgagagtgcaggtggtgaagagaaagtgcgagctgaccaacagcggcccctgcgccgagggcggcccaagcagcggcgcccctcctcccagcggcggcagcccagccggctccccaacctctaccgaggagggcacctctgagtccgccacccccgagagcggccctggcacctccaccgagcccagcgagggcagcgcacccggcagccctgccggcagccccacctccacagaggagggaaccagcaccgagcccagcgaaggcagcgccccaggcaccagcaccgagcctagtgagcaggagattaaacggatcaacaagatcagaagaagacttgtgaaagacagcaacaccaagaaggccggcaagacaggccccatgaaaaccctgctggttagagtgatgacacccgatctgagagagcggctggaaaacctgagaaagaagcctgaaaatatcccccagcccatcagcaatacatctagagccaacctgaataagctgctgaccgattacaccgaaatgaagaaggcgatcctgcatgtgtactgggaagagttccagaaggaccctgtgggcctgatgagccgggtggcccagcctgccagcaagaagatcgatcagaacaagctgaaacctgagatggacgagaagggcaacctgaccaccgccggctttgcctgctctcagtgtggccagcccctgttcgtgtacaagctggagcaggtgtctgagaagggcaaggcttacaccaactacttcggacggtgcaatgtggccgagcacgaaaagctgatcctgctggcccagctgaagcccgagaaggatagcgacgaagccgtgacatatagcctgggaaagtttgggcagagggccctggatttctacagcattcatgtgaccaaggagtccacccaccccgtgaagcccctggcccagatcgccggaaacagatacgcctccggacctgtgggaaaggccctgagcgacgcatgtatgggcacaatcgcctccttcctgtctaagtaccaggacatcatcatcgaacaccagaaggtggtgaagggcaaccagaagagactggagagcctgcgggagctggccggcaaggaaaacctggaataccctagcgtgaccctgccacctcagcctcacaccaaggagggcgttgatgcctacaacgaagtgatcgcccgggtgcgaatgtgggtgaacctgaacctgtggcagaagctgaagctaagcagagatgatgccaagcctctgctgagactgaagggattcccttcctttcctctggtcgagagacaggccaacgaagtggactggtgggacatggtgtgtaacgtgaagaagctgatcaacgagaaaaaggaggatggcaaggtgttttggcagaatctggctggctacaagagacaggaagccctgagaccatacctgagcagcgaggaagatcggaagaagggaaagaaattcgctcggtaccagctgggcgacctgctgctgcacctggaaaagaagcacggcgaggactggggaaaggtgtacgacgaggcctgggagcggattgacaagaaagtggaaggcctgagcaagcacatcaagctggaagaggaacggagaagcgaggacgcccagagcaaggccgccctgaccgactggctgcgggctaaggccagcttcgtgatcgagggcctgaaggaggccgacaaggacgagttctgcagatgcgagctgaagctgcagaagtggtacggggacctgcggggaaagcccttcgccatcgaagccgagaacagcatcctggacatcagcggcttcagcaagcagtacaactgtgccttcatctggcagaaggacggcgtgaagaagctgaacctgtacctgatcatcaactacttcaagggcggcaagctgcggttcaagaagatcaaacctgaagccttcgaagccaacagattctacaccgtgatcaacaaaaagagcggcgagatcgtgcccatggaggtgaacttcaacttcgacgaccccaacctgatcatcctgcctctggcctttggcaagagacagggcagagaattcatctggaacgacctgctgtccctggaaaccggcagcctgaagctggccaacggaagagtgatcgagaagacactgtacaacagaagaacccggcaggatgagcctgccctgttcgtggccctgaccttcgagcggcgggaggtcctggactcctccaatatcaaaccaatgaacctgatcggcgtggcaagaggcgaaaacatccccgccgtgatcgccctgaccgaccccgagggctgcccactgagccggtttaaggatagcctgggaaacccaacccacatcctgagaatcggcgagagctataaggagaagcagcggaccatccaggccaagaaggaggtggagcagcggagagccggcggctacagccggaagtacgccagcaaagccaagaatctggcagacgatatggtgagaaacaccgctagagatctgctgtactacgccgtgacccaggatgccatgctgatcttcgccaacctgagccggggcttcggccggcagggcaagcggaccttcatggccgagagacagtacacacggatggaggactggctgaccgccaagctggcctacgagggcctgagcaagacctacctgtccaagacactggcccagtacacctccaagacatgcagcaactgtgggtttaccatcaccagcgccgactacgacagggtgctggagaagctgaagaagacagcaacaggctggatgaccacaattaacggcaaggagctgaaggtggagggccagattacctactacaacagatacaagagacagaacgtagtcaaggacctgtccgtcgagctggatagactgagcgaagaatctgtgaacaacgacatctcctcctggacaaagggcagaagcggagaagctctgagcctcctgaagaaaagattctcccatagacccgtgcaggagaagttcgtgtgcctgaactgcggcttcgagacacacgcagccgagcaagccgccctgaacatcgccagatcctggctgttcctgcggagccaggagtacaagaaataccagacaaacaagacaaccggcaacaccgataagagagccttcgtcgagacctggcagtccttttaccggaagaagcttaaggaggtgtggaaacctgccgtgcggtctggcggatctggcggaggctccgccaggggcctgatggccttcgaggacgtggccgtgtacttcagccaggaggagtggatgttcctgaacgccgcccagagggccctgtacaggcacgtgatgctggagaacttcgccctggtggacagcatcggccccagcgtgagcaggcccagggtgatcatccagctgcagaggggcgaggagccctgggtgcccaacaggaccatcgccggccccggcaggggcacccacaggaggagcggcggcccaagcagcggcgcccctcctcccagcggcggcagcccagccggctccccaacctctaccgaggagggcacctctgagtccgccacccccgagagcggccctggcacctccaccgagcccagcgagggcagcgcacccggcagccctgccggcagccccacctccacagaggagggaaccagcaccgagcccagcgaaggcagcgccccaggcaccagcaccgagcctagtgagcaggagattaaacggatcaacaagatcagaagaagacttgtgaaagacagcaacaccaagaaggccggcaagacaggccccatgaaaaccctgctggttagagtgatgacacccgatctgagagagcggctggaaaacctgagaaagaagcctgaaaatatcccccagcccatcagcaatacatctagagccaacctgaataagctgctgaccgattacaccgaaatgaagaaggcgatcctgcatgtgtactgggaagagttccagaaggaccctgtgggcctgatgagccgggtggcccagcctgccagcaagaagatcgatcagaacaagctgaaacctgagatggacgagaagggcaacctgaccaccgccggctttgcctgctctcagtgtggccagcccctgttcgtgtacaagctggagcaggtgtctgagaagggcaaggcttacaccaactacttcggacggtgcaatgtggccgagcacgaaaagctgatcctgctggcccagctgaagcccgagaaggatagcgacgaagccgtgacatatagcctgggaaagtttgggcagagggccctggatttctacagcattcatgtgaccaaggagtccacccaccccgtgaagcccctggcccagatcgccggaaacagatacgcctccggacctgtgggaaaggccctgagcgacgcatgtatgggcacaatcgcctccttcctgtctaagtaccaggacatcatcatcgaacaccagaaggtggtgaagggcaaccagaagagactggagagcctgcgggagctggccggcaaggaaaacctggaataccctagcgtgaccctgccacctcagcctcacaccaaggagggcgttgatgcctacaacgaagtgatcgcccgggtgcgaatgtgggtgaacctgaacctgtggcagaagctgaagctaagcagagatgatgccaagcctctgctgagactgaagggattcccttcctttcctctggtcgagagacaggccaacgaagtggactggtgggacatggtgtgtaacgtgaagaagctgatcaacgagaaaaaggaggatggcaaggtgttttggcagaatctggctggctacaagagacaggaagccctgagaccatacctgagcagcgaggaagatcggaagaagggaaagaaattcgctcggtaccagctgggcgacctgctgctgcacctggaaaagaagcacggcgaggactggggaaaggtgtacgacgaggcctgggagcggattgacaagaaagtggaaggcctgagcaagcacatcaagctggaagaggaacggagaagcgaggacgcccagagcaaggccgccctgaccgactggctgcgggctaaggccagcttcgtgatcgagggcctgaaggaggccgacaaggacgagttctgcagatgcgagctgaagctgcagaagtggtacggggacctgcggggaaagcccttcgccatcgaagccgagaacagcatcctggacatcagcggcttcagcaagcagtacaactgtgccttcatctggcagaaggacggcgtgaagaagctgaacctgtacctgatcatcaactacttcaagggcggcaagctgcggttcaagaagatcaaacctgaagccttcgaagccaacagattctacaccgtgatcaacaaaaagagcggcgagatcgtgcccatggaggtgaacttcaacttcgacgaccccaacctgatcatcctgcctctggcctttggcaagagacagggcagagaattcatctggaacgacctgctgtccctggaaaccggcagcctgaagctggccaacggaagagtgatcgagaagacactgtacaacagaagaacccggcaggatgagcctgccctgttcgtggccctgaccttcgagcggcgggaggtcctggactcctccaatatcaaaccaatgaacctgatcggcgtggcaagaggcgaaaacatccccgccgtgatcgccctgaccgaccccgagggctgcccactgagccggtttaaggatagcctgggaaacccaacccacatcctgagaatcggcgagagctataaggagaagcagcggaccatccaggccaagaaggaggtggagcagcggagagccggcggctacagccggaagtacgccagcaaagccaagaatctggcagacgatatggtgagaaacaccgctagagatctgctgtactacgccgtgacccaggatgccatgctgatcttcgccaacctgagccggggcttcggccggcagggcaagcggaccttcatggccgagagacagtacacacggatggaggactggctgaccgccaagctggcctacgagggcctgagcaagacctacctgtccaagacactggcccagtacacctccaagacatgcagcaactgtgggtttaccatcaccagcgccgactacgacagggtgctggagaagctgaagaagacagcaacaggctggatgaccacaattaacggcaaggagctgaaggtggagggccagattacctactacaacagatacaagagacagaacgtagtcaaggacctgtccgtcgagctggatagactgagcgaagaatctgtgaacaacgacatctcctcctggacaaagggcagaagcggagaagctctgagcctcctgaagaaaagattctcccatagacccgtgcaggagaagttcgtgtgcctgaactgcggcttcgagacacacgcagccgagcaagccgccctgaacatcgccagatcctggctgttcctgcggagccaggagtacaagaaataccagacaaacaagacaaccggcaacaccgataagagagccttcgtcgagacctggcagtccttttaccggaagaagcttaaggaggtgtggaaacctgccgtgcggtctggcggatctggcggaggctcctgccaggggcctgatggccttcgaggacgtggccgtgtacttcagccaggaggagtggatgttcctgaacgccgcccagagggccctgtacaggcacgtgatgctggagaacttcgccctggtggacagcatcggccccagcgtgagcaggcccagggtgatcatccagctgcagaggggcgaggagccctgggtgcccaacaggaccatcgccggccccggcaggggcacccacaggaggagcggatctggctccggcagcggccccaagaaaaagagaaaagtctaagctgccttctgcggggcttgccttctggccatgcccttcttctctcccttgcacctgtacctcttggtctttgaataaagcctgagtaggaaggctagcaaaaaaaaaaaaaaaaaaaaaaaaaaaaaaaaaaaaaaaaaaaaaaaaaaaaaaaaaaaaaaaaaaaaaaaaaaaaaaaa

SEQ ID NO: 16846 - RNA, 9485 nt, synthetic construct
  source 1..9485: mol_type = other RNA
aggaaataagagagaaaagaagagtaagaagaaatataagagccaccatggcccctaagaagaagcgtaaagtgagccggatggaacgcctcgtctacgaggtgcggcagaagtgcagaaacatcgaggacatctgcatctcctgcggatctctgaacgtgaccctggagcacccactgttcatcggcggcatgtgccagaactgtaaaaactgttttctggagtgtgcctatcaatacgacgatgacggctaccagagctactgcaccatctgttgcggcggaagagaggtgctgatgtgtggaaataacaactgctgccggtgcttctgcgtggaatgcgtggacctgctggtgggccccggcgccgcccaggccgctattaaggaagatccttggaactgctacatgtgcggccacaagggcacatacggcctgctgagacggagagaggactggcctagcagactgcagatgttcttcgccaataaccacgaccaggagttcgacccccctaaggtgtaccctcccgtccccgccgagaagagaaagcccatccgggtcctgagcctgttcgatggcatcgccaccggtctgctggtgctgaaggacctgggcatccaggtggataggtacattgcctccgaggtgtgcgaggactccatcaccgtgggaatggtgcgtcatcagggcaagatcatgtacgtgggcgacgtgcggagcgtgacacagaagcatatccaggagtggggccctttcgacctggtgatcggcggcagcccttgcaatgacctgagcatcgtgaacccagcccggaagggcctgtacgagggaaccggcagactgttcttcgagttttacagactgctgcacgacgcccggcctaaggaaggcgacgaccggcccttcttttggctgttcgagaatgtggtggccatgggagtcagcgacaagcgggatattagccggttcctggagagcaaccccgtgatgatcgatgccaaggaagtgagcgccgcccaccgggccagatacttctggggcaatctgcctggcatgaacagacccctggccagcaccgtgaacgacaagctggagctgcaggagtgcctggagcacggccggatcgccaagttcagcaaggtgagaaccatcaccacccgaagcaacagcatcaaacaaggcaaggaccagcactttcctgtgttcatgaacgagaaggaggacatcctgtggtgtaccgagatggagagagtgttcgggttcccagtccactacacagatgtcagcaacatgtctagactggccagacagagactgctgggaagaagctggtccgtccctgtgatcagacacctgttcgcccctctgaaggagtacttcgcctgcgtgagcagcggcaacagcaacgccaacagccggggccccagcttctctagcggcctggtgccactgtccctgagagggagccacatgggccccatggagatctacaaaaccgtgagcgcctggaagcggcagcctgtgcgcgtgctgagcctgtttcggaatatcgataaagtcctgaaaagcctgggattcctggagagcggctctggctccggcggtggcaccctgaagtacgtggaggatgtgacaaacgtggtcagacgggatgtggagaagtggggccccttcgatctggtgtacggcagcacccaacccctgggcagctcttgtgaccggtgccctggctggtacatgtttcagttccaccggatcctgcagtacgccctgccgagacaggagtcccagcggccattcttttggattttcatggacaacttgctgctgaccgaggatgaccaggaaactaccactcggttcctgcagaccgaagccgtgaccctgcaggacgtgagaggccgggactaccagaacgccatgcgggtgtggtccaacatccctggactgaaaagcaagcacgcacctctgacccctaaagaagaggagtacctgcaggcccaggtgcggagcagaagcaagctggacgcccctaaggtggatctgctggtgaagaattgcctcctgcccctgagagagtacttcaagtatttcagccagaatagtctgcccctgggaggcagcggcggcggcgccctggtgacatttgaggacgtcgccgtgcggttcacccaggaggaatgggctctgctggatccttctcagaaaatcctgtaccgggacgtgatgagagagacataccggaatctgacctccgtgggcatcaactgggaatgttgggaccttgaagcctgcttcagaagcctgggaagaaacctgagagtgcaggtggtgaagagaaagtgcgagctgaccaacagcggcccctgcgccgagggcggcccaagcagcggcgcccctcctcccagcggcggcagcccagccggctccccaacctctaccgaggagggcacctctgagtccgccacccccgagagcggccctggcacctccaccgagcccagcgagggcagcgcacccggcagccctgccggcagccccacctccacagaggagggaaccagcaccgagcccagcgaaggcagcgccccaggcaccagcaccgagcctagtgagcaggagattaaacggatcaacaagatcagaagaagacttgtgaaagacagcaacaccaagaaggccggcaagacaggccccatgaaaaccctgctggttagagtgatgacacccgatctgagagagcggctggaaaacctgagaaagaagcctgaaaatatcccccagcccatcagcaatacatctagagccaacctgaataagctgctgaccgattacaccgaaatgaagaaggcgatcctgcatgtgtactgggaagagttccagaaggaccctgtgggcctgatgagccgggtggcccagcctgccagcaagaagatcgatcagaacaagctgaaacctgagatggacgagaagggcaacctgaccaccgccggctttgcctgctctcagtgtggccagcccctgttcgtgtacaagctggagcaggtgtctgagaagggcaaggcttacaccaactacttcggacggtgcaatgtggccgagcacgaaaagctgatcctgctggcccagctgaagcccgagaaggatagcgacgaagccgtgacatatagcctgggaaagtttgggcagagggccctggatttctacagcattcatgtgaccaaggagtccacccaccccgtgaagcccctggcccagatcgccggaaacagatacgcctccggacctgtgggaaaggccctgagcgacgcatgtatgggcacaatcgcctccttcctgtctaagtaccaggacatcatcatcgaacaccagaaggtggtgaagggcaaccagaagagactggagagcctgcgggagctggccggcaaggaaaacctggaataccctagcgtgaccctgccacctcagcctcacaccaaggagggcgttgatgcctacaacgaagtgatcgcccgggtgcgaatgtgggtgaacctgaacctgtggcagaagctgaagctaagcagagatgatgccaagcctctgctgagactgaagggattcccttcctttcctctggtcgagagacaggccaacgaagtggactggtgggacatggtgtgtaacgtgaagaagctgatcaacgagaaaaaggaggatggcaaggtgttttggcagaatctggctggctacaagagacaggaagccctgagaccatacctgagcagcgaggaagatcggaagaagggaaagaaattcgctcggtaccagctgggcgacctgctgctgcacctggaaaagaagcacggcgaggactggggaaaggtgtacgacgaggcctgggagcggattgacaagaaagtggaaggcctgagcaagcacatcaagctggaagaggaacggagaagcgaggacgcccagagcaaggccgccctgaccgactggctgcgggctaaggccagcttcgtgatcgagggcctgaaggaggccgacaaggacgagttctgcagatgcgagctgaagctgcagaagtggtacggggacctgcggggaaagcccttcgccatcgaagccgagaacagcatcctggacatcagcggcttcagcaagcagtacaactgtgccttcatctggcagaaggacggcgtgaagaagctgaacctgtacctgatcatcaactacttcaagggcggcaagctgcggttcaagaagatcaaacctgaagccttcgaagccaacagattctacaccgtgatcaacaaaaagagcggcgagatcgtgcccatggaggtgaacttcaacttcgacgaccccaacctgatcatcctgcctctggcctttggcaagagacagggcagagaattcatctggaacgacctgctgtccctggaaaccggcagcctgaagctggccaacggaagagtgatcgagaagacactgtacaacagaagaacccggcaggatgagcctgccctgttcgtggccctgaccttcgagcggcgggaggtcctggactcctccaatatcaaaccaatgaacctgatcggcgtggcaagaggcgaaaacatccccgccgtgatcgccctgaccgaccccgagggctgcccactgagccggtttaaggatagcctgggaaacccaacccacatcctgagaatcggcgagagctataaggagaagcagcggaccatccaggccaagaaggaggtggagcagcggagagccggcggctacagccggaagtacgccagcaaagccaagaatctggcagacgatatggtgagaaacaccgctagagatctgctgtactacgccgtgacccaggatgccatgctgatcttcgccaacctgagccggggcttcggccggcagggcaagcggaccttcatggccgagagacagtacacacggatggaggactggctgaccgccaagctggcctacgagggcctgagcaagacctacctgtccaagacactggcccagtacacctccaagacatgcagcaactgtgggtttaccatcaccagcgccgactacgacagggtgctggagaagctgaagaagacagcaacaggctggatgaccacaattaacggcaaggagctgaaggtggagggccagattacctactacaacagatacaagagacagaacgtagtcaaggacctgtccgtcgagctggatagactgagcgaagaatctgtgaacaacgacatctcctcctggacaaagggcagaagcggagaagctctgagcctcctgaagaaaagattctcccatagacccgtgcaggagaagttcgtgtgcctgaactgcggcttcgagacacacgcagccgagcaagccgccctgaacatcgccagatcctggctgttcctgcggagccaggagtacaagaaataccagacaaacaagacaaccggcaacaccgataagagagccttcgtcgagacctggcagtccttttaccggaagaagcttaaggaggtgtggaaacctgccgtgcggtctggcggatctggcggaggctccgcccaggagagcatgaccttcagggacgtggccgtgttcttcagccaggacgagtggctgcacctggacagcgcccagagggccctgtacagggaggtgatgctggagaactacagcaccctggtgagcctgggcatccccttcagcatgcccaaggtgatccaccagctgcagcagggccaggacccctgcaccgtggagggcgacgtgcccagcaacacctgcctgggcttcaagacctggggcggcccaagcagcggcgcccctcctcccagcggcggcagcccagccggctccccaacctctaccgaggagggcacctctgagtccgccacccccgagagcggccctggcacctccaccgagcccagcgagggcagcgcacccggcagccctgccggcagccccacctccacagaggagggaaccagcaccgagcccagcgaaggcagcgccccaggcaccagcaccgagcctagtgagcaggagattaaacggatcaacaagatcagaagaagacttgtgaaagacagcaacaccaagaaggccggcaagacaggccccatgaaaaccctgctggttagagtgatgacacccgatctgagagagcggctggaaaacctgagaaagaagcctgaaaatatcccccagcccatcagcaatacatctagagccaacctgaataagctgctgaccgattacaccgaaatgaagaaggcgatcctgcatgtgtactgggaagagttccagaaggaccctgtgggcctgatgagccgggtggcccagcctgccagcaagaagatcgatcagaacaagctgaaacctgagatggacgagaagggcaacctgaccaccgccggctttgcctgctctcagtgtggccagcccctgttcgtgtacaagctggagcaggtgtctgagaagggcaaggcttacaccaactacttcggacggtgcaatgtggccgagcacgaaaagctgatcctgctggcccagctgaagcccgagaaggatagcgacgaagccgtgacatatagcctgggaaagtttgggcagagggccctggatttctacagcattcatgtgaccaaggagtccacccaccccgtgaagcccctggcccagatcgccggaaacagatacgcctccggacctgtgggaaaggccctgagcgacgcatgtatgggcacaatcgcctccttcctgtctaagtaccaggacatcatcatcgaacaccagaaggtggtgaagggcaaccagaagagactggagagcctgcgggagctggccggcaaggaaaacctggaataccctagcgtgaccctgccacctcagcctcacaccaaggagggcgttgatgcctacaacgaagtgatcgcccgggtgcgaatgtgggtgaacctgaacctgtggcagaagctgaagctaagcagagatgatgccaagcctctgctgagactgaagggattcccttcctttcctctggtcgagagacaggccaacgaagtggactggtgggacatggtgtgtaacgtgaagaagctgatcaacgagaaaaaggaggatggcaaggtgttttggcagaatctggctggctacaagagacaggaagccctgagaccatacctgagcagcgaggaagatcggaagaagggaaagaaattcgctcggtaccagctgggcgacctgctgctgcacctggaaaagaagcacggcgaggactggggaaaggtgtacgacgaggcctgggagcggattgacaagaaagtggaaggcctgagcaagcacatcaagctggaagaggaacggagaagcgaggacgcccagagcaaggccgccctgaccgactggctgcgggctaaggccagcttcgtgatcgagggcctgaaggaggccgacaaggacgagttctgcagatgcgagctgaagctgcagaagtggtacggggacctgcggggaaagcccttcgccatcgaagccgagaacagcatcctggacatcagcggcttcagcaagcagtacaactgtgccttcatctggcagaaggacggcgtgaagaagctgaacctgtacctgatcatcaactacttcaagggcggcaagctgcggttcaagaagatcaaacctgaagccttcgaagccaacagattctacaccgtgatcaacaaaaagagcggcgagatcgtgcccatggaggtgaacttcaacttcgacgaccccaacctgatcatcctgcctctggcctttggcaagagacagggcagagaattcatctggaacgacctgctgtccctggaaaccggcagcctgaagctggccaacggaagagtgatcgagaagacactgtacaacagaagaacccggcaggatgagcctgccctgttcgtggccctgaccttcgagcggcgggaggtcctggactcctccaatatcaaaccaatgaacctgatcggcgtggcaagaggcgaaaacatccccgccgtgatcgccctgaccgaccccgagggctgcccactgagccggtttaaggatagcctgggaaacccaacccacatcctgagaatcggcgagagctataaggagaagcagcggaccatccaggccaagaaggaggtggagcagcggagagccggcggctacagccggaagtacgccagcaaagccaagaatctggcagacgatatggtgagaaacaccgctagagatctgctgtactacgccgtgacccaggatgccatgctgatcttcgccaacctgagccggggcttcggccggcagggcaagcggaccttcatggccgagagacagtacacacggatggaggactggctgaccgccaagctggcctacgagggcctgagcaagacctacctgtccaagacactggcccagtacacctccaagacatgcagcaactgtgggtttaccatcaccagcgccgactacgacagggtgctggagaagctgaagaagacagcaacaggctggatgaccacaattaacggcaaggagctgaaggtggagggccagattacctactacaacagatacaagagacagaacgtagtcaaggacctgtccgtcgagctggatagactgagcgaagaatctgtgaacaacgacatctcctcctggacaaagggcagaagcggagaagctctgagcctcctgaagaaaagattctcccatagacccgtgcaggagaagttcgtgtgcctgaactgcggcttcgagacacacgcagccgagcaagccgccctgaacatcgccagatcctggctgttcctgcggagccaggagtacaagaaataccagacaaacaagacaaccggcaacaccgataagagagccttcgtcgagacctggcagtccttttaccggaagaagcttaaggaggtgtggaaacctgccgtgcggtctggcggatctggcggaggctcctgcccaggagagcatgaccttcagggacgtggccgtgttcttcagccaggacgagtggctgcacctggacagcgcccagagggccctgtacagggaggtgatgctggagaactacagcaccctggtgagcctgggcatccccttcagcatgcccaaggtgatccaccagctgcagcagggccaggacccctgcaccgtggagggcgacgtgcccagcaacacctgcctgggcttcaagacctggggatctggctccggcagcggccccaagaaaaagagaaaagtctaagctgccttctgcggggcttgccttctggccatgcccttcttctctcccttgcacctgtacctcttggtctttgaataaagcctgagtaggaaggctagcaaaaaaaaaaaaaaaaaaaaaaaaaaaaaaaaaaaaaaaaaaaaaaaaaaaaaaaaaaaaaaaaaaaaaaaaaaaaaaaa

SEQ ID NO: 16847 - RNA, 9485 nt, synthetic construct
  source 1..9485: mol_type = other RNA
aggaaataagagagaaaagaagagtaagaagaaatataagagccaccatggcccctaagaagaagcgtaaagtgagccggatggaacgcctcgtctacgaggtgcggcagaagtgcagaaacatcgaggacatctgcatctcctgcggatctctgaacgtgaccctggagcacccactgttcatcggcggcatgtgccagaactgtaaaaactgttttctggagtgtgcctatcaatacgacgatgacggctaccagagctactgcaccatctgttgcggcggaagagaggtgctgatgtgtggaaataacaactgctgccggtgcttctgcgtggaatgcgtggacctgctggtgggccccggcgccgcccaggccgctattaaggaagatccttggaactgctacatgtgcggccacaagggcacatacggcctgctgagacggagagaggactggcctagcagactgcagatgttcttcgccaataaccacgaccaggagttcgacccccctaaggtgtaccctcccgtccccgccgagaagagaaagcccatccgggtcctgagcctgttcgatggcatcgccaccggtctgctggtgctgaaggacctgggcatccaggtggataggtacattgcctccgaggtgtgcgaggactccatcaccgtgggaatggtgcgtcatcagggcaagatcatgtacgtgggcgacgtgcggagcgtgacacagaagcatatccaggagtggggccctttcgacctggtgatcggcggcagcccttgcaatgacctgagcatcgtgaacccagcccggaagggcctgtacgagggaaccggcagactgttcttcgagttttacagactgctgcacgacgcccggcctaaggaaggcgacgaccggcccttcttttggctgttcgagaatgtggtggccatgggagtcagcgacaagcgggatattagccggttcctggagagcaaccccgtgatgatcgatgccaaggaagtgagcgccgcccaccgggccagatacttctggggcaatctgcctggcatgaacagacccctggccagcaccgtgaacgacaagctggagctgcaggagtgcctggagcacggccggatcgccaagttcagcaaggtgagaaccatcaccacccgaagcaacagcatcaaacaaggcaaggaccagcactttcctgtgttcatgaacgagaaggaggacatcctgtggtgtaccgagatggagagagtgttcgggttcccagtccactacacagatgtcagcaacatgtctagactggccagacagagactgctgggaagaagctggtccgtccctgtgatcagacacctgttcgcccctctgaaggagtacttcgcctgcgtgagcagcggcaacagcaacgccaacagccggggccccagcttctctagcggcctggtgccactgtccctgagagggagccacatgggccccatggagatctacaaaaccgtgagcgcctggaagcggcagcctgtgcgcgtgctgagcctgtttcggaatatcgataaagtcctgaaaagcctgggattcctggagagcggctctggctccggcggtggcaccctgaagtacgtggaggatgtgacaaacgtggtcagacgggatgtggagaagtggggccccttcgatctggtgtacggcagcacccaacccctgggcagctcttgtgaccggtgccctggctggtacatgtttcagttccaccggatcctgcagtacgccctgccgagacaggagtcccagcggccattcttttggattttcatggacaacttgctgctgaccgaggatgaccaggaaactaccactcggttcctgcagaccgaagccgtgaccctgcaggacgtgagaggccgggactaccagaacgccatgcgggtgtggtccaacatccctggactgaaaagcaagcacgcacctctgacccctaaagaagaggagtacctgcaggcccaggtgcggagcagaagcaagctggacgcccctaaggtggatctgctggtgaagaattgcctcctgcccctgagagagtacttcaagtatttcagccagaatagtctgcccctgggaggcagcggcggcggcgccctggtgacatttgaggacgtcgccgtgcggttcacccaggaggaatgggctctgctggatccttctcagaaaatcctgtaccgggacgtgatgagagagacataccggaatctgacctccgtgggcatcaactgggaatgttgggaccttgaagcctgcttcagaagcctgggaagaaacctgagagtgcaggtggtgaagagaaagtgcgagctgaccaacagcggcccctgcgccgagggcggcccaagcagcggcgcccctcctcccagcggcggcagcccagccggctccccaacctctaccgaggagggcacctctgagtccgccacccccgagagcggccctggcacctccaccgagcccagcgagggcagcgcacccggcagccctgccggcagccccacctccacagaggagggaaccagcaccgagcccagcgaaggcagcgccccaggcaccagcaccgagcctagtgagcaggagattaaacggatcaacaagatcagaagaagacttgtgaaagacagcaacaccaagaaggccggcaagacaggccccatgaaaaccctgctggttagagtgatgacacccgatctgagagagcggctggaaaacctgagaaagaagcctgaaaatatcccccagcccatcagcaatacatctagagccaacctgaataagctgctgaccgattacaccgaaatgaagaaggcgatcctgcatgtgtactgggaagagttccagaaggaccctgtgggcctgatgagccgggtggcccagcctgccagcaagaagatcgatcagaacaagctgaaacctgagatggacgagaagggcaacctgaccaccgccggctttgcctgctctcagtgtggccagcccctgttcgtgtacaagctggagcaggtgtctgagaagggcaaggcttacaccaactacttcggacggtgcaatgtggccgagcacgaaaagctgatcctgctggcccagctgaagcccgagaaggatagcgacgaagccgtgacatatagcctgggaaagtttgggcagagggccctggatttctacagcattcatgtgaccaaggagtccacccaccccgtgaagcccctggcccagatcgccggaaacagatacgcctccggacctgtgggaaaggccctgagcgacgcatgtatgggcacaatcgcctccttcctgtctaagtaccaggacatcatcatcgaacaccagaaggtggtgaagggcaaccagaagagactggagagcctgcgggagctggccggcaaggaaaacctggaataccctagcgtgaccctgccacctcagcctcacaccaaggagggcgttgatgcctacaacgaagtgatcgcccgggtgcgaatgtgggtgaacctgaacctgtggcagaagctgaagctaagcagagatgatgccaagcctctgctgagactgaagggattcccttcctttcctctggtcgagagacaggccaacgaagtggactggtgggacatggtgtgtaacgtgaagaagctgatcaacgagaaaaaggaggatggcaaggtgttttggcagaatctggctggctacaagagacaggaagccctgagaccatacctgagcagcgaggaagatcggaagaagggaaagaaattcgctcggtaccagctgggcgacctgctgctgcacctggaaaagaagcacggcgaggactggggaaaggtgtacgacgaggcctgggagcggattgacaagaaagtggaaggcctgagcaagcacatcaagctggaagaggaacggagaagcgaggacgcccagagcaaggccgccctgaccgactggctgcgggctaaggccagcttcgtgatcgagggcctgaaggaggccgacaaggacgagttctgcagatgcgagctgaagctgcagaagtggtacggggacctgcggggaaagcccttcgccatcgaagccgagaacagcatcctggacatcagcggcttcagcaagcagtacaactgtgccttcatctggcagaaggacggcgtgaagaagctgaacctgtacctgatcatcaactacttcaagggcggcaagctgcggttcaagaagatcaaacctgaagccttcgaagccaacagattctacaccgtgatcaacaaaaagagcggcgagatcgtgcccatggaggtgaacttcaacttcgacgaccccaacctgatcatcctgcctctggcctttggcaagagacagggcagagaattcatctggaacgacctgctgtccctggaaaccggcagcctgaagctggccaacggaagagtgatcgagaagacactgtacaacagaagaacccggcaggatgagcctgccctgttcgtggccctgaccttcgagcggcgggaggtcctggactcctccaatatcaaaccaatgaacctgatcggcgtggcaagaggcgaaaacatccccgccgtgatcgccctgaccgaccccgagggctgcccactgagccggtttaaggatagcctgggaaacccaacccacatcctgagaatcggcgagagctataaggagaagcagcggaccatccaggccaagaaggaggtggagcagcggagagccggcggctacagccggaagtacgccagcaaagccaagaatctggcagacgatatggtgagaaacaccgctagagatctgctgtactacgccgtgacccaggatgccatgctgatcttcgccaacctgagccggggcttcggccggcagggcaagcggaccttcatggccgagagacagtacacacggatggaggactggctgaccgccaagctggcctacgagggcctgagcaagacctacctgtccaagacactggcccagtacacctccaagacatgcagcaactgtgggtttaccatcaccagcgccgactacgacagggtgctggagaagctgaagaagacagcaacaggctggatgaccacaattaacggcaaggagctgaaggtggagggccagattacctactacaacagatacaagagacagaacgtagtcaaggacctgtccgtcgagctggatagactgagcgaagaatctgtgaacaacgacatctcctcctggacaaagggcagaagcggagaagctctgagcctcctgaagaaaagattctcccatagacccgtgcaggagaagttcgtgtgcctgaactgcggcttcgagacacacgcagccgagcaagccgccctgaacatcgccagatcctggctgttcctgcggagccaggagtacaagaaataccagacaaacaagacaaccggcaacaccgataagagagccttcgtcgagacctggcagtccttttaccggaagaagcttaaggaggtgtggaaacctgccgtgcggtctggcggatctggcggaggctccccccagggctgcgccatcagcgaggacgtgttcgtgtacttcagcagggaggagtgggtgctgctggacgaggaccagaggctgctgtacagggacgtgatgctggagaacttcgccctgctggccagcctgggcatcaccagcagcaggagctacctggtgacccagctggagcagggcgaggagccctggatgcccgcccaggtggacatgaccgccgccaccgagaaggaggcccagaagggcggcccaagcagcggcgcccctcctcccagcggcggcagcccagccggctccccaacctctaccgaggagggcacctctgagtccgccacccccgagagcggccctggcacctccaccgagcccagcgagggcagcgcacccggcagccctgccggcagccccacctccacagaggagggaaccagcaccgagcccagcgaaggcagcgccccaggcaccagcaccgagcctagtgagcaggagattaaacggatcaacaagatcagaagaagacttgtgaaagacagcaacaccaagaaggccggcaagacaggccccatgaaaaccctgctggttagagtgatgacacccgatctgagagagcggctggaaaacctgagaaagaagcctgaaaatatcccccagcccatcagcaatacatctagagccaacctgaataagctgctgaccgattacaccgaaatgaagaaggcgatcctgcatgtgtactgggaagagttccagaaggaccctgtgggcctgatgagccgggtggcccagcctgccagcaagaagatcgatcagaacaagctgaaacctgagatggacgagaagggcaacctgaccaccgccggctttgcctgctctcagtgtggccagcccctgttcgtgtacaagctggagcaggtgtctgagaagggcaaggcttacaccaactacttcggacggtgcaatgtggccgagcacgaaaagctgatcctgctggcccagctgaagcccgagaaggatagcgacgaagccgtgacatatagcctgggaaagtttgggcagagggccctggatttctacagcattcatgtgaccaaggagtccacccaccccgtgaagcccctggcccagatcgccggaaacagatacgcctccggacctgtgggaaaggccctgagcgacgcatgtatgggcacaatcgcctccttcctgtctaagtaccaggacatcatcatcgaacaccagaaggtggtgaagggcaaccagaagagactggagagcctgcgggagctggccggcaaggaaaacctggaataccctagcgtgaccctgccacctcagcctcacaccaaggagggcgttgatgcctacaacgaagtgatcgcccgggtgcgaatgtgggtgaacctgaacctgtggcagaagctgaagctaagcagagatgatgccaagcctctgctgagactgaagggattcccttcctttcctctggtcgagagacaggccaacgaagtggactggtgggacatggtgtgtaacgtgaagaagctgatcaacgagaaaaaggaggatggcaaggtgttttggcagaatctggctggctacaagagacaggaagccctgagaccatacctgagcagcgaggaagatcggaagaagggaaagaaattcgctcggtaccagctgggcgacctgctgctgcacctggaaaagaagcacggcgaggactggggaaaggtgtacgacgaggcctgggagcggattgacaagaaagtggaaggcctgagcaagcacatcaagctggaagaggaacggagaagcgaggacgcccagagcaaggccgccctgaccgactggctgcgggctaaggccagcttcgtgatcgagggcctgaaggaggccgacaaggacgagttctgcagatgcgagctgaagctgcagaagtggtacggggacctgcggggaaagcccttcgccatcgaagccgagaacagcatcctggacatcagcggcttcagcaagcagtacaactgtgccttcatctggcagaaggacggcgtgaagaagctgaacctgtacctgatcatcaactacttcaagggcggcaagctgcggttcaagaagatcaaacctgaagccttcgaagccaacagattctacaccgtgatcaacaaaaagagcggcgagatcgtgcccatggaggtgaacttcaacttcgacgaccccaacctgatcatcctgcctctggcctttggcaagagacagggcagagaattcatctggaacgacctgctgtccctggaaaccggcagcctgaagctggccaacggaagagtgatcgagaagacactgtacaacagaagaacccggcaggatgagcctgccctgttcgtggccctgaccttcgagcggcgggaggtcctggactcctccaatatcaaaccaatgaacctgatcggcgtggcaagaggcgaaaacatccccgccgtgatcgccctgaccgaccccgagggctgcccactgagccggtttaaggatagcctgggaaacccaacccacatcctgagaatcggcgagagctataaggagaagcagcggaccatccaggccaagaaggaggtggagcagcggagagccggcggctacagccggaagtacgccagcaaagccaagaatctggcagacgatatggtgagaaacaccgctagagatctgctgtactacgccgtgacccaggatgccatgctgatcttcgccaacctgagccggggcttcggccggcagggcaagcggaccttcatggccgagagacagtacacacggatggaggactggctgaccgccaagctggcctacgagggcctgagcaagacctacctgtccaagacactggcccagtacacctccaagacatgcagcaactgtgggtttaccatcaccagcgccgactacgacagggtgctggagaagctgaagaagacagcaacaggctggatgaccacaattaacggcaaggagctgaaggtggagggccagattacctactacaacagatacaagagacagaacgtagtcaaggacctgtccgtcgagctggatagactgagcgaagaatctgtgaacaacgacatctcctcctggacaaagggcagaagcggagaagctctgagcctcctgaagaaaagattctcccatagacccgtgcaggagaagttcgtgtgcctgaactgcggcttcgagacacacgcagccgagcaagccgccctgaacatcgccagatcctggctgttcctgcggagccaggagtacaagaaataccagacaaacaagacaaccggcaacaccgataagagagccttcgtcgagacctggcagtccttttaccggaagaagcttaaggaggtgtggaaacctgccgtgcggtctggcggatctggcggaggctcctccccagggctgcgccatcagcgaggacgtgttcgtgtacttcagcagggaggagtgggtgctgctggacgaggaccagaggctgctgtacagggacgtgatgctggagaacttcgccctgctggccagcctgggcatcaccagcagcaggagctacctggtgacccagctggagcagggcgaggagccctggatgcccgcccaggtggacatgaccgccgccaccgagaaggaggcccagaagggatctggctccggcagcggccccaagaaaaagagaaaagtctaagctgccttctgcggggcttgccttctggccatgcccttcttctctcccttgcacctgtacctcttggtctttgaataaagcctgagtaggaaggctagcaaaaaaaaaaaaaaaaaaaaaaaaaaaaaaaaaaaaaaaaaaaaaaaaaaaaaaaaaaaaaaaaaaaaaaaaaaaaaaaa

SEQ ID NO: 16848 - RNA, 9485 nt, synthetic construct
  source 1..9485: mol_type = other RNA
aggaaataagagagaaaagaagagtaagaagaaatataagagccaccatggcccctaagaagaagcgtaaagtgagccggatggaacgcctcgtctacgaggtgcggcagaagtgcagaaacatcgaggacatctgcatctcctgcggatctctgaacgtgaccctggagcacccactgttcatcggcggcatgtgccagaactgtaaaaactgttttctggagtgtgcctatcaatacgacgatgacggctaccagagctactgcaccatctgttgcggcggaagagaggtgctgatgtgtggaaataacaactgctgccggtgcttctgcgtggaatgcgtggacctgctggtgggccccggcgccgcccaggccgctattaaggaagatccttggaactgctacatgtgcggccacaagggcacatacggcctgctgagacggagagaggactggcctagcagactgcagatgttcttcgccaataaccacgaccaggagttcgacccccctaaggtgtaccctcccgtccccgccgagaagagaaagcccatccgggtcctgagcctgttcgatggcatcgccaccggtctgctggtgctgaaggacctgggcatccaggtggataggtacattgcctccgaggtgtgcgaggactccatcaccgtgggaatggtgcgtcatcagggcaagatcatgtacgtgggcgacgtgcggagcgtgacacagaagcatatccaggagtggggccctttcgacctggtgatcggcggcagcccttgcaatgacctgagcatcgtgaacccagcccggaagggcctgtacgagggaaccggcagactgttcttcgagttttacagactgctgcacgacgcccggcctaaggaaggcgacgaccggcccttcttttggctgttcgagaatgtggtggccatgggagtcagcgacaagcgggatattagccggttcctggagagcaaccccgtgatgatcgatgccaaggaagtgagcgccgcccaccgggccagatacttctggggcaatctgcctggcatgaacagacccctggccagcaccgtgaacgacaagctggagctgcaggagtgcctggagcacggccggatcgccaagttcagcaaggtgagaaccatcaccacccgaagcaacagcatcaaacaaggcaaggaccagcactttcctgtgttcatgaacgagaaggaggacatcctgtggtgtaccgagatggagagagtgttcgggttcccagtccactacacagatgtcagcaacatgtctagactggccagacagagactgctgggaagaagctggtccgtccctgtgatcagacacctgttcgcccctctgaaggagtacttcgcctgcgtgagcagcggcaacagcaacgccaacagccggggccccagcttctctagcggcctggtgccactgtccctgagagggagccacatgggccccatggagatctacaaaaccgtgagcgcctggaagcggcagcctgtgcgcgtgctgagcctgtttcggaatatcgataaagtcctgaaaagcctgggattcctggagagcggctctggctccggcggtggcaccctgaagtacgtggaggatgtgacaaacgtggtcagacgggatgtggagaagtggggccccttcgatctggtgtacggcagcacccaacccctgggcagctcttgtgaccggtgccctggctggtacatgtttcagttccaccggatcctgcagtacgccctgccgagacaggagtcccagcggccattcttttggattttcatggacaacttgctgctgaccgaggatgaccaggaaactaccactcggttcctgcagaccgaagccgtgaccctgcaggacgtgagaggccgggactaccagaacgccatgcgggtgtggtccaacatccctggactgaaaagcaagcacgcacctctgacccctaaagaagaggagtacctgcaggcccaggtgcggagcagaagcaagctggacgcccctaaggtggatctgctggtgaagaattgcctcctgcccctgagagagtacttcaagtatttcagccagaatagtctgcccctgggaggcagcggcggcggcgccctggtgacatttgaggacgtcgccgtgcggttcacccaggaggaatgggctctgctggatccttctcagaaaatcctgtaccgggacgtgatgagagagacataccggaatctgacctccgtgggcatcaactgggaatgttgggaccttgaagcctgcttcagaagcctgggaagaaacctgagagtgcaggtggtgaagagaaagtgcgagctgaccaacagcggcccctgcgccgagggcggcccaagcagcggcgcccctcctcccagcggcggcagcccagccggctccccaacctctaccgaggagggcacctctgagtccgccacccccgagagcggccctggcacctccaccgagcccagcgagggcagcgcacccggcagccctgccggcagccccacctccacagaggagggaaccagcaccgagcccagcgaaggcagcgccccaggcaccagcaccgagcctagtgagcaggagattaaacggatcaacaagatcagaagaagacttgtgaaagacagcaacaccaagaaggccggcaagacaggccccatgaaaaccctgctggttagagtgatgacacccgatctgagagagcggctggaaaacctgagaaagaagcctgaaaatatcccccagcccatcagcaatacatctagagccaacctgaataagctgctgaccgattacaccgaaatgaagaaggcgatcctgcatgtgtactgggaagagttccagaaggaccctgtgggcctgatgagccgggtggcccagcctgccagcaagaagatcgatcagaacaagctgaaacctgagatggacgagaagggcaacctgaccaccgccggctttgcctgctctcagtgtggccagcccctgttcgtgtacaagctggagcaggtgtctgagaagggcaaggcttacaccaactacttcggacggtgcaatgtggccgagcacgaaaagctgatcctgctggcccagctgaagcccgagaaggatagcgacgaagccgtgacatatagcctgggaaagtttgggcagagggccctggatttctacagcattcatgtgaccaaggagtccacccaccccgtgaagcccctggcccagatcgccggaaacagatacgcctccggacctgtgggaaaggccctgagcgacgcatgtatgggcacaatcgcctccttcctgtctaagtaccaggacatcatcatcgaacaccagaaggtggtgaagggcaaccagaagagactggagagcctgcgggagctggccggcaaggaaaacctggaataccctagcgtgaccctgccacctcagcctcacaccaaggagggcgttgatgcctacaacgaagtgatcgcccgggtgcgaatgtgggtgaacctgaacctgtggcagaagctgaagctaagcagagatgatgccaagcctctgctgagactgaagggattcccttcctttcctctggtcgagagacaggccaacgaagtggactggtgggacatggtgtgtaacgtgaagaagctgatcaacgagaaaaaggaggatggcaaggtgttttggcagaatctggctggctacaagagacaggaagccctgagaccatacctgagcagcgaggaagatcggaagaagggaaagaaattcgctcggtaccagctgggcgacctgctgctgcacctggaaaagaagcacggcgaggactggggaaaggtgtacgacgaggcctgggagcggattgacaagaaagtggaaggcctgagcaagcacatcaagctggaagaggaacggagaagcgaggacgcccagagcaaggccgccctgaccgactggctgcgggctaaggccagcttcgtgatcgagggcctgaaggaggccgacaaggacgagttctgcagatgcgagctgaagctgcagaagtggtacggggacctgcggggaaagcccttcgccatcgaagccgagaacagcatcctggacatcagcggcttcagcaagcagtacaactgtgccttcatctggcagaaggacggcgtgaagaagctgaacctgtacctgatcatcaactacttcaagggcggcaagctgcggttcaagaagatcaaacctgaagccttcgaagccaacagattctacaccgtgatcaacaaaaagagcggcgagatcgtgcccatggaggtgaacttcaacttcgacgaccccaacctgatcatcctgcctctggcctttggcaagagacagggcagagaattcatctggaacgacctgctgtccctggaaaccggcagcctgaagctggccaacggaagagtgatcgagaagacactgtacaacagaagaacccggcaggatgagcctgccctgttcgtggccctgaccttcgagcggcgggaggtcctggactcctccaatatcaaaccaatgaacctgatcggcgtggcaagaggcgaaaacatccccgccgtgatcgccctgaccgaccccgagggctgcccactgagccggtttaaggatagcctgggaaacccaacccacatcctgagaatcggcgagagctataaggagaagcagcggaccatccaggccaagaaggaggtggagcagcggagagccggcggctacagccggaagtacgccagcaaagccaagaatctggcagacgatatggtgagaaacaccgctagagatctgctgtactacgccgtgacccaggatgccatgctgatcttcgccaacctgagccggggcttcggccggcagggcaagcggaccttcatggccgagagacagtacacacggatggaggactggctgaccgccaagctggcctacgagggcctgagcaagacctacctgtccaagacactggcccagtacacctccaagacatgcagcaactgtgggtttaccatcaccagcgccgactacgacagggtgctggagaagctgaagaagacagcaacaggctggatgaccacaattaacggcaaggagctgaaggtggagggccagattacctactacaacagatacaagagacagaacgtagtcaaggacctgtccgtcgagctggatagactgagcgaagaatctgtgaacaacgacatctcctcctggacaaagggcagaagcggagaagctctgagcctcctgaagaaaagattctcccatagacccgtgcaggagaagttcgtgtgcctgaactgcggcttcgagacacacgcagccgagcaagccgccctgaacatcgccagatcctggctgttcctgcggagccaggagtacaagaaataccagacaaacaagacaaccggcaacaccgataagagagccttcgtcgagacctggcagtccttttaccggaagaagcttaaggaggtgtggaaacctgccgtgcggtctggcggatctggcggaggctccgtgcacggcagcgtgaccttcagggacgtggccatcgacttcagccaggaggagtgggagtgcctgcagcccgaccagaggaccctgtacagggacgtgatgctggagaactacagccacctgatcagcctgggcagcagcatcagcaagcccgacgtgatcaccctgctggagcaggagcaggagccctggatggtggtgaggaaggagaccaacaggtggtaccccgacctggagagcaagggcggcccaagcagcggcgcccctcctcccagcggcggcagcccagccggctccccaacctctaccgaggagggcacctctgagtccgccacccccgagagcggccctggcacctccaccgagcccagcgagggcagcgcacccggcagccctgccggcagccccacctccacagaggagggaaccagcaccgagcccagcgaaggcagcgccccaggcaccagcaccgagcctagtgagcaggagattaaacggatcaacaagatcagaagaagacttgtgaaagacagcaacaccaagaaggccggcaagacaggccccatgaaaaccctgctggttagagtgatgacacccgatctgagagagcggctggaaaacctgagaaagaagcctgaaaatatcccccagcccatcagcaatacatctagagccaacctgaataagctgctgaccgattacaccgaaatgaagaaggcgatcctgcatgtgtactgggaagagttccagaaggaccctgtgggcctgatgagccgggtggcccagcctgccagcaagaagatcgatcagaacaagctgaaacctgagatggacgagaagggcaacctgaccaccgccggctttgcctgctctcagtgtggccagcccctgttcgtgtacaagctggagcaggtgtctgagaagggcaaggcttacaccaactacttcggacggtgcaatgtggccgagcacgaaaagctgatcctgctggcccagctgaagcccgagaaggatagcgacgaagccgtgacatatagcctgggaaagtttgggcagagggccctggatttctacagcattcatgtgaccaaggagtccacccaccccgtgaagcccctggcccagatcgccggaaacagatacgcctccggacctgtgggaaaggccctgagcgacgcatgtatgggcacaatcgcctccttcctgtctaagtaccaggacatcatcatcgaacaccagaaggtggtgaagggcaaccagaagagactggagagcctgcgggagctggccggcaaggaaaacctggaataccctagcgtgaccctgccacctcagcctcacaccaaggagggcgttgatgcctacaacgaagtgatcgcccgggtgcgaatgtgggtgaacctgaacctgtggcagaagctgaagctaagcagagatgatgccaagcctctgctgagactgaagggattcccttcctttcctctggtcgagagacaggccaacgaagtggactggtgggacatggtgtgtaacgtgaagaagctgatcaacgagaaaaaggaggatggcaaggtgttttggcagaatctggctggctacaagagacaggaagccctgagaccatacctgagcagcgaggaagatcggaagaagggaaagaaattcgctcggtaccagctgggcgacctgctgctgcacctggaaaagaagcacggcgaggactggggaaaggtgtacgacgaggcctgggagcggattgacaagaaagtggaaggcctgagcaagcacatcaagctggaagaggaacggagaagcgaggacgcccagagcaaggccgccctgaccgactggctgcgggctaaggccagcttcgtgatcgagggcctgaaggaggccgacaaggacgagttctgcagatgcgagctgaagctgcagaagtggtacggggacctgcggggaaagcccttcgccatcgaagccgagaacagcatcctggacatcagcggcttcagcaagcagtacaactgtgccttcatctggcagaaggacggcgtgaagaagctgaacctgtacctgatcatcaactacttcaagggcggcaagctgcggttcaagaagatcaaacctgaagccttcgaagccaacagattctacaccgtgatcaacaaaaagagcggcgagatcgtgcccatggaggtgaacttcaacttcgacgaccccaacctgatcatcctgcctctggcctttggcaagagacagggcagagaattcatctggaacgacctgctgtccctggaaaccggcagcctgaagctggccaacggaagagtgatcgagaagacactgtacaacagaagaacccggcaggatgagcctgccctgttcgtggccctgaccttcgagcggcgggaggtcctggactcctccaatatcaaaccaatgaacctgatcggcgtggcaagaggcgaaaacatccccgccgtgatcgccctgaccgaccccgagggctgcccactgagccggtttaaggatagcctgggaaacccaacccacatcctgagaatcggcgagagctataaggagaagcagcggaccatccaggccaagaaggaggtggagcagcggagagccggcggctacagccggaagtacgccagcaaagccaagaatctggcagacgatatggtgagaaacaccgctagagatctgctgtactacgccgtgacccaggatgccatgctgatcttcgccaacctgagccggggcttcggccggcagggcaagcggaccttcatggccgagagacagtacacacggatggaggactggctgaccgccaagctggcctacgagggcctgagcaagacctacctgtccaagacactggcccagtacacctccaagacatgcagcaactgtgggtttaccatcaccagcgccgactacgacagggtgctggagaagctgaagaagacagcaacaggctggatgaccacaattaacggcaaggagctgaaggtggagggccagattacctactacaacagatacaagagacagaacgtagtcaaggacctgtccgtcgagctggatagactgagcgaagaatctgtgaacaacgacatctcctcctggacaaagggcagaagcggagaagctctgagcctcctgaagaaaagattctcccatagacccgtgcaggagaagttcgtgtgcctgaactgcggcttcgagacacacgcagccgagcaagccgccctgaacatcgccagatcctggctgttcctgcggagccaggagtacaagaaataccagacaaacaagacaaccggcaacaccgataagagagccttcgtcgagacctggcagtccttttaccggaagaagcttaaggaggtgtggaaacctgccgtgcggtctggcggatctggcggaggctcctgtgcacggcagcgtgaccttcagggacgtggccatcgacttcagccaggaggagtgggagtgcctgcagcccgaccagaggaccctgtacagggacgtgatgctggagaactacagccacctgatcagcctgggcagcagcatcagcaagcccgacgtgatcaccctgctggagcaggagcaggagccctggatggtggtgaggaaggagaccaacaggtggtaccccgacctggagagcaagggatctggctccggcagcggccccaagaaaaagagaaaagtctaagctgccttctgcggggcttgccttctggccatgcccttcttctctcccttgcacctgtacctcttggtctttgaataaagcctgagtaggaaggctagcaaaaaaaaaaaaaaaaaaaaaaaaaaaaaaaaaaaaaaaaaaaaaaaaaaaaaaaaaaaaaaaaaaaaaaaaaaaaaaaa

SEQ ID NO: 16849 - RNA, 9485 nt, synthetic construct
  source 1..9485: mol_type = other RNA
aggaaataagagagaaaagaagagtaagaagaaatataagagccaccatggcccctaagaagaagcgtaaagtgagccggatggaacgcctcgtctacgaggtgcggcagaagtgcagaaacatcgaggacatctgcatctcctgcggatctctgaacgtgaccctggagcacccactgttcatcggcggcatgtgccagaactgtaaaaactgttttctggagtgtgcctatcaatacgacgatgacggctaccagagctactgcaccatctgttgcggcggaagagaggtgctgatgtgtggaaataacaactgctgccggtgcttctgcgtggaatgcgtggacctgctggtgggccccggcgccgcccaggccgctattaaggaagatccttggaactgctacatgtgcggccacaagggcacatacggcctgctgagacggagagaggactggcctagcagactgcagatgttcttcgccaataaccacgaccaggagttcgacccccctaaggtgtaccctcccgtccccgccgagaagagaaagcccatccgggtcctgagcctgttcgatggcatcgccaccggtctgctggtgctgaaggacctgggcatccaggtggataggtacattgcctccgaggtgtgcgaggactccatcaccgtgggaatggtgcgtcatcagggcaagatcatgtacgtgggcgacgtgcggagcgtgacacagaagcatatccaggagtggggccctttcgacctggtgatcggcggcagcccttgcaatgacctgagcatcgtgaacccagcccggaagggcctgtacgagggaaccggcagactgttcttcgagttttacagactgctgcacgacgcccggcctaaggaaggcgacgaccggcccttcttttggctgttcgagaatgtggtggccatgggagtcagcgacaagcgggatattagccggttcctggagagcaaccccgtgatgatcgatgccaaggaagtgagcgccgcccaccgggccagatacttctggggcaatctgcctggcatgaacagacccctggccagcaccgtgaacgacaagctggagctgcaggagtgcctggagcacggccggatcgccaagttcagcaaggtgagaaccatcaccacccgaagcaacagcatcaaacaaggcaaggaccagcactttcctgtgttcatgaacgagaaggaggacatcctgtggtgtaccgagatggagagagtgttcgggttcccagtccactacacagatgtcagcaacatgtctagactggccagacagagactgctgggaagaagctggtccgtccctgtgatcagacacctgttcgcccctctgaaggagtacttcgcctgcgtgagcagcggcaacagcaacgccaacagccggggccccagcttctctagcggcctggtgccactgtccctgagagggagccacatgggccccatggagatctacaaaaccgtgagcgcctggaagcggcagcctgtgcgcgtgctgagcctgtttcggaatatcgataaagtcctgaaaagcctgggattcctggagagcggctctggctccggcggtggcaccctgaagtacgtggaggatgtgacaaacgtggtcagacgggatgtggagaagtggggccccttcgatctggtgtacggcagcacccaacccctgggcagctcttgtgaccggtgccctggctggtacatgtttcagttccaccggatcctgcagtacgccctgccgagacaggagtcccagcggccattcttttggattttcatggacaacttgctgctgaccgaggatgaccaggaaactaccactcggttcctgcagaccgaagccgtgaccctgcaggacgtgagaggccgggactaccagaacgccatgcgggtgtggtccaacatccctggactgaaaagcaagcacgcacctctgacccctaaagaagaggagtacctgcaggcccaggtgcggagcagaagcaagctggacgcccctaaggtggatctgctggtgaagaattgcctcctgcccctgagagagtacttcaagtatttcagccagaatagtctgcccctgggaggcagcggcggcggcgccctggtgacatttgaggacgtcgccgtgcggttcacccaggaggaatgggctctgctggatccttctcagaaaatcctgtaccgggacgtgatgagagagacataccggaatctgacctccgtgggcatcaactgggaatgttgggaccttgaagcctgcttcagaagcctgggaagaaacctgagagtgcaggtggtgaagagaaagtgcgagctgaccaacagcggcccctgcgccgagggcggcccaagcagcggcgcccctcctcccagcggcggcagcccagccggctccccaacctctaccgaggagggcacctctgagtccgccacccccgagagcggccctggcacctccaccgagcccagcgagggcagcgcacccggcagccctgccggcagccccacctccacagaggagggaaccagcaccgagcccagcgaaggcagcgccccaggcaccagcaccgagcctagtgagcaggagattaaacggatcaacaagatcagaagaagacttgtgaaagacagcaacaccaagaaggccggcaagacaggccccatgaaaaccctgctggttagagtgatgacacccgatctgagagagcggctggaaaacctgagaaagaagcctgaaaatatcccccagcccatcagcaatacatctagagccaacctgaataagctgctgaccgattacaccgaaatgaagaaggcgatcctgcatgtgtactgggaagagttccagaaggaccctgtgggcctgatgagccgggtggcccagcctgccagcaagaagatcgatcagaacaagctgaaacctgagatggacgagaagggcaacctgaccaccgccggctttgcctgctctcagtgtggccagcccctgttcgtgtacaagctggagcaggtgtctgagaagggcaaggcttacaccaactacttcggacggtgcaatgtggccgagcacgaaaagctgatcctgctggcccagctgaagcccgagaaggatagcgacgaagccgtgacatatagcctgggaaagtttgggcagagggccctggatttctacagcattcatgtgaccaaggagtccacccaccccgtgaagcccctggcccagatcgccggaaacagatacgcctccggacctgtgggaaaggccctgagcgacgcatgtatgggcacaatcgcctccttcctgtctaagtaccaggacatcatcatcgaacaccagaaggtggtgaagggcaaccagaagagactggagagcctgcgggagctggccggcaaggaaaacctggaataccctagcgtgaccctgccacctcagcctcacaccaaggagggcgttgatgcctacaacgaagtgatcgcccgggtgcgaatgtgggtgaacctgaacctgtggcagaagctgaagctaagcagagatgatgccaagcctctgctgagactgaagggattcccttcctttcctctggtcgagagacaggccaacgaagtggactggtgggacatggtgtgtaacgtgaagaagctgatcaacgagaaaaaggaggatggcaaggtgttttggcagaatctggctggctacaagagacaggaagccctgagaccatacctgagcagcgaggaagatcggaagaagggaaagaaattcgctcggtaccagctgggcgacctgctgctgcacctggaaaagaagcacggcgaggactggggaaaggtgtacgacgaggcctgggagcggattgacaagaaagtggaaggcctgagcaagcacatcaagctggaagaggaacggagaagcgaggacgcccagagcaaggccgccctgaccgactggctgcgggctaaggccagcttcgtgatcgagggcctgaaggaggccgacaaggacgagttctgcagatgcgagctgaagctgcagaagtggtacggggacctgcggggaaagcccttcgccatcgaagccgagaacagcatcctggacatcagcggcttcagcaagcagtacaactgtgccttcatctggcagaaggacggcgtgaagaagctgaacctgtacctgatcatcaactacttcaagggcggcaagctgcggttcaagaagatcaaacctgaagccttcgaagccaacagattctacaccgtgatcaacaaaaagagcggcgagatcgtgcccatggaggtgaacttcaacttcgacgaccccaacctgatcatcctgcctctggcctttggcaagagacagggcagagaattcatctggaacgacctgctgtccctggaaaccggcagcctgaagctggccaacggaagagtgatcgagaagacactgtacaacagaagaacccggcaggatgagcctgccctgttcgtggccctgaccttcgagcggcgggaggtcctggactcctccaatatcaaaccaatgaacctgatcggcgtggcaagaggcgaaaacatccccgccgtgatcgccctgaccgaccccgagggctgcccactgagccggtttaaggatagcctgggaaacccaacccacatcctgagaatcggcgagagctataaggagaagcagcggaccatccaggccaagaaggaggtggagcagcggagagccggcggctacagccggaagtacgccagcaaagccaagaatctggcagacgatatggtgagaaacaccgctagagatctgctgtactacgccgtgacccaggatgccatgctgatcttcgccaacctgagccggggcttcggccggcagggcaagcggaccttcatggccgagagacagtacacacggatggaggactggctgaccgccaagctggcctacgagggcctgagcaagacctacctgtccaagacactggcccagtacacctccaagacatgcagcaactgtgggtttaccatcaccagcgccgactacgacagggtgctggagaagctgaagaagacagcaacaggctggatgaccacaattaacggcaaggagctgaaggtggagggccagattacctactacaacagatacaagagacagaacgtagtcaaggacctgtccgtcgagctggatagactgagcgaagaatctgtgaacaacgacatctcctcctggacaaagggcagaagcggagaagctctgagcctcctgaagaaaagattctcccatagacccgtgcaggagaagttcgtgtgcctgaactgcggcttcgagacacacgcagccgagcaagccgccctgaacatcgccagatcctggctgttcctgcggagccaggagtacaagaaataccagacaaacaagacaaccggcaacaccgataagagagccttcgtcgagacctggcagtccttttaccggaagaagcttaaggaggtgtggaaacctgccgtgcggtctggcggatctggcggaggctccaggcccgagagcgtgaccttcgaggacgtggccatctacttcagcgagaacgagtggaccggcctggcccccgcccagagggccctgtacagggacgtgatgctggagaactacggcgccctggccagcctggccttccccttccccaagcccgccctgatcttccagctggagcagggcgaggccccctggagcagcgccccccagggcgccctggacggcgagggccccaggggcatcagcggcggcccaagcagcggcgcccctcctcccagcggcggcagcccagccggctccccaacctctaccgaggagggcacctctgagtccgccacccccgagagcggccctggcacctccaccgagcccagcgagggcagcgcacccggcagccctgccggcagccccacctccacagaggagggaaccagcaccgagcccagcgaaggcagcgccccaggcaccagcaccgagcctagtgagcaggagattaaacggatcaacaagatcagaagaagacttgtgaaagacagcaacaccaagaaggccggcaagacaggccccatgaaaaccctgctggttagagtgatgacacccgatctgagagagcggctggaaaacctgagaaagaagcctgaaaatatcccccagcccatcagcaatacatctagagccaacctgaataagctgctgaccgattacaccgaaatgaagaaggcgatcctgcatgtgtactgggaagagttccagaaggaccctgtgggcctgatgagccgggtggcccagcctgccagcaagaagatcgatcagaacaagctgaaacctgagatggacgagaagggcaacctgaccaccgccggctttgcctgctctcagtgtggccagcccctgttcgtgtacaagctggagcaggtgtctgagaagggcaaggcttacaccaactacttcggacggtgcaatgtggccgagcacgaaaagctgatcctgctggcccagctgaagcccgagaaggatagcgacgaagccgtgacatatagcctgggaaagtttgggcagagggccctggatttctacagcattcatgtgaccaaggagtccacccaccccgtgaagcccctggcccagatcgccggaaacagatacgcctccggacctgtgggaaaggccctgagcgacgcatgtatgggcacaatcgcctccttcctgtctaagtaccaggacatcatcatcgaacaccagaaggtggtgaagggcaaccagaagagactggagagcctgcgggagctggccggcaaggaaaacctggaataccctagcgtgaccctgccacctcagcctcacaccaaggagggcgttgatgcctacaacgaagtgatcgcccgggtgcgaatgtgggtgaacctgaacctgtggcagaagctgaagctaagcagagatgatgccaagcctctgctgagactgaagggattcccttcctttcctctggtcgagagacaggccaacgaagtggactggtgggacatggtgtgtaacgtgaagaagctgatcaacgagaaaaaggaggatggcaaggtgttttggcagaatctggctggctacaagagacaggaagccctgagaccatacctgagcagcgaggaagatcggaagaagggaaagaaattcgctcggtaccagctgggcgacctgctgctgcacctggaaaagaagcacggcgaggactggggaaaggtgtacgacgaggcctgggagcggattgacaagaaagtggaaggcctgagcaagcacatcaagctggaagaggaacggagaagcgaggacgcccagagcaaggccgccctgaccgactggctgcgggctaaggccagcttcgtgatcgagggcctgaaggaggccgacaaggacgagttctgcagatgcgagctgaagctgcagaagtggtacggggacctgcggggaaagcccttcgccatcgaagccgagaacagcatcctggacatcagcggcttcagcaagcagtacaactgtgccttcatctggcagaaggacggcgtgaagaagctgaacctgtacctgatcatcaactacttcaagggcggcaagctgcggttcaagaagatcaaacctgaagccttcgaagccaacagattctacaccgtgatcaacaaaaagagcggcgagatcgtgcccatggaggtgaacttcaacttcgacgaccccaacctgatcatcctgcctctggcctttggcaagagacagggcagagaattcatctggaacgacctgctgtccctggaaaccggcagcctgaagctggccaacggaagagtgatcgagaagacactgtacaacagaagaacccggcaggatgagcctgccctgttcgtggccctgaccttcgagcggcgggaggtcctggactcctccaatatcaaaccaatgaacctgatcggcgtggcaagaggcgaaaacatccccgccgtgatcgccctgaccgaccccgagggctgcccactgagccggtttaaggatagcctgggaaacccaacccacatcctgagaatcggcgagagctataaggagaagcagcggaccatccaggccaagaaggaggtggagcagcggagagccggcggctacagccggaagtacgccagcaaagccaagaatctggcagacgatatggtgagaaacaccgctagagatctgctgtactacgccgtgacccaggatgccatgctgatcttcgccaacctgagccggggcttcggccggcagggcaagcggaccttcatggccgagagacagtacacacggatggaggactggctgaccgccaagctggcctacgagggcctgagcaagacctacctgtccaagacactggcccagtacacctccaagacatgcagcaactgtgggtttaccatcaccagcgccgactacgacagggtgctggagaagctgaagaagacagcaacaggctggatgaccacaattaacggcaaggagctgaaggtggagggccagattacctactacaacagatacaagagacagaacgtagtcaaggacctgtccgtcgagctggatagactgagcgaagaatctgtgaacaacgacatctcctcctggacaaagggcagaagcggagaagctctgagcctcctgaagaaaagattctcccatagacccgtgcaggagaagttcgtgtgcctgaactgcggcttcgagacacacgcagccgagcaagccgccctgaacatcgccagatcctggctgttcctgcggagccaggagtacaagaaataccagacaaacaagacaaccggcaacaccgataagagagccttcgtcgagacctggcagtccttttaccggaagaagcttaaggaggtgtggaaacctgccgtgcggtctggcggatctggcggaggctcctaggcccgagagcgtgaccttcgaggacgtggccatctacttcagcgagaacgagtggaccggcctggcccccgcccagagggccctgtacagggacgtgatgctggagaactacggcgccctggccagcctggccttccccttccccaagcccgccctgatcttccagctggagcagggcgaggccccctggagcagcgccccccagggcgccctggacggcgagggccccaggggcatcagcggatctggctccggcagcggccccaagaaaaagagaaaagtctaagctgccttctgcggggcttgccttctggccatgcccttcttctctcccttgcacctgtacctcttggtctttgaataaagcctgagtaggaaggctagcaaaaaaaaaaaaaaaaaaaaaaaaaaaaaaaaaaaaaaaaaaaaaaaaaaaaaaaaaaaaaaaaaaaaaaaaaaaaaaaa

SEQ ID NO: 16850 - RNA, 9485 nt, synthetic construct
  source 1..9485: mol_type = other RNA
aggaaataagagagaaaagaagagtaagaagaaatataagagccaccatggcccctaagaagaagcgtaaagtgagccggatggaacgcctcgtctacgaggtgcggcagaagtgcagaaacatcgaggacatctgcatctcctgcggatctctgaacgtgaccctggagcacccactgttcatcggcggcatgtgccagaactgtaaaaactgttttctggagtgtgcctatcaatacgacgatgacggctaccagagctactgcaccatctgttgcggcggaagagaggtgctgatgtgtggaaataacaactgctgccggtgcttctgcgtggaatgcgtggacctgctggtgggccccggcgccgcccaggccgctattaaggaagatccttggaactgctacatgtgcggccacaagggcacatacggcctgctgagacggagagaggactggcctagcagactgcagatgttcttcgccaataaccacgaccaggagttcgacccccctaaggtgtaccctcccgtccccgccgagaagagaaagcccatccgggtcctgagcctgttcgatggcatcgccaccggtctgctggtgctgaaggacctgggcatccaggtggataggtacattgcctccgaggtgtgcgaggactccatcaccgtgggaatggtgcgtcatcagggcaagatcatgtacgtgggcgacgtgcggagcgtgacacagaagcatatccaggagtggggccctttcgacctggtgatcggcggcagcccttgcaatgacctgagcatcgtgaacccagcccggaagggcctgtacgagggaaccggcagactgttcttcgagttttacagactgctgcacgacgcccggcctaaggaaggcgacgaccggcccttcttttggctgttcgagaatgtggtggccatgggagtcagcgacaagcgggatattagccggttcctggagagcaaccccgtgatgatcgatgccaaggaagtgagcgccgcccaccgggccagatacttctggggcaatctgcctggcatgaacagacccctggccagcaccgtgaacgacaagctggagctgcaggagtgcctggagcacggccggatcgccaagttcagcaaggtgagaaccatcaccacccgaagcaacagcatcaaacaaggcaaggaccagcactttcctgtgttcatgaacgagaaggaggacatcctgtggtgtaccgagatggagagagtgttcgggttcccagtccactacacagatgtcagcaacatgtctagactggccagacagagactgctgggaagaagctggtccgtccctgtgatcagacacctgttcgcccctctgaaggagtacttcgcctgcgtgagcagcggcaacagcaacgccaacagccggggccccagcttctctagcggcctggtgccactgtccctgagagggagccacatgggccccatggagatctacaaaaccgtgagcgcctggaagcggcagcctgtgcgcgtgctgagcctgtttcggaatatcgataaagtcctgaaaagcctgggattcctggagagcggctctggctccggcggtggcaccctgaagtacgtggaggatgtgacaaacgtggtcagacgggatgtggagaagtggggccccttcgatctggtgtacggcagcacccaacccctgggcagctcttgtgaccggtgccctggctggtacatgtttcagttccaccggatcctgcagtacgccctgccgagacaggagtcccagcggccattcttttggattttcatggacaacttgctgctgaccgaggatgaccaggaaactaccactcggttcctgcagaccgaagccgtgaccctgcaggacgtgagaggccgggactaccagaacgccatgcgggtgtggtccaacatccctggactgaaaagcaagcacgcacctctgacccctaaagaagaggagtacctgcaggcccaggtgcggagcagaagcaagctggacgcccctaaggtggatctgctggtgaagaattgcctcctgcccctgagagagtacttcaagtatttcagccagaatagtctgcccctgggaggcagcggcggcggcgccctggtgacatttgaggacgtcgccgtgcggttcacccaggaggaatgggctctgctggatccttctcagaaaatcctgtaccgggacgtgatgagagagacataccggaatctgacctccgtgggcatcaactgggaatgttgggaccttgaagcctgcttcagaagcctgggaagaaacctgagagtgcaggtggtgaagagaaagtgcgagctgaccaacagcggcccctgcgccgagggcggcccaagcagcggcgcccctcctcccagcggcggcagcccagccggctccccaacctctaccgaggagggcacctctgagtccgccacccccgagagcggccctggcacctccaccgagcccagcgagggcagcgcacccggcagccctgccggcagccccacctccacagaggagggaaccagcaccgagcccagcgaaggcagcgccccaggcaccagcaccgagcctagtgagcaggagattaaacggatcaacaagatcagaagaagacttgtgaaagacagcaacaccaagaaggccggcaagacaggccccatgaaaaccctgctggttagagtgatgacacccgatctgagagagcggctggaaaacctgagaaagaagcctgaaaatatcccccagcccatcagcaatacatctagagccaacctgaataagctgctgaccgattacaccgaaatgaagaaggcgatcctgcatgtgtactgggaagagttccagaaggaccctgtgggcctgatgagccgggtggcccagcctgccagcaagaagatcgatcagaacaagctgaaacctgagatggacgagaagggcaacctgaccaccgccggctttgcctgctctcagtgtggccagcccctgttcgtgtacaagctggagcaggtgtctgagaagggcaaggcttacaccaactacttcggacggtgcaatgtggccgagcacgaaaagctgatcctgctggcccagctgaagcccgagaaggatagcgacgaagccgtgacatatagcctgggaaagtttgggcagagggccctggatttctacagcattcatgtgaccaaggagtccacccaccccgtgaagcccctggcccagatcgccggaaacagatacgcctccggacctgtgggaaaggccctgagcgacgcatgtatgggcacaatcgcctccttcctgtctaagtaccaggacatcatcatcgaacaccagaaggtggtgaagggcaaccagaagagactggagagcctgcgggagctggccggcaaggaaaacctggaataccctagcgtgaccctgccacctcagcctcacaccaaggagggcgttgatgcctacaacgaagtgatcgcccgggtgcgaatgtgggtgaacctgaacctgtggcagaagctgaagctaagcagagatgatgccaagcctctgctgagactgaagggattcccttcctttcctctggtcgagagacaggccaacgaagtggactggtgggacatggtgtgtaacgtgaagaagctgatcaacgagaaaaaggaggatggcaaggtgttttggcagaatctggctggctacaagagacaggaagccctgagaccatacctgagcagcgaggaagatcggaagaagggaaagaaattcgctcggtaccagctgggcgacctgctgctgcacctggaaaagaagcacggcgaggactggggaaaggtgtacgacgaggcctgggagcggattgacaagaaagtggaaggcctgagcaagcacatcaagctggaagaggaacggagaagcgaggacgcccagagcaaggccgccctgaccgactggctgcgggctaaggccagcttcgtgatcgagggcctgaaggaggccgacaaggacgagttctgcagatgcgagctgaagctgcagaagtggtacggggacctgcggggaaagcccttcgccatcgaagccgagaacagcatcctggacatcagcggcttcagcaagcagtacaactgtgccttcatctggcagaaggacggcgtgaagaagctgaacctgtacctgatcatcaactacttcaagggcggcaagctgcggttcaagaagatcaaacctgaagccttcgaagccaacagattctacaccgtgatcaacaaaaagagcggcgagatcgtgcccatggaggtgaacttcaacttcgacgaccccaacctgatcatcctgcctctggcctttggcaagagacagggcagagaattcatctggaacgacctgctgtccctggaaaccggcagcctgaagctggccaacggaagagtgatcgagaagacactgtacaacagaagaacccggcaggatgagcctgccctgttcgtggccctgaccttcgagcggcgggaggtcctggactcctccaatatcaaaccaatgaacctgatcggcgtggcaagaggcgaaaacatccccgccgtgatcgccctgaccgaccccgagggctgcccactgagccggtttaaggatagcctgggaaacccaacccacatcctgagaatcggcgagagctataaggagaagcagcggaccatccaggccaagaaggaggtggagcagcggagagccggcggctacagccggaagtacgccagcaaagccaagaatctggcagacgatatggtgagaaacaccgctagagatctgctgtactacgccgtgacccaggatgccatgctgatcttcgccaacctgagccggggcttcggccggcagggcaagcggaccttcatggccgagagacagtacacacggatggaggactggctgaccgccaagctggcctacgagggcctgagcaagacctacctgtccaagacactggcccagtacacctccaagacatgcagcaactgtgggtttaccatcaccagcgccgactacgacagggtgctggagaagctgaagaagacagcaacaggctggatgaccacaattaacggcaaggagctgaaggtggagggccagattacctactacaacagatacaagagacagaacgtagtcaaggacctgtccgtcgagctggatagactgagcgaagaatctgtgaacaacgacatctcctcctggacaaagggcagaagcggagaagctctgagcctcctgaagaaaagattctcccatagacccgtgcaggagaagttcgtgtgcctgaactgcggcttcgagacacacgcagccgagcaagccgccctgaacatcgccagatcctggctgttcctgcggagccaggagtacaagaaataccagacaaacaagacaaccggcaacaccgataagagagccttcgtcgagacctggcagtccttttaccggaagaagcttaaggaggtgtggaaacctgccgtgcggtctggcggatctggcggaggctccagccagggcagcgtgaccttcggcgacgtggccatcgacttcagcagggaggagtgggagtggctgcagcccgcccagagggacctgtacaggatcgtgatgctggagaactacggccacctggtgagcctgggcctgaacgtgagcaagcccgacgtggtgagcctgctggagcagggcaaggagccctggctgggcaacggcgacgtgaggagggacctgttcagcgtgagcgagagcaacggcggcccaagcagcggcgcccctcctcccagcggcggcagcccagccggctccccaacctctaccgaggagggcacctctgagtccgccacccccgagagcggccctggcacctccaccgagcccagcgagggcagcgcacccggcagccctgccggcagccccacctccacagaggagggaaccagcaccgagcccagcgaaggcagcgccccaggcaccagcaccgagcctagtgagcaggagattaaacggatcaacaagatcagaagaagacttgtgaaagacagcaacaccaagaaggccggcaagacaggccccatgaaaaccctgctggttagagtgatgacacccgatctgagagagcggctggaaaacctgagaaagaagcctgaaaatatcccccagcccatcagcaatacatctagagccaacctgaataagctgctgaccgattacaccgaaatgaagaaggcgatcctgcatgtgtactgggaagagttccagaaggaccctgtgggcctgatgagccgggtggcccagcctgccagcaagaagatcgatcagaacaagctgaaacctgagatggacgagaagggcaacctgaccaccgccggctttgcctgctctcagtgtggccagcccctgttcgtgtacaagctggagcaggtgtctgagaagggcaaggcttacaccaactacttcggacggtgcaatgtggccgagcacgaaaagctgatcctgctggcccagctgaagcccgagaaggatagcgacgaagccgtgacatatagcctgggaaagtttgggcagagggccctggatttctacagcattcatgtgaccaaggagtccacccaccccgtgaagcccctggcccagatcgccggaaacagatacgcctccggacctgtgggaaaggccctgagcgacgcatgtatgggcacaatcgcctccttcctgtctaagtaccaggacatcatcatcgaacaccagaaggtggtgaagggcaaccagaagagactggagagcctgcgggagctggccggcaaggaaaacctggaataccctagcgtgaccctgccacctcagcctcacaccaaggagggcgttgatgcctacaacgaagtgatcgcccgggtgcgaatgtgggtgaacctgaacctgtggcagaagctgaagctaagcagagatgatgccaagcctctgctgagactgaagggattcccttcctttcctctggtcgagagacaggccaacgaagtggactggtgggacatggtgtgtaacgtgaagaagctgatcaacgagaaaaaggaggatggcaaggtgttttggcagaatctggctggctacaagagacaggaagccctgagaccatacctgagcagcgaggaagatcggaagaagggaaagaaattcgctcggtaccagctgggcgacctgctgctgcacctggaaaagaagcacggcgaggactggggaaaggtgtacgacgaggcctgggagcggattgacaagaaagtggaaggcctgagcaagcacatcaagctggaagaggaacggagaagcgaggacgcccagagcaaggccgccctgaccgactggctgcgggctaaggccagcttcgtgatcgagggcctgaaggaggccgacaaggacgagttctgcagatgcgagctgaagctgcagaagtggtacggggacctgcggggaaagcccttcgccatcgaagccgagaacagcatcctggacatcagcggcttcagcaagcagtacaactgtgccttcatctggcagaaggacggcgtgaagaagctgaacctgtacctgatcatcaactacttcaagggcggcaagctgcggttcaagaagatcaaacctgaagccttcgaagccaacagattctacaccgtgatcaacaaaaagagcggcgagatcgtgcccatggaggtgaacttcaacttcgacgaccccaacctgatcatcctgcctctggcctttggcaagagacagggcagagaattcatctggaacgacctgctgtccctggaaaccggcagcctgaagctggccaacggaagagtgatcgagaagacactgtacaacagaagaacccggcaggatgagcctgccctgttcgtggccctgaccttcgagcggcgggaggtcctggactcctccaatatcaaaccaatgaacctgatcggcgtggcaagaggcgaaaacatccccgccgtgatcgccctgaccgaccccgagggctgcccactgagccggtttaaggatagcctgggaaacccaacccacatcctgagaatcggcgagagctataaggagaagcagcggaccatccaggccaagaaggaggtggagcagcggagagccggcggctacagccggaagtacgccagcaaagccaagaatctggcagacgatatggtgagaaacaccgctagagatctgctgtactacgccgtgacccaggatgccatgctgatcttcgccaacctgagccggggcttcggccggcagggcaagcggaccttcatggccgagagacagtacacacggatggaggactggctgaccgccaagctggcctacgagggcctgagcaagacctacctgtccaagacactggcccagtacacctccaagacatgcagcaactgtgggtttaccatcaccagcgccgactacgacagggtgctggagaagctgaagaagacagcaacaggctggatgaccacaattaacggcaaggagctgaaggtggagggccagattacctactacaacagatacaagagacagaacgtagtcaaggacctgtccgtcgagctggatagactgagcgaagaatctgtgaacaacgacatctcctcctggacaaagggcagaagcggagaagctctgagcctcctgaagaaaagattctcccatagacccgtgcaggagaagttcgtgtgcctgaactgcggcttcgagacacacgcagccgagcaagccgccctgaacatcgccagatcctggctgttcctgcggagccaggagtacaagaaataccagacaaacaagacaaccggcaacaccgataagagagccttcgtcgagacctggcagtccttttaccggaagaagcttaaggaggtgtggaaacctgccgtgcggtctggcggatctggcggaggctcctagccagggcagcgtgaccttcggcgacgtggccatcgacttcagcagggaggagtgggagtggctgcagcccgcccagagggacctgtacaggatcgtgatgctggagaactacggccacctggtgagcctgggcctgaacgtgagcaagcccgacgtggtgagcctgctggagcagggcaaggagccctggctgggcaacggcgacgtgaggagggacctgttcagcgtgagcgagagcaacggatctggctccggcagcggccccaagaaaaagagaaaagtctaagctgccttctgcggggcttgccttctggccatgcccttcttctctcccttgcacctgtacctcttggtctttgaataaagcctgagtaggaaggctagcaaaaaaaaaaaaaaaaaaaaaaaaaaaaaaaaaaaaaaaaaaaaaaaaaaaaaaaaaaaaaaaaaaaaaaaaaaaaaaaa

SEQ ID NO: 16851 - RNA, 9485 nt, synthetic construct
  source 1..9485: mol_type = other RNA
aggaaataagagagaaaagaagagtaagaagaaatataagagccaccatggcccctaagaagaagcgtaaagtgagccggatggaacgcctcgtctacgaggtgcggcagaagtgcagaaacatcgaggacatctgcatctcctgcggatctctgaacgtgaccctggagcacccactgttcatcggcggcatgtgccagaactgtaaaaactgttttctggagtgtgcctatcaatacgacgatgacggctaccagagctactgcaccatctgttgcggcggaagagaggtgctgatgtgtggaaataacaactgctgccggtgcttctgcgtggaatgcgtggacctgctggtgggccccggcgccgcccaggccgctattaaggaagatccttggaactgctacatgtgcggccacaagggcacatacggcctgctgagacggagagaggactggcctagcagactgcagatgttcttcgccaataaccacgaccaggagttcgacccccctaaggtgtaccctcccgtccccgccgagaagagaaagcccatccgggtcctgagcctgttcgatggcatcgccaccggtctgctggtgctgaaggacctgggcatccaggtggataggtacattgcctccgaggtgtgcgaggactccatcaccgtgggaatggtgcgtcatcagggcaagatcatgtacgtgggcgacgtgcggagcgtgacacagaagcatatccaggagtggggccctttcgacctggtgatcggcggcagcccttgcaatgacctgagcatcgtgaacccagcccggaagggcctgtacgagggaaccggcagactgttcttcgagttttacagactgctgcacgacgcccggcctaaggaaggcgacgaccggcccttcttttggctgttcgagaatgtggtggccatgggagtcagcgacaagcgggatattagccggttcctggagagcaaccccgtgatgatcgatgccaaggaagtgagcgccgcccaccgggccagatacttctggggcaatctgcctggcatgaacagacccctggccagcaccgtgaacgacaagctggagctgcaggagtgcctggagcacggccggatcgccaagttcagcaaggtgagaaccatcaccacccgaagcaacagcatcaaacaaggcaaggaccagcactttcctgtgttcatgaacgagaaggaggacatcctgtggtgtaccgagatggagagagtgttcgggttcccagtccactacacagatgtcagcaacatgtctagactggccagacagagactgctgggaagaagctggtccgtccctgtgatcagacacctgttcgcccctctgaaggagtacttcgcctgcgtgagcagcggcaacagcaacgccaacagccggggccccagcttctctagcggcctggtgccactgtccctgagagggagccacatgggccccatggagatctacaaaaccgtgagcgcctggaagcggcagcctgtgcgcgtgctgagcctgtttcggaatatcgataaagtcctgaaaagcctgggattcctggagagcggctctggctccggcggtggcaccctgaagtacgtggaggatgtgacaaacgtggtcagacgggatgtggagaagtggggccccttcgatctggtgtacggcagcacccaacccctgggcagctcttgtgaccggtgccctggctggtacatgtttcagttccaccggatcctgcagtacgccctgccgagacaggagtcccagcggccattcttttggattttcatggacaacttgctgctgaccgaggatgaccaggaaactaccactcggttcctgcagaccgaagccgtgaccctgcaggacgtgagaggccgggactaccagaacgccatgcgggtgtggtccaacatccctggactgaaaagcaagcacgcacctctgacccctaaagaagaggagtacctgcaggcccaggtgcggagcagaagcaagctggacgcccctaaggtggatctgctggtgaagaattgcctcctgcccctgagagagtacttcaagtatttcagccagaatagtctgcccctgggaggcagcggcggcggcgccctggtgacatttgaggacgtcgccgtgcggttcacccaggaggaatgggctctgctggatccttctcagaaaatcctgtaccgggacgtgatgagagagacataccggaatctgacctccgtgggcatcaactgggaatgttgggaccttgaagcctgcttcagaagcctgggaagaaacctgagagtgcaggtggtgaagagaaagtgcgagctgaccaacagcggcccctgcgccgagggcggcccaagcagcggcgcccctcctcccagcggcggcagcccagccggctccccaacctctaccgaggagggcacctctgagtccgccacccccgagagcggccctggcacctccaccgagcccagcgagggcagcgcacccggcagccctgccggcagccccacctccacagaggagggaaccagcaccgagcccagcgaaggcagcgccccaggcaccagcaccgagcctagtgagcaggagattaaacggatcaacaagatcagaagaagacttgtgaaagacagcaacaccaagaaggccggcaagacaggccccatgaaaaccctgctggttagagtgatgacacccgatctgagagagcggctggaaaacctgagaaagaagcctgaaaatatcccccagcccatcagcaatacatctagagccaacctgaataagctgctgaccgattacaccgaaatgaagaaggcgatcctgcatgtgtactgggaagagttccagaaggaccctgtgggcctgatgagccgggtggcccagcctgccagcaagaagatcgatcagaacaagctgaaacctgagatggacgagaagggcaacctgaccaccgccggctttgcctgctctcagtgtggccagcccctgttcgtgtacaagctggagcaggtgtctgagaagggcaaggcttacaccaactacttcggacggtgcaatgtggccgagcacgaaaagctgatcctgctggcccagctgaagcccgagaaggatagcgacgaagccgtgacatatagcctgggaaagtttgggcagagggccctggatttctacagcattcatgtgaccaaggagtccacccaccccgtgaagcccctggcccagatcgccggaaacagatacgcctccggacctgtgggaaaggccctgagcgacgcatgtatgggcacaatcgcctccttcctgtctaagtaccaggacatcatcatcgaacaccagaaggtggtgaagggcaaccagaagagactggagagcctgcgggagctggccggcaaggaaaacctggaataccctagcgtgaccctgccacctcagcctcacaccaaggagggcgttgatgcctacaacgaagtgatcgcccgggtgcgaatgtgggtgaacctgaacctgtggcagaagctgaagctaagcagagatgatgccaagcctctgctgagactgaagggattcccttcctttcctctggtcgagagacaggccaacgaagtggactggtgggacatggtgtgtaacgtgaagaagctgatcaacgagaaaaaggaggatggcaaggtgttttggcagaatctggctggctacaagagacaggaagccctgagaccatacctgagcagcgaggaagatcggaagaagggaaagaaattcgctcggtaccagctgggcgacctgctgctgcacctggaaaagaagcacggcgaggactggggaaaggtgtacgacgaggcctgggagcggattgacaagaaagtggaaggcctgagcaagcacatcaagctggaagaggaacggagaagcgaggacgcccagagcaaggccgccctgaccgactggctgcgggctaaggccagcttcgtgatcgagggcctgaaggaggccgacaaggacgagttctgcagatgcgagctgaagctgcagaagtggtacggggacctgcggggaaagcccttcgccatcgaagccgagaacagcatcctggacatcagcggcttcagcaagcagtacaactgtgccttcatctggcagaaggacggcgtgaagaagctgaacctgtacctgatcatcaactacttcaagggcggcaagctgcggttcaagaagatcaaacctgaagccttcgaagccaacagattctacaccgtgatcaacaaaaagagcggcgagatcgtgcccatggaggtgaacttcaacttcgacgaccccaacctgatcatcctgcctctggcctttggcaagagacagggcagagaattcatctggaacgacctgctgtccctggaaaccggcagcctgaagctggccaacggaagagtgatcgagaagacactgtacaacagaagaacccggcaggatgagcctgccctgttcgtggccctgaccttcgagcggcgggaggtcctggactcctccaatatcaaaccaatgaacctgatcggcgtggcaagaggcgaaaacatccccgccgtgatcgccctgaccgaccccgagggctgcccactgagccggtttaaggatagcctgggaaacccaacccacatcctgagaatcggcgagagctataaggagaagcagcggaccatccaggccaagaaggaggtggagcagcggagagccggcggctacagccggaagtacgccagcaaagccaagaatctggcagacgatatggtgagaaacaccgctagagatctgctgtactacgccgtgacccaggatgccatgctgatcttcgccaacctgagccggggcttcggccggcagggcaagcggaccttcatggccgagagacagtacacacggatggaggactggctgaccgccaagctggcctacgagggcctgagcaagacctacctgtccaagacactggcccagtacacctccaagacatgcagcaactgtgggtttaccatcaccagcgccgactacgacagggtgctggagaagctgaagaagacagcaacaggctggatgaccacaattaacggcaaggagctgaaggtggagggccagattacctactacaacagatacaagagacagaacgtagtcaaggacctgtccgtcgagctggatagactgagcgaagaatctgtgaacaacgacatctcctcctggacaaagggcagaagcggagaagctctgagcctcctgaagaaaagattctcccatagacccgtgcaggagaagttcgtgtgcctgaactgcggcttcgagacacacgcagccgagcaagccgccctgaacatcgccagatcctggctgttcctgcggagccaggagtacaagaaataccagacaaacaagacaaccggcaacaccgataagagagccttcgtcgagacctggcagtccttttaccggaagaagcttaaggaggtgtggaaacctgccgtgcggtctggcggatctggcggaggctccgagcccggcgccgtgagcttcgccgacgtggccgtgtacttctgcagggaggagtggggctgcctgaggcccgcccagaggaccctgtacagggacgtgatgagggagacctacggccacctgagcgccctgggcatcggcggcaagaagcccgccctgatcagctgggtggaggaggaggccgagctgtggggccccgccgcccaggaccccgaggtggccaagtgccccacccagaccgacggcggcccaagcagcggcgcccctcctcccagcggcggcagcccagccggctccccaacctctaccgaggagggcacctctgagtccgccacccccgagagcggccctggcacctccaccgagcccagcgagggcagcgcacccggcagccctgccggcagccccacctccacagaggagggaaccagcaccgagcccagcgaaggcagcgccccaggcaccagcaccgagcctagtgagcaggagattaaacggatcaacaagatcagaagaagacttgtgaaagacagcaacaccaagaaggccggcaagacaggccccatgaaaaccctgctggttagagtgatgacacccgatctgagagagcggctggaaaacctgagaaagaagcctgaaaatatcccccagcccatcagcaatacatctagagccaacctgaataagctgctgaccgattacaccgaaatgaagaaggcgatcctgcatgtgtactgggaagagttccagaaggaccctgtgggcctgatgagccgggtggcccagcctgccagcaagaagatcgatcagaacaagctgaaacctgagatggacgagaagggcaacctgaccaccgccggctttgcctgctctcagtgtggccagcccctgttcgtgtacaagctggagcaggtgtctgagaagggcaaggcttacaccaactacttcggacggtgcaatgtggccgagcacgaaaagctgatcctgctggcccagctgaagcccgagaaggatagcgacgaagccgtgacatatagcctgggaaagtttgggcagagggccctggatttctacagcattcatgtgaccaaggagtccacccaccccgtgaagcccctggcccagatcgccggaaacagatacgcctccggacctgtgggaaaggccctgagcgacgcatgtatgggcacaatcgcctccttcctgtctaagtaccaggacatcatcatcgaacaccagaaggtggtgaagggcaaccagaagagactggagagcctgcgggagctggccggcaaggaaaacctggaataccctagcgtgaccctgccacctcagcctcacaccaaggagggcgttgatgcctacaacgaagtgatcgcccgggtgcgaatgtgggtgaacctgaacctgtggcagaagctgaagctaagcagagatgatgccaagcctctgctgagactgaagggattcccttcctttcctctggtcgagagacaggccaacgaagtggactggtgggacatggtgtgtaacgtgaagaagctgatcaacgagaaaaaggaggatggcaaggtgttttggcagaatctggctggctacaagagacaggaagccctgagaccatacctgagcagcgaggaagatcggaagaagggaaagaaattcgctcggtaccagctgggcgacctgctgctgcacctggaaaagaagcacggcgaggactggggaaaggtgtacgacgaggcctgggagcggattgacaagaaagtggaaggcctgagcaagcacatcaagctggaagaggaacggagaagcgaggacgcccagagcaaggccgccctgaccgactggctgcgggctaaggccagcttcgtgatcgagggcctgaaggaggccgacaaggacgagttctgcagatgcgagctgaagctgcagaagtggtacggggacctgcggggaaagcccttcgccatcgaagccgagaacagcatcctggacatcagcggcttcagcaagcagtacaactgtgccttcatctggcagaaggacggcgtgaagaagctgaacctgtacctgatcatcaactacttcaagggcggcaagctgcggttcaagaagatcaaacctgaagccttcgaagccaacagattctacaccgtgatcaacaaaaagagcggcgagatcgtgcccatggaggtgaacttcaacttcgacgaccccaacctgatcatcctgcctctggcctttggcaagagacagggcagagaattcatctggaacgacctgctgtccctggaaaccggcagcctgaagctggccaacggaagagtgatcgagaagacactgtacaacagaagaacccggcaggatgagcctgccctgttcgtggccctgaccttcgagcggcgggaggtcctggactcctccaatatcaaaccaatgaacctgatcggcgtggcaagaggcgaaaacatccccgccgtgatcgccctgaccgaccccgagggctgcccactgagccggtttaaggatagcctgggaaacccaacccacatcctgagaatcggcgagagctataaggagaagcagcggaccatccaggccaagaaggaggtggagcagcggagagccggcggctacagccggaagtacgccagcaaagccaagaatctggcagacgatatggtgagaaacaccgctagagatctgctgtactacgccgtgacccaggatgccatgctgatcttcgccaacctgagccggggcttcggccggcagggcaagcggaccttcatggccgagagacagtacacacggatggaggactggctgaccgccaagctggcctacgagggcctgagcaagacctacctgtccaagacactggcccagtacacctccaagacatgcagcaactgtgggtttaccatcaccagcgccgactacgacagggtgctggagaagctgaagaagacagcaacaggctggatgaccacaattaacggcaaggagctgaaggtggagggccagattacctactacaacagatacaagagacagaacgtagtcaaggacctgtccgtcgagctggatagactgagcgaagaatctgtgaacaacgacatctcctcctggacaaagggcagaagcggagaagctctgagcctcctgaagaaaagattctcccatagacccgtgcaggagaagttcgtgtgcctgaactgcggcttcgagacacacgcagccgagcaagccgccctgaacatcgccagatcctggctgttcctgcggagccaggagtacaagaaataccagacaaacaagacaaccggcaacaccgataagagagccttcgtcgagacctggcagtccttttaccggaagaagcttaaggaggtgtggaaacctgccgtgcggtctggcggatctggcggaggctcctgagcccggcgccgtgagcttcgccgacgtggccgtgtacttctgcagggaggagtggggctgcctgaggcccgcccagaggaccctgtacagggacgtgatgagggagacctacggccacctgagcgccctgggcatcggcggcaagaagcccgccctgatcagctgggtggaggaggaggccgagctgtggggccccgccgcccaggaccccgaggtggccaagtgccccacccagaccgacggatctggctccggcagcggccccaagaaaaagagaaaagtctaagctgccttctgcggggcttgccttctggccatgcccttcttctctcccttgcacctgtacctcttggtctttgaataaagcctgagtaggaaggctagcaaaaaaaaaaaaaaaaaaaaaaaaaaaaaaaaaaaaaaaaaaaaaaaaaaaaaaaaaaaaaaaaaaaaaaaaaaaaaaaa

SEQ ID NO: 16852 - RNA, 9485 nt, synthetic construct
  source 1..9485: mol_type = other RNA
aggaaataagagagaaaagaagagtaagaagaaatataagagccaccatggcccctaagaagaagcgtaaagtgagccggatggaacgcctcgtctacgaggtgcggcagaagtgcagaaacatcgaggacatctgcatctcctgcggatctctgaacgtgaccctggagcacccactgttcatcggcggcatgtgccagaactgtaaaaactgttttctggagtgtgcctatcaatacgacgatgacggctaccagagctactgcaccatctgttgcggcggaagagaggtgctgatgtgtggaaataacaactgctgccggtgcttctgcgtggaatgcgtggacctgctggtgggccccggcgccgcccaggccgctattaaggaagatccttggaactgctacatgtgcggccacaagggcacatacggcctgctgagacggagagaggactggcctagcagactgcagatgttcttcgccaataaccacgaccaggagttcgacccccctaaggtgtaccctcccgtccccgccgagaagagaaagcccatccgggtcctgagcctgttcgatggcatcgccaccggtctgctggtgctgaaggacctgggcatccaggtggataggtacattgcctccgaggtgtgcgaggactccatcaccgtgggaatggtgcgtcatcagggcaagatcatgtacgtgggcgacgtgcggagcgtgacacagaagcatatccaggagtggggccctttcgacctggtgatcggcggcagcccttgcaatgacctgagcatcgtgaacccagcccggaagggcctgtacgagggaaccggcagactgttcttcgagttttacagactgctgcacgacgcccggcctaaggaaggcgacgaccggcccttcttttggctgttcgagaatgtggtggccatgggagtcagcgacaagcgggatattagccggttcctggagagcaaccccgtgatgatcgatgccaaggaagtgagcgccgcccaccgggccagatacttctggggcaatctgcctggcatgaacagacccctggccagcaccgtgaacgacaagctggagctgcaggagtgcctggagcacggccggatcgccaagttcagcaaggtgagaaccatcaccacccgaagcaacagcatcaaacaaggcaaggaccagcactttcctgtgttcatgaacgagaaggaggacatcctgtggtgtaccgagatggagagagtgttcgggttcccagtccactacacagatgtcagcaacatgtctagactggccagacagagactgctgggaagaagctggtccgtccctgtgatcagacacctgttcgcccctctgaaggagtacttcgcctgcgtgagcagcggcaacagcaacgccaacagccggggccccagcttctctagcggcctggtgccactgtccctgagagggagccacatgggccccatggagatctacaaaaccgtgagcgcctggaagcggcagcctgtgcgcgtgctgagcctgtttcggaatatcgataaagtcctgaaaagcctgggattcctggagagcggctctggctccggcggtggcaccctgaagtacgtggaggatgtgacaaacgtggtcagacgggatgtggagaagtggggccccttcgatctggtgtacggcagcacccaacccctgggcagctcttgtgaccggtgccctggctggtacatgtttcagttccaccggatcctgcagtacgccctgccgagacaggagtcccagcggccattcttttggattttcatggacaacttgctgctgaccgaggatgaccaggaaactaccactcggttcctgcagaccgaagccgtgaccctgcaggacgtgagaggccgggactaccagaacgccatgcgggtgtggtccaacatccctggactgaaaagcaagcacgcacctctgacccctaaagaagaggagtacctgcaggcccaggtgcggagcagaagcaagctggacgcccctaaggtggatctgctggtgaagaattgcctcctgcccctgagagagtacttcaagtatttcagccagaatagtctgcccctgggaggcagcggcggcggcgccctggtgacatttgaggacgtcgccgtgcggttcacccaggaggaatgggctctgctggatccttctcagaaaatcctgtaccgggacgtgatgagagagacataccggaatctgacctccgtgggcatcaactgggaatgttgggaccttgaagcctgcttcagaagcctgggaagaaacctgagagtgcaggtggtgaagagaaagtgcgagctgaccaacagcggcccctgcgccgagggcggcccaagcagcggcgcccctcctcccagcggcggcagcccagccggctccccaacctctaccgaggagggcacctctgagtccgccacccccgagagcggccctggcacctccaccgagcccagcgagggcagcgcacccggcagccctgccggcagccccacctccacagaggagggaaccagcaccgagcccagcgaaggcagcgccccaggcaccagcaccgagcctagtgagcaggagattaaacggatcaacaagatcagaagaagacttgtgaaagacagcaacaccaagaaggccggcaagacaggccccatgaaaaccctgctggttagagtgatgacacccgatctgagagagcggctggaaaacctgagaaagaagcctgaaaatatcccccagcccatcagcaatacatctagagccaacctgaataagctgctgaccgattacaccgaaatgaagaaggcgatcctgcatgtgtactgggaagagttccagaaggaccctgtgggcctgatgagccgggtggcccagcctgccagcaagaagatcgatcagaacaagctgaaacctgagatggacgagaagggcaacctgaccaccgccggctttgcctgctctcagtgtggccagcccctgttcgtgtacaagctggagcaggtgtctgagaagggcaaggcttacaccaactacttcggacggtgcaatgtggccgagcacgaaaagctgatcctgctggcccagctgaagcccgagaaggatagcgacgaagccgtgacatatagcctgggaaagtttgggcagagggccctggatttctacagcattcatgtgaccaaggagtccacccaccccgtgaagcccctggcccagatcgccggaaacagatacgcctccggacctgtgggaaaggccctgagcgacgcatgtatgggcacaatcgcctccttcctgtctaagtaccaggacatcatcatcgaacaccagaaggtggtgaagggcaaccagaagagactggagagcctgcgggagctggccggcaaggaaaacctggaataccctagcgtgaccctgccacctcagcctcacaccaaggagggcgttgatgcctacaacgaagtgatcgcccgggtgcgaatgtgggtgaacctgaacctgtggcagaagctgaagctaagcagagatgatgccaagcctctgctgagactgaagggattcccttcctttcctctggtcgagagacaggccaacgaagtggactggtgggacatggtgtgtaacgtgaagaagctgatcaacgagaaaaaggaggatggcaaggtgttttggcagaatctggctggctacaagagacaggaagccctgagaccatacctgagcagcgaggaagatcggaagaagggaaagaaattcgctcggtaccagctgggcgacctgctgctgcacctggaaaagaagcacggcgaggactggggaaaggtgtacgacgaggcctgggagcggattgacaagaaagtggaaggcctgagcaagcacatcaagctggaagaggaacggagaagcgaggacgcccagagcaaggccgccctgaccgactggctgcgggctaaggccagcttcgtgatcgagggcctgaaggaggccgacaaggacgagttctgcagatgcgagctgaagctgcagaagtggtacggggacctgcggggaaagcccttcgccatcgaagccgagaacagcatcctggacatcagcggcttcagcaagcagtacaactgtgccttcatctggcagaaggacggcgtgaagaagctgaacctgtacctgatcatcaactacttcaagggcggcaagctgcggttcaagaagatcaaacctgaagccttcgaagccaacagattctacaccgtgatcaacaaaaagagcggcgagatcgtgcccatggaggtgaacttcaacttcgacgaccccaacctgatcatcctgcctctggcctttggcaagagacagggcagagaattcatctggaacgacctgctgtccctggaaaccggcagcctgaagctggccaacggaagagtgatcgagaagacactgtacaacagaagaacccggcaggatgagcctgccctgttcgtggccctgaccttcgagcggcgggaggtcctggactcctccaatatcaaaccaatgaacctgatcggcgtggcaagaggcgaaaacatccccgccgtgatcgccctgaccgaccccgagggctgcccactgagccggtttaaggatagcctgggaaacccaacccacatcctgagaatcggcgagagctataaggagaagcagcggaccatccaggccaagaaggaggtggagcagcggagagccggcggctacagccggaagtacgccagcaaagccaagaatctggcagacgatatggtgagaaacaccgctagagatctgctgtactacgccgtgacccaggatgccatgctgatcttcgccaacctgagccggggcttcggccggcagggcaagcggaccttcatggccgagagacagtacacacggatggaggactggctgaccgccaagctggcctacgagggcctgagcaagacctacctgtccaagacactggcccagtacacctccaagacatgcagcaactgtgggtttaccatcaccagcgccgactacgacagggtgctggagaagctgaagaagacagcaacaggctggatgaccacaattaacggcaaggagctgaaggtggagggccagattacctactacaacagatacaagagacagaacgtagtcaaggacctgtccgtcgagctggatagactgagcgaagaatctgtgaacaacgacatctcctcctggacaaagggcagaagcggagaagctctgagcctcctgaagaaaagattctcccatagacccgtgcaggagaagttcgtgtgcctgaactgcggcttcgagacacacgcagccgagcaagccgccctgaacatcgccagatcctggctgttcctgcggagccaggagtacaagaaataccagacaaacaagacaaccggcaacaccgataagagagccttcgtcgagacctggcagtccttttaccggaagaagcttaaggaggtgtggaaacctgccgtgcggtctggcggatctggcggaggctccgcccagatgctggtgaccttcgaggaggtggccgtgtacttcacccagggccagggcgccctgctgggccccgcccagagggccctgtacagggacgtgatgcaggagaactacgagatggtgaccagcctgggcttcagcctgcccaagcccgagctgatcagcaggctggagaggggcgaggagccctgggtgcccgacctgcaggcctgcgagaagagggagagcctgaggggcgccaggggcggcccaagcagcggcgcccctcctcccagcggcggcagcccagccggctccccaacctctaccgaggagggcacctctgagtccgccacccccgagagcggccctggcacctccaccgagcccagcgagggcagcgcacccggcagccctgccggcagccccacctccacagaggagggaaccagcaccgagcccagcgaaggcagcgccccaggcaccagcaccgagcctagtgagcaggagattaaacggatcaacaagatcagaagaagacttgtgaaagacagcaacaccaagaaggccggcaagacaggccccatgaaaaccctgctggttagagtgatgacacccgatctgagagagcggctggaaaacctgagaaagaagcctgaaaatatcccccagcccatcagcaatacatctagagccaacctgaataagctgctgaccgattacaccgaaatgaagaaggcgatcctgcatgtgtactgggaagagttccagaaggaccctgtgggcctgatgagccgggtggcccagcctgccagcaagaagatcgatcagaacaagctgaaacctgagatggacgagaagggcaacctgaccaccgccggctttgcctgctctcagtgtggccagcccctgttcgtgtacaagctggagcaggtgtctgagaagggcaaggcttacaccaactacttcggacggtgcaatgtggccgagcacgaaaagctgatcctgctggcccagctgaagcccgagaaggatagcgacgaagccgtgacatatagcctgggaaagtttgggcagagggccctggatttctacagcattcatgtgaccaaggagtccacccaccccgtgaagcccctggcccagatcgccggaaacagatacgcctccggacctgtgggaaaggccctgagcgacgcatgtatgggcacaatcgcctccttcctgtctaagtaccaggacatcatcatcgaacaccagaaggtggtgaagggcaaccagaagagactggagagcctgcgggagctggccggcaaggaaaacctggaataccctagcgtgaccctgccacctcagcctcacaccaaggagggcgttgatgcctacaacgaagtgatcgcccgggtgcgaatgtgggtgaacctgaacctgtggcagaagctgaagctaagcagagatgatgccaagcctctgctgagactgaagggattcccttcctttcctctggtcgagagacaggccaacgaagtggactggtgggacatggtgtgtaacgtgaagaagctgatcaacgagaaaaaggaggatggcaaggtgttttggcagaatctggctggctacaagagacaggaagccctgagaccatacctgagcagcgaggaagatcggaagaagggaaagaaattcgctcggtaccagctgggcgacctgctgctgcacctggaaaagaagcacggcgaggactggggaaaggtgtacgacgaggcctgggagcggattgacaagaaagtggaaggcctgagcaagcacatcaagctggaagaggaacggagaagcgaggacgcccagagcaaggccgccctgaccgactggctgcgggctaaggccagcttcgtgatcgagggcctgaaggaggccgacaaggacgagttctgcagatgcgagctgaagctgcagaagtggtacggggacctgcggggaaagcccttcgccatcgaagccgagaacagcatcctggacatcagcggcttcagcaagcagtacaactgtgccttcatctggcagaaggacggcgtgaagaagctgaacctgtacctgatcatcaactacttcaagggcggcaagctgcggttcaagaagatcaaacctgaagccttcgaagccaacagattctacaccgtgatcaacaaaaagagcggcgagatcgtgcccatggaggtgaacttcaacttcgacgaccccaacctgatcatcctgcctctggcctttggcaagagacagggcagagaattcatctggaacgacctgctgtccctggaaaccggcagcctgaagctggccaacggaagagtgatcgagaagacactgtacaacagaagaacccggcaggatgagcctgccctgttcgtggccctgaccttcgagcggcgggaggtcctggactcctccaatatcaaaccaatgaacctgatcggcgtggcaagaggcgaaaacatccccgccgtgatcgccctgaccgaccccgagggctgcccactgagccggtttaaggatagcctgggaaacccaacccacatcctgagaatcggcgagagctataaggagaagcagcggaccatccaggccaagaaggaggtggagcagcggagagccggcggctacagccggaagtacgccagcaaagccaagaatctggcagacgatatggtgagaaacaccgctagagatctgctgtactacgccgtgacccaggatgccatgctgatcttcgccaacctgagccggggcttcggccggcagggcaagcggaccttcatggccgagagacagtacacacggatggaggactggctgaccgccaagctggcctacgagggcctgagcaagacctacctgtccaagacactggcccagtacacctccaagacatgcagcaactgtgggtttaccatcaccagcgccgactacgacagggtgctggagaagctgaagaagacagcaacaggctggatgaccacaattaacggcaaggagctgaaggtggagggccagattacctactacaacagatacaagagacagaacgtagtcaaggacctgtccgtcgagctggatagactgagcgaagaatctgtgaacaacgacatctcctcctggacaaagggcagaagcggagaagctctgagcctcctgaagaaaagattctcccatagacccgtgcaggagaagttcgtgtgcctgaactgcggcttcgagacacacgcagccgagcaagccgccctgaacatcgccagatcctggctgttcctgcggagccaggagtacaagaaataccagacaaacaagacaaccggcaacaccgataagagagccttcgtcgagacctggcagtccttttaccggaagaagcttaaggaggtgtggaaacctgccgtgcggtctggcggatctggcggaggctcctgcccagatgctggtgaccttcgaggaggtggccgtgtacttcacccagggccagggcgccctgctgggccccgcccagagggccctgtacagggacgtgatgcaggagaactacgagatggtgaccagcctgggcttcagcctgcccaagcccgagctgatcagcaggctggagaggggcgaggagccctgggtgcccgacctgcaggcctgcgagaagagggagagcctgaggggcgccaggggatctggctccggcagcggccccaagaaaaagagaaaagtctaagctgccttctgcggggcttgccttctggccatgcccttcttctctcccttgcacctgtacctcttggtctttgaataaagcctgagtaggaaggctagcaaaaaaaaaaaaaaaaaaaaaaaaaaaaaaaaaaaaaaaaaaaaaaaaaaaaaaaaaaaaaaaaaaaaaaaaaaaaaaaa

SEQ ID NO: 16853 - RNA, 9485 nt, synthetic construct
  source 1..9485: mol_type = other RNA
aggaaataagagagaaaagaagagtaagaagaaatataagagccaccatggcccctaagaagaagcgtaaagtgagccggatggaacgcctcgtctacgaggtgcggcagaagtgcagaaacatcgaggacatctgcatctcctgcggatctctgaacgtgaccctggagcacccactgttcatcggcggcatgtgccagaactgtaaaaactgttttctggagtgtgcctatcaatacgacgatgacggctaccagagctactgcaccatctgttgcggcggaagagaggtgctgatgtgtggaaataacaactgctgccggtgcttctgcgtggaatgcgtggacctgctggtgggccccggcgccgcccaggccgctattaaggaagatccttggaactgctacatgtgcggccacaagggcacatacggcctgctgagacggagagaggactggcctagcagactgcagatgttcttcgccaataaccacgaccaggagttcgacccccctaaggtgtaccctcccgtccccgccgagaagagaaagcccatccgggtcctgagcctgttcgatggcatcgccaccggtctgctggtgctgaaggacctgggcatccaggtggataggtacattgcctccgaggtgtgcgaggactccatcaccgtgggaatggtgcgtcatcagggcaagatcatgtacgtgggcgacgtgcggagcgtgacacagaagcatatccaggagtggggccctttcgacctggtgatcggcggcagcccttgcaatgacctgagcatcgtgaacccagcccggaagggcctgtacgagggaaccggcagactgttcttcgagttttacagactgctgcacgacgcccggcctaaggaaggcgacgaccggcccttcttttggctgttcgagaatgtggtggccatgggagtcagcgacaagcgggatattagccggttcctggagagcaaccccgtgatgatcgatgccaaggaagtgagcgccgcccaccgggccagatacttctggggcaatctgcctggcatgaacagacccctggccagcaccgtgaacgacaagctggagctgcaggagtgcctggagcacggccggatcgccaagttcagcaaggtgagaaccatcaccacccgaagcaacagcatcaaacaaggcaaggaccagcactttcctgtgttcatgaacgagaaggaggacatcctgtggtgtaccgagatggagagagtgttcgggttcccagtccactacacagatgtcagcaacatgtctagactggccagacagagactgctgggaagaagctggtccgtccctgtgatcagacacctgttcgcccctctgaaggagtacttcgcctgcgtgagcagcggcaacagcaacgccaacagccggggccccagcttctctagcggcctggtgccactgtccctgagagggagccacatgggccccatggagatctacaaaaccgtgagcgcctggaagcggcagcctgtgcgcgtgctgagcctgtttcggaatatcgataaagtcctgaaaagcctgggattcctggagagcggctctggctccggcggtggcaccctgaagtacgtggaggatgtgacaaacgtggtcagacgggatgtggagaagtggggccccttcgatctggtgtacggcagcacccaacccctgggcagctcttgtgaccggtgccctggctggtacatgtttcagttccaccggatcctgcagtacgccctgccgagacaggagtcccagcggccattcttttggattttcatggacaacttgctgctgaccgaggatgaccaggaaactaccactcggttcctgcagaccgaagccgtgaccctgcaggacgtgagaggccgggactaccagaacgccatgcgggtgtggtccaacatccctggactgaaaagcaagcacgcacctctgacccctaaagaagaggagtacctgcaggcccaggtgcggagcagaagcaagctggacgcccctaaggtggatctgctggtgaagaattgcctcctgcccctgagagagtacttcaagtatttcagccagaatagtctgcccctgggaggcagcggcggcggcgccctggtgacatttgaggacgtcgccgtgcggttcacccaggaggaatgggctctgctggatccttctcagaaaatcctgtaccgggacgtgatgagagagacataccggaatctgacctccgtgggcatcaactgggaatgttgggaccttgaagcctgcttcagaagcctgggaagaaacctgagagtgcaggtggtgaagagaaagtgcgagctgaccaacagcggcccctgcgccgagggcggcccaagcagcggcgcccctcctcccagcggcggcagcccagccggctccccaacctctaccgaggagggcacctctgagtccgccacccccgagagcggccctggcacctccaccgagcccagcgagggcagcgcacccggcagccctgccggcagccccacctccacagaggagggaaccagcaccgagcccagcgaaggcagcgccccaggcaccagcaccgagcctagtgagcaggagattaaacggatcaacaagatcagaagaagacttgtgaaagacagcaacaccaagaaggccggcaagacaggccccatgaaaaccctgctggttagagtgatgacacccgatctgagagagcggctggaaaacctgagaaagaagcctgaaaatatcccccagcccatcagcaatacatctagagccaacctgaataagctgctgaccgattacaccgaaatgaagaaggcgatcctgcatgtgtactgggaagagttccagaaggaccctgtgggcctgatgagccgggtggcccagcctgccagcaagaagatcgatcagaacaagctgaaacctgagatggacgagaagggcaacctgaccaccgccggctttgcctgctctcagtgtggccagcccctgttcgtgtacaagctggagcaggtgtctgagaagggcaaggcttacaccaactacttcggacggtgcaatgtggccgagcacgaaaagctgatcctgctggcccagctgaagcccgagaaggatagcgacgaagccgtgacatatagcctgggaaagtttgggcagagggccctggatttctacagcattcatgtgaccaaggagtccacccaccccgtgaagcccctggcccagatcgccggaaacagatacgcctccggacctgtgggaaaggccctgagcgacgcatgtatgggcacaatcgcctccttcctgtctaagtaccaggacatcatcatcgaacaccagaaggtggtgaagggcaaccagaagagactggagagcctgcgggagctggccggcaaggaaaacctggaataccctagcgtgaccctgccacctcagcctcacaccaaggagggcgttgatgcctacaacgaagtgatcgcccgggtgcgaatgtgggtgaacctgaacctgtggcagaagctgaagctaagcagagatgatgccaagcctctgctgagactgaagggattcccttcctttcctctggtcgagagacaggccaacgaagtggactggtgggacatggtgtgtaacgtgaagaagctgatcaacgagaaaaaggaggatggcaaggtgttttggcagaatctggctggctacaagagacaggaagccctgagaccatacctgagcagcgaggaagatcggaagaagggaaagaaattcgctcggtaccagctgggcgacctgctgctgcacctggaaaagaagcacggcgaggactggggaaaggtgtacgacgaggcctgggagcggattgacaagaaagtggaaggcctgagcaagcacatcaagctggaagaggaacggagaagcgaggacgcccagagcaaggccgccctgaccgactggctgcgggctaaggccagcttcgtgatcgagggcctgaaggaggccgacaaggacgagttctgcagatgcgagctgaagctgcagaagtggtacggggacctgcggggaaagcccttcgccatcgaagccgagaacagcatcctggacatcagcggcttcagcaagcagtacaactgtgccttcatctggcagaaggacggcgtgaagaagctgaacctgtacctgatcatcaactacttcaagggcggcaagctgcggttcaagaagatcaaacctgaagccttcgaagccaacagattctacaccgtgatcaacaaaaagagcggcgagatcgtgcccatggaggtgaacttcaacttcgacgaccccaacctgatcatcctgcctctggcctttggcaagagacagggcagagaattcatctggaacgacctgctgtccctggaaaccggcagcctgaagctggccaacggaagagtgatcgagaagacactgtacaacagaagaacccggcaggatgagcctgccctgttcgtggccctgaccttcgagcggcgggaggtcctggactcctccaatatcaaaccaatgaacctgatcggcgtggcaagaggcgaaaacatccccgccgtgatcgccctgaccgaccccgagggctgcccactgagccggtttaaggatagcctgggaaacccaacccacatcctgagaatcggcgagagctataaggagaagcagcggaccatccaggccaagaaggaggtggagcagcggagagccggcggctacagccggaagtacgccagcaaagccaagaatctggcagacgatatggtgagaaacaccgctagagatctgctgtactacgccgtgacccaggatgccatgctgatcttcgccaacctgagccggggcttcggccggcagggcaagcggaccttcatggccgagagacagtacacacggatggaggactggctgaccgccaagctggcctacgagggcctgagcaagacctacctgtccaagacactggcccagtacacctccaagacatgcagcaactgtgggtttaccatcaccagcgccgactacgacagggtgctggagaagctgaagaagacagcaacaggctggatgaccacaattaacggcaaggagctgaaggtggagggccagattacctactacaacagatacaagagacagaacgtagtcaaggacctgtccgtcgagctggatagactgagcgaagaatctgtgaacaacgacatctcctcctggacaaagggcagaagcggagaagctctgagcctcctgaagaaaagattctcccatagacccgtgcaggagaagttcgtgtgcctgaactgcggcttcgagacacacgcagccgagcaagccgccctgaacatcgccagatcctggctgttcctgcggagccaggagtacaagaaataccagacaaacaagacaaccggcaacaccgataagagagccttcgtcgagacctggcagtccttttaccggaagaagcttaaggaggtgtggaaacctgccgtgcggtctggcggatctggcggaggctccggcgccagggtgctggtgagcttcgccgacgtggccgtgtacttcagccccgaggagtggggcaggctgaggcccgagcagagggccctgtacagggacgtgatgagggagacctacggccacctgggcgccctgggcttccccggccccaagcccgccctgatcagctggatggaggaggccgcctgggacagcgaggccaagcccgtgatcaagaggctggaggacgtgggccagccccccggcggcccaagcagcggcgcccctcctcccagcggcggcagcccagccggctccccaacctctaccgaggagggcacctctgagtccgccacccccgagagcggccctggcacctccaccgagcccagcgagggcagcgcacccggcagccctgccggcagccccacctccacagaggagggaaccagcaccgagcccagcgaaggcagcgccccaggcaccagcaccgagcctagtgagcaggagattaaacggatcaacaagatcagaagaagacttgtgaaagacagcaacaccaagaaggccggcaagacaggccccatgaaaaccctgctggttagagtgatgacacccgatctgagagagcggctggaaaacctgagaaagaagcctgaaaatatcccccagcccatcagcaatacatctagagccaacctgaataagctgctgaccgattacaccgaaatgaagaaggcgatcctgcatgtgtactgggaagagttccagaaggaccctgtgggcctgatgagccgggtggcccagcctgccagcaagaagatcgatcagaacaagctgaaacctgagatggacgagaagggcaacctgaccaccgccggctttgcctgctctcagtgtggccagcccctgttcgtgtacaagctggagcaggtgtctgagaagggcaaggcttacaccaactacttcggacggtgcaatgtggccgagcacgaaaagctgatcctgctggcccagctgaagcccgagaaggatagcgacgaagccgtgacatatagcctgggaaagtttgggcagagggccctggatttctacagcattcatgtgaccaaggagtccacccaccccgtgaagcccctggcccagatcgccggaaacagatacgcctccggacctgtgggaaaggccctgagcgacgcatgtatgggcacaatcgcctccttcctgtctaagtaccaggacatcatcatcgaacaccagaaggtggtgaagggcaaccagaagagactggagagcctgcgggagctggccggcaaggaaaacctggaataccctagcgtgaccctgccacctcagcctcacaccaaggagggcgttgatgcctacaacgaagtgatcgcccgggtgcgaatgtgggtgaacctgaacctgtggcagaagctgaagctaagcagagatgatgccaagcctctgctgagactgaagggattcccttcctttcctctggtcgagagacaggccaacgaagtggactggtgggacatggtgtgtaacgtgaagaagctgatcaacgagaaaaaggaggatggcaaggtgttttggcagaatctggctggctacaagagacaggaagccctgagaccatacctgagcagcgaggaagatcggaagaagggaaagaaattcgctcggtaccagctgggcgacctgctgctgcacctggaaaagaagcacggcgaggactggggaaaggtgtacgacgaggcctgggagcggattgacaagaaagtggaaggcctgagcaagcacatcaagctggaagaggaacggagaagcgaggacgcccagagcaaggccgccctgaccgactggctgcgggctaaggccagcttcgtgatcgagggcctgaaggaggccgacaaggacgagttctgcagatgcgagctgaagctgcagaagtggtacggggacctgcggggaaagcccttcgccatcgaagccgagaacagcatcctggacatcagcggcttcagcaagcagtacaactgtgccttcatctggcagaaggacggcgtgaagaagctgaacctgtacctgatcatcaactacttcaagggcggcaagctgcggttcaagaagatcaaacctgaagccttcgaagccaacagattctacaccgtgatcaacaaaaagagcggcgagatcgtgcccatggaggtgaacttcaacttcgacgaccccaacctgatcatcctgcctctggcctttggcaagagacagggcagagaattcatctggaacgacctgctgtccctggaaaccggcagcctgaagctggccaacggaagagtgatcgagaagacactgtacaacagaagaacccggcaggatgagcctgccctgttcgtggccctgaccttcgagcggcgggaggtcctggactcctccaatatcaaaccaatgaacctgatcggcgtggcaagaggcgaaaacatccccgccgtgatcgccctgaccgaccccgagggctgcccactgagccggtttaaggatagcctgggaaacccaacccacatcctgagaatcggcgagagctataaggagaagcagcggaccatccaggccaagaaggaggtggagcagcggagagccggcggctacagccggaagtacgccagcaaagccaagaatctggcagacgatatggtgagaaacaccgctagagatctgctgtactacgccgtgacccaggatgccatgctgatcttcgccaacctgagccggggcttcggccggcagggcaagcggaccttcatggccgagagacagtacacacggatggaggactggctgaccgccaagctggcctacgagggcctgagcaagacctacctgtccaagacactggcccagtacacctccaagacatgcagcaactgtgggtttaccatcaccagcgccgactacgacagggtgctggagaagctgaagaagacagcaacaggctggatgaccacaattaacggcaaggagctgaaggtggagggccagattacctactacaacagatacaagagacagaacgtagtcaaggacctgtccgtcgagctggatagactgagcgaagaatctgtgaacaacgacatctcctcctggacaaagggcagaagcggagaagctctgagcctcctgaagaaaagattctcccatagacccgtgcaggagaagttcgtgtgcctgaactgcggcttcgagacacacgcagccgagcaagccgccctgaacatcgccagatcctggctgttcctgcggagccaggagtacaagaaataccagacaaacaagacaaccggcaacaccgataagagagccttcgtcgagacctggcagtccttttaccggaagaagcttaaggaggtgtggaaacctgccgtgcggtctggcggatctggcggaggctcctggcgccagggtgctggtgagcttcgccgacgtggccgtgtacttcagccccgaggagtggggcaggctgaggcccgagcagagggccctgtacagggacgtgatgagggagacctacggccacctgggcgccctgggcttccccggccccaagcccgccctgatcagctggatggaggaggccgcctgggacagcgaggccaagcccgtgatcaagaggctggaggacgtgggccagccccccggatctggctccggcagcggccccaagaaaaagagaaaagtctaagctgccttctgcggggcttgccttctggccatgcccttcttctctcccttgcacctgtacctcttggtctttgaataaagcctgagtaggaaggctagcaaaaaaaaaaaaaaaaaaaaaaaaaaaaaaaaaaaaaaaaaaaaaaaaaaaaaaaaaaaaaaaaaaaaaaaaaaaaaaaa

SEQ ID NO: 16854 - RNA, 9485 nt, synthetic construct
  source 1..9485: mol_type = other RNA
aggaaataagagagaaaagaagagtaagaagaaatataagagccaccatggcccctaagaagaagcgtaaagtgagccggatggaacgcctcgtctacgaggtgcggcagaagtgcagaaacatcgaggacatctgcatctcctgcggatctctgaacgtgaccctggagcacccactgttcatcggcggcatgtgccagaactgtaaaaactgttttctggagtgtgcctatcaatacgacgatgacggctaccagagctactgcaccatctgttgcggcggaagagaggtgctgatgtgtggaaataacaactgctgccggtgcttctgcgtggaatgcgtggacctgctggtgggccccggcgccgcccaggccgctattaaggaagatccttggaactgctacatgtgcggccacaagggcacatacggcctgctgagacggagagaggactggcctagcagactgcagatgttcttcgccaataaccacgaccaggagttcgacccccctaaggtgtaccctcccgtccccgccgagaagagaaagcccatccgggtcctgagcctgttcgatggcatcgccaccggtctgctggtgctgaaggacctgggcatccaggtggataggtacattgcctccgaggtgtgcgaggactccatcaccgtgggaatggtgcgtcatcagggcaagatcatgtacgtgggcgacgtgcggagcgtgacacagaagcatatccaggagtggggccctttcgacctggtgatcggcggcagcccttgcaatgacctgagcatcgtgaacccagcccggaagggcctgtacgagggaaccggcagactgttcttcgagttttacagactgctgcacgacgcccggcctaaggaaggcgacgaccggcccttcttttggctgttcgagaatgtggtggccatgggagtcagcgacaagcgggatattagccggttcctggagagcaaccccgtgatgatcgatgccaaggaagtgagcgccgcccaccgggccagatacttctggggcaatctgcctggcatgaacagacccctggccagcaccgtgaacgacaagctggagctgcaggagtgcctggagcacggccggatcgccaagttcagcaaggtgagaaccatcaccacccgaagcaacagcatcaaacaaggcaaggaccagcactttcctgtgttcatgaacgagaaggaggacatcctgtggtgtaccgagatggagagagtgttcgggttcccagtccactacacagatgtcagcaacatgtctagactggccagacagagactgctgggaagaagctggtccgtccctgtgatcagacacctgttcgcccctctgaaggagtacttcgcctgcgtgagcagcggcaacagcaacgccaacagccggggccccagcttctctagcggcctggtgccactgtccctgagagggagccacatgggccccatggagatctacaaaaccgtgagcgcctggaagcggcagcctgtgcgcgtgctgagcctgtttcggaatatcgataaagtcctgaaaagcctgggattcctggagagcggctctggctccggcggtggcaccctgaagtacgtggaggatgtgacaaacgtggtcagacgggatgtggagaagtggggccccttcgatctggtgtacggcagcacccaacccctgggcagctcttgtgaccggtgccctggctggtacatgtttcagttccaccggatcctgcagtacgccctgccgagacaggagtcccagcggccattcttttggattttcatggacaacttgctgctgaccgaggatgaccaggaaactaccactcggttcctgcagaccgaagccgtgaccctgcaggacgtgagaggccgggactaccagaacgccatgcgggtgtggtccaacatccctggactgaaaagcaagcacgcacctctgacccctaaagaagaggagtacctgcaggcccaggtgcggagcagaagcaagctggacgcccctaaggtggatctgctggtgaagaattgcctcctgcccctgagagagtacttcaagtatttcagccagaatagtctgcccctgggaggcagcggcggcggcgccctggtgacatttgaggacgtcgccgtgcggttcacccaggaggaatgggctctgctggatccttctcagaaaatcctgtaccgggacgtgatgagagagacataccggaatctgacctccgtgggcatcaactgggaatgttgggaccttgaagcctgcttcagaagcctgggaagaaacctgagagtgcaggtggtgaagagaaagtgcgagctgaccaacagcggcccctgcgccgagggcggcccaagcagcggcgcccctcctcccagcggcggcagcccagccggctccccaacctctaccgaggagggcacctctgagtccgccacccccgagagcggccctggcacctccaccgagcccagcgagggcagcgcacccggcagccctgccggcagccccacctccacagaggagggaaccagcaccgagcccagcgaaggcagcgccccaggcaccagcaccgagcctagtgagcaggagattaaacggatcaacaagatcagaagaagacttgtgaaagacagcaacaccaagaaggccggcaagacaggccccatgaaaaccctgctggttagagtgatgacacccgatctgagagagcggctggaaaacctgagaaagaagcctgaaaatatcccccagcccatcagcaatacatctagagccaacctgaataagctgctgaccgattacaccgaaatgaagaaggcgatcctgcatgtgtactgggaagagttccagaaggaccctgtgggcctgatgagccgggtggcccagcctgccagcaagaagatcgatcagaacaagctgaaacctgagatggacgagaagggcaacctgaccaccgccggctttgcctgctctcagtgtggccagcccctgttcgtgtacaagctggagcaggtgtctgagaagggcaaggcttacaccaactacttcggacggtgcaatgtggccgagcacgaaaagctgatcctgctggcccagctgaagcccgagaaggatagcgacgaagccgtgacatatagcctgggaaagtttgggcagagggccctggatttctacagcattcatgtgaccaaggagtccacccaccccgtgaagcccctggcccagatcgccggaaacagatacgcctccggacctgtgggaaaggccctgagcgacgcatgtatgggcacaatcgcctccttcctgtctaagtaccaggacatcatcatcgaacaccagaaggtggtgaagggcaaccagaagagactggagagcctgcgggagctggccggcaaggaaaacctggaataccctagcgtgaccctgccacctcagcctcacaccaaggagggcgttgatgcctacaacgaagtgatcgcccgggtgcgaatgtgggtgaacctgaacctgtggcagaagctgaagctaagcagagatgatgccaagcctctgctgagactgaagggattcccttcctttcctctggtcgagagacaggccaacgaagtggactggtgggacatggtgtgtaacgtgaagaagctgatcaacgagaaaaaggaggatggcaaggtgttttggcagaatctggctggctacaagagacaggaagccctgagaccatacctgagcagcgaggaagatcggaagaagggaaagaaattcgctcggtaccagctgggcgacctgctgctgcacctggaaaagaagcacggcgaggactggggaaaggtgtacgacgaggcctgggagcggattgacaagaaagtggaaggcctgagcaagcacatcaagctggaagaggaacggagaagcgaggacgcccagagcaaggccgccctgaccgactggctgcgggctaaggccagcttcgtgatcgagggcctgaaggaggccgacaaggacgagttctgcagatgcgagctgaagctgcagaagtggtacggggacctgcggggaaagcccttcgccatcgaagccgagaacagcatcctggacatcagcggcttcagcaagcagtacaactgtgccttcatctggcagaaggacggcgtgaagaagctgaacctgtacctgatcatcaactacttcaagggcggcaagctgcggttcaagaagatcaaacctgaagccttcgaagccaacagattctacaccgtgatcaacaaaaagagcggcgagatcgtgcccatggaggtgaacttcaacttcgacgaccccaacctgatcatcctgcctctggcctttggcaagagacagggcagagaattcatctggaacgacctgctgtccctggaaaccggcagcctgaagctggccaacggaagagtgatcgagaagacactgtacaacagaagaacccggcaggatgagcctgccctgttcgtggccctgaccttcgagcggcgggaggtcctggactcctccaatatcaaaccaatgaacctgatcggcgtggcaagaggcgaaaacatccccgccgtgatcgccctgaccgaccccgagggctgcccactgagccggtttaaggatagcctgggaaacccaacccacatcctgagaatcggcgagagctataaggagaagcagcggaccatccaggccaagaaggaggtggagcagcggagagccggcggctacagccggaagtacgccagcaaagccaagaatctggcagacgatatggtgagaaacaccgctagagatctgctgtactacgccgtgacccaggatgccatgctgatcttcgccaacctgagccggggcttcggccggcagggcaagcggaccttcatggccgagagacagtacacacggatggaggactggctgaccgccaagctggcctacgagggcctgagcaagacctacctgtccaagacactggcccagtacacctccaagacatgcagcaactgtgggtttaccatcaccagcgccgactacgacagggtgctggagaagctgaagaagacagcaacaggctggatgaccacaattaacggcaaggagctgaaggtggagggccagattacctactacaacagatacaagagacagaacgtagtcaaggacctgtccgtcgagctggatagactgagcgaagaatctgtgaacaacgacatctcctcctggacaaagggcagaagcggagaagctctgagcctcctgaagaaaagattctcccatagacccgtgcaggagaagttcgtgtgcctgaactgcggcttcgagacacacgcagccgagcaagccgccctgaacatcgccagatcctggctgttcctgcggagccaggagtacaagaaataccagacaaacaagacaaccggcaacaccgataagagagccttcgtcgagacctggcagtccttttaccggaagaagcttaaggaggtgtggaaacctgccgtgcggtctggcggatctggcggaggctccgcccagaaggtgctgaccttcagggacgtggccatcgagttcagcctggaggagtggaagttcctggaccccgcccagcagaacctgtacagggacgtgatgctggagaactacaggaacctgttcagcatcggcctgaccgtgagcaagcccggcctgatcacctgcctggagcagaggaaggccccctggaacctgaagaggagggaggccgtggacggccaccccgccatgagcagccacggcggcccaagcagcggcgcccctcctcccagcggcggcagcccagccggctccccaacctctaccgaggagggcacctctgagtccgccacccccgagagcggccctggcacctccaccgagcccagcgagggcagcgcacccggcagccctgccggcagccccacctccacagaggagggaaccagcaccgagcccagcgaaggcagcgccccaggcaccagcaccgagcctagtgagcaggagattaaacggatcaacaagatcagaagaagacttgtgaaagacagcaacaccaagaaggccggcaagacaggccccatgaaaaccctgctggttagagtgatgacacccgatctgagagagcggctggaaaacctgagaaagaagcctgaaaatatcccccagcccatcagcaatacatctagagccaacctgaataagctgctgaccgattacaccgaaatgaagaaggcgatcctgcatgtgtactgggaagagttccagaaggaccctgtgggcctgatgagccgggtggcccagcctgccagcaagaagatcgatcagaacaagctgaaacctgagatggacgagaagggcaacctgaccaccgccggctttgcctgctctcagtgtggccagcccctgttcgtgtacaagctggagcaggtgtctgagaagggcaaggcttacaccaactacttcggacggtgcaatgtggccgagcacgaaaagctgatcctgctggcccagctgaagcccgagaaggatagcgacgaagccgtgacatatagcctgggaaagtttgggcagagggccctggatttctacagcattcatgtgaccaaggagtccacccaccccgtgaagcccctggcccagatcgccggaaacagatacgcctccggacctgtgggaaaggccctgagcgacgcatgtatgggcacaatcgcctccttcctgtctaagtaccaggacatcatcatcgaacaccagaaggtggtgaagggcaaccagaagagactggagagcctgcgggagctggccggcaaggaaaacctggaataccctagcgtgaccctgccacctcagcctcacaccaaggagggcgttgatgcctacaacgaagtgatcgcccgggtgcgaatgtgggtgaacctgaacctgtggcagaagctgaagctaagcagagatgatgccaagcctctgctgagactgaagggattcccttcctttcctctggtcgagagacaggccaacgaagtggactggtgggacatggtgtgtaacgtgaagaagctgatcaacgagaaaaaggaggatggcaaggtgttttggcagaatctggctggctacaagagacaggaagccctgagaccatacctgagcagcgaggaagatcggaagaagggaaagaaattcgctcggtaccagctgggcgacctgctgctgcacctggaaaagaagcacggcgaggactggggaaaggtgtacgacgaggcctgggagcggattgacaagaaagtggaaggcctgagcaagcacatcaagctggaagaggaacggagaagcgaggacgcccagagcaaggccgccctgaccgactggctgcgggctaaggccagcttcgtgatcgagggcctgaaggaggccgacaaggacgagttctgcagatgcgagctgaagctgcagaagtggtacggggacctgcggggaaagcccttcgccatcgaagccgagaacagcatcctggacatcagcggcttcagcaagcagtacaactgtgccttcatctggcagaaggacggcgtgaagaagctgaacctgtacctgatcatcaactacttcaagggcggcaagctgcggttcaagaagatcaaacctgaagccttcgaagccaacagattctacaccgtgatcaacaaaaagagcggcgagatcgtgcccatggaggtgaacttcaacttcgacgaccccaacctgatcatcctgcctctggcctttggcaagagacagggcagagaattcatctggaacgacctgctgtccctggaaaccggcagcctgaagctggccaacggaagagtgatcgagaagacactgtacaacagaagaacccggcaggatgagcctgccctgttcgtggccctgaccttcgagcggcgggaggtcctggactcctccaatatcaaaccaatgaacctgatcggcgtggcaagaggcgaaaacatccccgccgtgatcgccctgaccgaccccgagggctgcccactgagccggtttaaggatagcctgggaaacccaacccacatcctgagaatcggcgagagctataaggagaagcagcggaccatccaggccaagaaggaggtggagcagcggagagccggcggctacagccggaagtacgccagcaaagccaagaatctggcagacgatatggtgagaaacaccgctagagatctgctgtactacgccgtgacccaggatgccatgctgatcttcgccaacctgagccggggcttcggccggcagggcaagcggaccttcatggccgagagacagtacacacggatggaggactggctgaccgccaagctggcctacgagggcctgagcaagacctacctgtccaagacactggcccagtacacctccaagacatgcagcaactgtgggtttaccatcaccagcgccgactacgacagggtgctggagaagctgaagaagacagcaacaggctggatgaccacaattaacggcaaggagctgaaggtggagggccagattacctactacaacagatacaagagacagaacgtagtcaaggacctgtccgtcgagctggatagactgagcgaagaatctgtgaacaacgacatctcctcctggacaaagggcagaagcggagaagctctgagcctcctgaagaaaagattctcccatagacccgtgcaggagaagttcgtgtgcctgaactgcggcttcgagacacacgcagccgagcaagccgccctgaacatcgccagatcctggctgttcctgcggagccaggagtacaagaaataccagacaaacaagacaaccggcaacaccgataagagagccttcgtcgagacctggcagtccttttaccggaagaagcttaaggaggtgtggaaacctgccgtgcggtctggcggatctggcggaggctcctgcccagaaggtgctgaccttcagggacgtggccatcgagttcagcctggaggagtggaagttcctggaccccgcccagcagaacctgtacagggacgtgatgctggagaactacaggaacctgttcagcatcggcctgaccgtgagcaagcccggcctgatcacctgcctggagcagaggaaggccccctggaacctgaagaggagggaggccgtggacggccaccccgccatgagcagccacggatctggctccggcagcggccccaagaaaaagagaaaagtctaagctgccttctgcggggcttgccttctggccatgcccttcttctctcccttgcacctgtacctcttggtctttgaataaagcctgagtaggaaggctagcaaaaaaaaaaaaaaaaaaaaaaaaaaaaaaaaaaaaaaaaaaaaaaaaaaaaaaaaaaaaaaaaaaaaaaaaaaaaaaaa

SEQ ID NO: 16855 - RNA, 9485 nt, synthetic construct
  source 1..9485: mol_type = other RNA
aggaaataagagagaaaagaagagtaagaagaaatataagagccaccatggcccctaagaagaagcgtaaagtgagccggatggaacgcctcgtctacgaggtgcggcagaagtgcagaaacatcgaggacatctgcatctcctgcggatctctgaacgtgaccctggagcacccactgttcatcggcggcatgtgccagaactgtaaaaactgttttctggagtgtgcctatcaatacgacgatgacggctaccagagctactgcaccatctgttgcggcggaagagaggtgctgatgtgtggaaataacaactgctgccggtgcttctgcgtggaatgcgtggacctgctggtgggccccggcgccgcccaggccgctattaaggaagatccttggaactgctacatgtgcggccacaagggcacatacggcctgctgagacggagagaggactggcctagcagactgcagatgttcttcgccaataaccacgaccaggagttcgacccccctaaggtgtaccctcccgtccccgccgagaagagaaagcccatccgggtcctgagcctgttcgatggcatcgccaccggtctgctggtgctgaaggacctgggcatccaggtggataggtacattgcctccgaggtgtgcgaggactccatcaccgtgggaatggtgcgtcatcagggcaagatcatgtacgtgggcgacgtgcggagcgtgacacagaagcatatccaggagtggggccctttcgacctggtgatcggcggcagcccttgcaatgacctgagcatcgtgaacccagcccggaagggcctgtacgagggaaccggcagactgttcttcgagttttacagactgctgcacgacgcccggcctaaggaaggcgacgaccggcccttcttttggctgttcgagaatgtggtggccatgggagtcagcgacaagcgggatattagccggttcctggagagcaaccccgtgatgatcgatgccaaggaagtgagcgccgcccaccgggccagatacttctggggcaatctgcctggcatgaacagacccctggccagcaccgtgaacgacaagctggagctgcaggagtgcctggagcacggccggatcgccaagttcagcaaggtgagaaccatcaccacccgaagcaacagcatcaaacaaggcaaggaccagcactttcctgtgttcatgaacgagaaggaggacatcctgtggtgtaccgagatggagagagtgttcgggttcccagtccactacacagatgtcagcaacatgtctagactggccagacagagactgctgggaagaagctggtccgtccctgtgatcagacacctgttcgcccctctgaaggagtacttcgcctgcgtgagcagcggcaacagcaacgccaacagccggggccccagcttctctagcggcctggtgccactgtccctgagagggagccacatgggccccatggagatctacaaaaccgtgagcgcctggaagcggcagcctgtgcgcgtgctgagcctgtttcggaatatcgataaagtcctgaaaagcctgggattcctggagagcggctctggctccggcggtggcaccctgaagtacgtggaggatgtgacaaacgtggtcagacgggatgtggagaagtggggccccttcgatctggtgtacggcagcacccaacccctgggcagctcttgtgaccggtgccctggctggtacatgtttcagttccaccggatcctgcagtacgccctgccgagacaggagtcccagcggccattcttttggattttcatggacaacttgctgctgaccgaggatgaccaggaaactaccactcggttcctgcagaccgaagccgtgaccctgcaggacgtgagaggccgggactaccagaacgccatgcgggtgtggtccaacatccctggactgaaaagcaagcacgcacctctgacccctaaagaagaggagtacctgcaggcccaggtgcggagcagaagcaagctggacgcccctaaggtggatctgctggtgaagaattgcctcctgcccctgagagagtacttcaagtatttcagccagaatagtctgcccctgggaggcagcggcggcggcgccctggtgacatttgaggacgtcgccgtgcggttcacccaggaggaatgggctctgctggatccttctcagaaaatcctgtaccgggacgtgatgagagagacataccggaatctgacctccgtgggcatcaactgggaatgttgggaccttgaagcctgcttcagaagcctgggaagaaacctgagagtgcaggtggtgaagagaaagtgcgagctgaccaacagcggcccctgcgccgagggcggcccaagcagcggcgcccctcctcccagcggcggcagcccagccggctccccaacctctaccgaggagggcacctctgagtccgccacccccgagagcggccctggcacctccaccgagcccagcgagggcagcgcacccggcagccctgccggcagccccacctccacagaggagggaaccagcaccgagcccagcgaaggcagcgccccaggcaccagcaccgagcctagtgagcaggagattaaacggatcaacaagatcagaagaagacttgtgaaagacagcaacaccaagaaggccggcaagacaggccccatgaaaaccctgctggttagagtgatgacacccgatctgagagagcggctggaaaacctgagaaagaagcctgaaaatatcccccagcccatcagcaatacatctagagccaacctgaataagctgctgaccgattacaccgaaatgaagaaggcgatcctgcatgtgtactgggaagagttccagaaggaccctgtgggcctgatgagccgggtggcccagcctgccagcaagaagatcgatcagaacaagctgaaacctgagatggacgagaagggcaacctgaccaccgccggctttgcctgctctcagtgtggccagcccctgttcgtgtacaagctggagcaggtgtctgagaagggcaaggcttacaccaactacttcggacggtgcaatgtggccgagcacgaaaagctgatcctgctggcccagctgaagcccgagaaggatagcgacgaagccgtgacatatagcctgggaaagtttgggcagagggccctggatttctacagcattcatgtgaccaaggagtccacccaccccgtgaagcccctggcccagatcgccggaaacagatacgcctccggacctgtgggaaaggccctgagcgacgcatgtatgggcacaatcgcctccttcctgtctaagtaccaggacatcatcatcgaacaccagaaggtggtgaagggcaaccagaagagactggagagcctgcgggagctggccggcaaggaaaacctggaataccctagcgtgaccctgccacctcagcctcacaccaaggagggcgttgatgcctacaacgaagtgatcgcccgggtgcgaatgtgggtgaacctgaacctgtggcagaagctgaagctaagcagagatgatgccaagcctctgctgagactgaagggattcccttcctttcctctggtcgagagacaggccaacgaagtggactggtgggacatggtgtgtaacgtgaagaagctgatcaacgagaaaaaggaggatggcaaggtgttttggcagaatctggctggctacaagagacaggaagccctgagaccatacctgagcagcgaggaagatcggaagaagggaaagaaattcgctcggtaccagctgggcgacctgctgctgcacctggaaaagaagcacggcgaggactggggaaaggtgtacgacgaggcctgggagcggattgacaagaaagtggaaggcctgagcaagcacatcaagctggaagaggaacggagaagcgaggacgcccagagcaaggccgccctgaccgactggctgcgggctaaggccagcttcgtgatcgagggcctgaaggaggccgacaaggacgagttctgcagatgcgagctgaagctgcagaagtggtacggggacctgcggggaaagcccttcgccatcgaagccgagaacagcatcctggacatcagcggcttcagcaagcagtacaactgtgccttcatctggcagaaggacggcgtgaagaagctgaacctgtacctgatcatcaactacttcaagggcggcaagctgcggttcaagaagatcaaacctgaagccttcgaagccaacagattctacaccgtgatcaacaaaaagagcggcgagatcgtgcccatggaggtgaacttcaacttcgacgaccccaacctgatcatcctgcctctggcctttggcaagagacagggcagagaattcatctggaacgacctgctgtccctggaaaccggcagcctgaagctggccaacggaagagtgatcgagaagacactgtacaacagaagaacccggcaggatgagcctgccctgttcgtggccctgaccttcgagcggcgggaggtcctggactcctccaatatcaaaccaatgaacctgatcggcgtggcaagaggcgaaaacatccccgccgtgatcgccctgaccgaccccgagggctgcccactgagccggtttaaggatagcctgggaaacccaacccacatcctgagaatcggcgagagctataaggagaagcagcggaccatccaggccaagaaggaggtggagcagcggagagccggcggctacagccggaagtacgccagcaaagccaagaatctggcagacgatatggtgagaaacaccgctagagatctgctgtactacgccgtgacccaggatgccatgctgatcttcgccaacctgagccggggcttcggccggcagggcaagcggaccttcatggccgagagacagtacacacggatggaggactggctgaccgccaagctggcctacgagggcctgagcaagacctacctgtccaagacactggcccagtacacctccaagacatgcagcaactgtgggtttaccatcaccagcgccgactacgacagggtgctggagaagctgaagaagacagcaacaggctggatgaccacaattaacggcaaggagctgaaggtggagggccagattacctactacaacagatacaagagacagaacgtagtcaaggacctgtccgtcgagctggatagactgagcgaagaatctgtgaacaacgacatctcctcctggacaaagggcagaagcggagaagctctgagcctcctgaagaaaagattctcccatagacccgtgcaggagaagttcgtgtgcctgaactgcggcttcgagacacacgcagccgagcaagccgccctgaacatcgccagatcctggctgttcctgcggagccaggagtacaagaaataccagacaaacaagacaaccggcaacaccgataagagagccttcgtcgagacctggcagtccttttaccggaagaagcttaaggaggtgtggaaacctgccgtgcggtctggcggatctggcggaggctccccccaggacctgatgaccttcgaggacgtggccgtggagttcacccagtgggagtggggccagctggaccccgcccagaaggacctgtacagggtggtgatgctggagaacttcaagaacctggccagcctgggcttccccgtggccaagccctacgtgatcagccagctggagaagggcaaggagccctgcgtgctggagggcgagatcagcaccgactgggagaagaggcccaaggccaagggcggcccaagcagcggcgcccctcctcccagcggcggcagcccagccggctccccaacctctaccgaggagggcacctctgagtccgccacccccgagagcggccctggcacctccaccgagcccagcgagggcagcgcacccggcagccctgccggcagccccacctccacagaggagggaaccagcaccgagcccagcgaaggcagcgccccaggcaccagcaccgagcctagtgagcaggagattaaacggatcaacaagatcagaagaagacttgtgaaagacagcaacaccaagaaggccggcaagacaggccccatgaaaaccctgctggttagagtgatgacacccgatctgagagagcggctggaaaacctgagaaagaagcctgaaaatatcccccagcccatcagcaatacatctagagccaacctgaataagctgctgaccgattacaccgaaatgaagaaggcgatcctgcatgtgtactgggaagagttccagaaggaccctgtgggcctgatgagccgggtggcccagcctgccagcaagaagatcgatcagaacaagctgaaacctgagatggacgagaagggcaacctgaccaccgccggctttgcctgctctcagtgtggccagcccctgttcgtgtacaagctggagcaggtgtctgagaagggcaaggcttacaccaactacttcggacggtgcaatgtggccgagcacgaaaagctgatcctgctggcccagctgaagcccgagaaggatagcgacgaagccgtgacatatagcctgggaaagtttgggcagagggccctggatttctacagcattcatgtgaccaaggagtccacccaccccgtgaagcccctggcccagatcgccggaaacagatacgcctccggacctgtgggaaaggccctgagcgacgcatgtatgggcacaatcgcctccttcctgtctaagtaccaggacatcatcatcgaacaccagaaggtggtgaagggcaaccagaagagactggagagcctgcgggagctggccggcaaggaaaacctggaataccctagcgtgaccctgccacctcagcctcacaccaaggagggcgttgatgcctacaacgaagtgatcgcccgggtgcgaatgtgggtgaacctgaacctgtggcagaagctgaagctaagcagagatgatgccaagcctctgctgagactgaagggattcccttcctttcctctggtcgagagacaggccaacgaagtggactggtgggacatggtgtgtaacgtgaagaagctgatcaacgagaaaaaggaggatggcaaggtgttttggcagaatctggctggctacaagagacaggaagccctgagaccatacctgagcagcgaggaagatcggaagaagggaaagaaattcgctcggtaccagctgggcgacctgctgctgcacctggaaaagaagcacggcgaggactggggaaaggtgtacgacgaggcctgggagcggattgacaagaaagtggaaggcctgagcaagcacatcaagctggaagaggaacggagaagcgaggacgcccagagcaaggccgccctgaccgactggctgcgggctaaggccagcttcgtgatcgagggcctgaaggaggccgacaaggacgagttctgcagatgcgagctgaagctgcagaagtggtacggggacctgcggggaaagcccttcgccatcgaagccgagaacagcatcctggacatcagcggcttcagcaagcagtacaactgtgccttcatctggcagaaggacggcgtgaagaagctgaacctgtacctgatcatcaactacttcaagggcggcaagctgcggttcaagaagatcaaacctgaagccttcgaagccaacagattctacaccgtgatcaacaaaaagagcggcgagatcgtgcccatggaggtgaacttcaacttcgacgaccccaacctgatcatcctgcctctggcctttggcaagagacagggcagagaattcatctggaacgacctgctgtccctggaaaccggcagcctgaagctggccaacggaagagtgatcgagaagacactgtacaacagaagaacccggcaggatgagcctgccctgttcgtggccctgaccttcgagcggcgggaggtcctggactcctccaatatcaaaccaatgaacctgatcggcgtggcaagaggcgaaaacatccccgccgtgatcgccctgaccgaccccgagggctgcccactgagccggtttaaggatagcctgggaaacccaacccacatcctgagaatcggcgagagctataaggagaagcagcggaccatccaggccaagaaggaggtggagcagcggagagccggcggctacagccggaagtacgccagcaaagccaagaatctggcagacgatatggtgagaaacaccgctagagatctgctgtactacgccgtgacccaggatgccatgctgatcttcgccaacctgagccggggcttcggccggcagggcaagcggaccttcatggccgagagacagtacacacggatggaggactggctgaccgccaagctggcctacgagggcctgagcaagacctacctgtccaagacactggcccagtacacctccaagacatgcagcaactgtgggtttaccatcaccagcgccgactacgacagggtgctggagaagctgaagaagacagcaacaggctggatgaccacaattaacggcaaggagctgaaggtggagggccagattacctactacaacagatacaagagacagaacgtagtcaaggacctgtccgtcgagctggatagactgagcgaagaatctgtgaacaacgacatctcctcctggacaaagggcagaagcggagaagctctgagcctcctgaagaaaagattctcccatagacccgtgcaggagaagttcgtgtgcctgaactgcggcttcgagacacacgcagccgagcaagccgccctgaacatcgccagatcctggctgttcctgcggagccaggagtacaagaaataccagacaaacaagacaaccggcaacaccgataagagagccttcgtcgagacctggcagtccttttaccggaagaagcttaaggaggtgtggaaacctgccgtgcggtctggcggatctggcggaggctcctccccaggacctgatgaccttcgaggacgtggccgtggagttcacccagtgggagtggggccagctggaccccgcccagaaggacctgtacagggtggtgatgctggagaacttcaagaacctggccagcctgggcttccccgtggccaagccctacgtgatcagccagctggagaagggcaaggagccctgcgtgctggagggcgagatcagcaccgactgggagaagaggcccaaggccaagggatctggctccggcagcggccccaagaaaaagagaaaagtctaagctgccttctgcggggcttgccttctggccatgcccttcttctctcccttgcacctgtacctcttggtctttgaataaagcctgagtaggaaggctagcaaaaaaaaaaaaaaaaaaaaaaaaaaaaaaaaaaaaaaaaaaaaaaaaaaaaaaaaaaaaaaaaaaaaaaaaaaaaaaaa

SEQ ID NO: 16856 - RNA, 9485 nt, synthetic construct
  source 1..9485: mol_type = other RNA
aggaaataagagagaaaagaagagtaagaagaaatataagagccaccatggcccctaagaagaagcgtaaagtgagccggatggaacgcctcgtctacgaggtgcggcagaagtgcagaaacatcgaggacatctgcatctcctgcggatctctgaacgtgaccctggagcacccactgttcatcggcggcatgtgccagaactgtaaaaactgttttctggagtgtgcctatcaatacgacgatgacggctaccagagctactgcaccatctgttgcggcggaagagaggtgctgatgtgtggaaataacaactgctgccggtgcttctgcgtggaatgcgtggacctgctggtgggccccggcgccgcccaggccgctattaaggaagatccttggaactgctacatgtgcggccacaagggcacatacggcctgctgagacggagagaggactggcctagcagactgcagatgttcttcgccaataaccacgaccaggagttcgacccccctaaggtgtaccctcccgtccccgccgagaagagaaagcccatccgggtcctgagcctgttcgatggcatcgccaccggtctgctggtgctgaaggacctgggcatccaggtggataggtacattgcctccgaggtgtgcgaggactccatcaccgtgggaatggtgcgtcatcagggcaagatcatgtacgtgggcgacgtgcggagcgtgacacagaagcatatccaggagtggggccctttcgacctggtgatcggcggcagcccttgcaatgacctgagcatcgtgaacccagcccggaagggcctgtacgagggaaccggcagactgttcttcgagttttacagactgctgcacgacgcccggcctaaggaaggcgacgaccggcccttcttttggctgttcgagaatgtggtggccatgggagtcagcgacaagcgggatattagccggttcctggagagcaaccccgtgatgatcgatgccaaggaagtgagcgccgcccaccgggccagatacttctggggcaatctgcctggcatgaacagacccctggccagcaccgtgaacgacaagctggagctgcaggagtgcctggagcacggccggatcgccaagttcagcaaggtgagaaccatcaccacccgaagcaacagcatcaaacaaggcaaggaccagcactttcctgtgttcatgaacgagaaggaggacatcctgtggtgtaccgagatggagagagtgttcgggttcccagtccactacacagatgtcagcaacatgtctagactggccagacagagactgctgggaagaagctggtccgtccctgtgatcagacacctgttcgcccctctgaaggagtacttcgcctgcgtgagcagcggcaacagcaacgccaacagccggggccccagcttctctagcggcctggtgccactgtccctgagagggagccacatgggccccatggagatctacaaaaccgtgagcgcctggaagcggcagcctgtgcgcgtgctgagcctgtttcggaatatcgataaagtcctgaaaagcctgggattcctggagagcggctctggctccggcggtggcaccctgaagtacgtggaggatgtgacaaacgtggtcagacgggatgtggagaagtggggccccttcgatctggtgtacggcagcacccaacccctgggcagctcttgtgaccggtgccctggctggtacatgtttcagttccaccggatcctgcagtacgccctgccgagacaggagtcccagcggccattcttttggattttcatggacaacttgctgctgaccgaggatgaccaggaaactaccactcggttcctgcagaccgaagccgtgaccctgcaggacgtgagaggccgggactaccagaacgccatgcgggtgtggtccaacatccctggactgaaaagcaagcacgcacctctgacccctaaagaagaggagtacctgcaggcccaggtgcggagcagaagcaagctggacgcccctaaggtggatctgctggtgaagaattgcctcctgcccctgagagagtacttcaagtatttcagccagaatagtctgcccctgggaggcagcggcggcggcgccctggtgacatttgaggacgtcgccgtgcggttcacccaggaggaatgggctctgctggatccttctcagaaaatcctgtaccgggacgtgatgagagagacataccggaatctgacctccgtgggcatcaactgggaatgttgggaccttgaagcctgcttcagaagcctgggaagaaacctgagagtgcaggtggtgaagagaaagtgcgagctgaccaacagcggcccctgcgccgagggcggcccaagcagcggcgcccctcctcccagcggcggcagcccagccggctccccaacctctaccgaggagggcacctctgagtccgccacccccgagagcggccctggcacctccaccgagcccagcgagggcagcgcacccggcagccctgccggcagccccacctccacagaggagggaaccagcaccgagcccagcgaaggcagcgccccaggcaccagcaccgagcctagtgagcaggagattaaacggatcaacaagatcagaagaagacttgtgaaagacagcaacaccaagaaggccggcaagacaggccccatgaaaaccctgctggttagagtgatgacacccgatctgagagagcggctggaaaacctgagaaagaagcctgaaaatatcccccagcccatcagcaatacatctagagccaacctgaataagctgctgaccgattacaccgaaatgaagaaggcgatcctgcatgtgtactgggaagagttccagaaggaccctgtgggcctgatgagccgggtggcccagcctgccagcaagaagatcgatcagaacaagctgaaacctgagatggacgagaagggcaacctgaccaccgccggctttgcctgctctcagtgtggccagcccctgttcgtgtacaagctggagcaggtgtctgagaagggcaaggcttacaccaactacttcggacggtgcaatgtggccgagcacgaaaagctgatcctgctggcccagctgaagcccgagaaggatagcgacgaagccgtgacatatagcctgggaaagtttgggcagagggccctggatttctacagcattcatgtgaccaaggagtccacccaccccgtgaagcccctggcccagatcgccggaaacagatacgcctccggacctgtgggaaaggccctgagcgacgcatgtatgggcacaatcgcctccttcctgtctaagtaccaggacatcatcatcgaacaccagaaggtggtgaagggcaaccagaagagactggagagcctgcgggagctggccggcaaggaaaacctggaataccctagcgtgaccctgccacctcagcctcacaccaaggagggcgttgatgcctacaacgaagtgatcgcccgggtgcgaatgtgggtgaacctgaacctgtggcagaagctgaagctaagcagagatgatgccaagcctctgctgagactgaagggattcccttcctttcctctggtcgagagacaggccaacgaagtggactggtgggacatggtgtgtaacgtgaagaagctgatcaacgagaaaaaggaggatggcaaggtgttttggcagaatctggctggctacaagagacaggaagccctgagaccatacctgagcagcgaggaagatcggaagaagggaaagaaattcgctcggtaccagctgggcgacctgctgctgcacctggaaaagaagcacggcgaggactggggaaaggtgtacgacgaggcctgggagcggattgacaagaaagtggaaggcctgagcaagcacatcaagctggaagaggaacggagaagcgaggacgcccagagcaaggccgccctgaccgactggctgcgggctaaggccagcttcgtgatcgagggcctgaaggaggccgacaaggacgagttctgcagatgcgagctgaagctgcagaagtggtacggggacctgcggggaaagcccttcgccatcgaagccgagaacagcatcctggacatcagcggcttcagcaagcagtacaactgtgccttcatctggcagaaggacggcgtgaagaagctgaacctgtacctgatcatcaactacttcaagggcggcaagctgcggttcaagaagatcaaacctgaagccttcgaagccaacagattctacaccgtgatcaacaaaaagagcggcgagatcgtgcccatggaggtgaacttcaacttcgacgaccccaacctgatcatcctgcctctggcctttggcaagagacagggcagagaattcatctggaacgacctgctgtccctggaaaccggcagcctgaagctggccaacggaagagtgatcgagaagacactgtacaacagaagaacccggcaggatgagcctgccctgttcgtggccctgaccttcgagcggcgggaggtcctggactcctccaatatcaaaccaatgaacctgatcggcgtggcaagaggcgaaaacatccccgccgtgatcgccctgaccgaccccgagggctgcccactgagccggtttaaggatagcctgggaaacccaacccacatcctgagaatcggcgagagctataaggagaagcagcggaccatccaggccaagaaggaggtggagcagcggagagccggcggctacagccggaagtacgccagcaaagccaagaatctggcagacgatatggtgagaaacaccgctagagatctgctgtactacgccgtgacccaggatgccatgctgatcttcgccaacctgagccggggcttcggccggcagggcaagcggaccttcatggccgagagacagtacacacggatggaggactggctgaccgccaagctggcctacgagggcctgagcaagacctacctgtccaagacactggcccagtacacctccaagacatgcagcaactgtgggtttaccatcaccagcgccgactacgacagggtgctggagaagctgaagaagacagcaacaggctggatgaccacaattaacggcaaggagctgaaggtggagggccagattacctactacaacagatacaagagacagaacgtagtcaaggacctgtccgtcgagctggatagactgagcgaagaatctgtgaacaacgacatctcctcctggacaaagggcagaagcggagaagctctgagcctcctgaagaaaagattctcccatagacccgtgcaggagaagttcgtgtgcctgaactgcggcttcgagacacacgcagccgagcaagccgccctgaacatcgccagatcctggctgttcctgcggagccaggagtacaagaaataccagacaaacaagacaaccggcaacaccgataagagagccttcgtcgagacctggcagtccttttaccggaagaagcttaaggaggtgtggaaacctgccgtgcggtctggcggatctggcggaggctccagcctggagagcgacctgttcagggacgtggccatcgtgttcagccaggaggagtgggagcagctggcccccgcccagagggacctgtacagggacgtgatgctggagacctacagcaacctggtgagcctgggcctggccatcgccaagcccgacgtgatcagcttcctggagcagggcaaggagccctgggtggtggagaagatgagcaggggcggcctgtgccccgtgctggagagcaggggcggcccaagcagcggcgcccctcctcccagcggcggcagcccagccggctccccaacctctaccgaggagggcacctctgagtccgccacccccgagagcggccctggcacctccaccgagcccagcgagggcagcgcacccggcagccctgccggcagccccacctccacagaggagggaaccagcaccgagcccagcgaaggcagcgccccaggcaccagcaccgagcctagtgagcaggagattaaacggatcaacaagatcagaagaagacttgtgaaagacagcaacaccaagaaggccggcaagacaggccccatgaaaaccctgctggttagagtgatgacacccgatctgagagagcggctggaaaacctgagaaagaagcctgaaaatatcccccagcccatcagcaatacatctagagccaacctgaataagctgctgaccgattacaccgaaatgaagaaggcgatcctgcatgtgtactgggaagagttccagaaggaccctgtgggcctgatgagccgggtggcccagcctgccagcaagaagatcgatcagaacaagctgaaacctgagatggacgagaagggcaacctgaccaccgccggctttgcctgctctcagtgtggccagcccctgttcgtgtacaagctggagcaggtgtctgagaagggcaaggcttacaccaactacttcggacggtgcaatgtggccgagcacgaaaagctgatcctgctggcccagctgaagcccgagaaggatagcgacgaagccgtgacatatagcctgggaaagtttgggcagagggccctggatttctacagcattcatgtgaccaaggagtccacccaccccgtgaagcccctggcccagatcgccggaaacagatacgcctccggacctgtgggaaaggccctgagcgacgcatgtatgggcacaatcgcctccttcctgtctaagtaccaggacatcatcatcgaacaccagaaggtggtgaagggcaaccagaagagactggagagcctgcgggagctggccggcaaggaaaacctggaataccctagcgtgaccctgccacctcagcctcacaccaaggagggcgttgatgcctacaacgaagtgatcgcccgggtgcgaatgtgggtgaacctgaacctgtggcagaagctgaagctaagcagagatgatgccaagcctctgctgagactgaagggattcccttcctttcctctggtcgagagacaggccaacgaagtggactggtgggacatggtgtgtaacgtgaagaagctgatcaacgagaaaaaggaggatggcaaggtgttttggcagaatctggctggctacaagagacaggaagccctgagaccatacctgagcagcgaggaagatcggaagaagggaaagaaattcgctcggtaccagctgggcgacctgctgctgcacctggaaaagaagcacggcgaggactggggaaaggtgtacgacgaggcctgggagcggattgacaagaaagtggaaggcctgagcaagcacatcaagctggaagaggaacggagaagcgaggacgcccagagcaaggccgccctgaccgactggctgcgggctaaggccagcttcgtgatcgagggcctgaaggaggccgacaaggacgagttctgcagatgcgagctgaagctgcagaagtggtacggggacctgcggggaaagcccttcgccatcgaagccgagaacagcatcctggacatcagcggcttcagcaagcagtacaactgtgccttcatctggcagaaggacggcgtgaagaagctgaacctgtacctgatcatcaactacttcaagggcggcaagctgcggttcaagaagatcaaacctgaagccttcgaagccaacagattctacaccgtgatcaacaaaaagagcggcgagatcgtgcccatggaggtgaacttcaacttcgacgaccccaacctgatcatcctgcctctggcctttggcaagagacagggcagagaattcatctggaacgacctgctgtccctggaaaccggcagcctgaagctggccaacggaagagtgatcgagaagacactgtacaacagaagaacccggcaggatgagcctgccctgttcgtggccctgaccttcgagcggcgggaggtcctggactcctccaatatcaaaccaatgaacctgatcggcgtggcaagaggcgaaaacatccccgccgtgatcgccctgaccgaccccgagggctgcccactgagccggtttaaggatagcctgggaaacccaacccacatcctgagaatcggcgagagctataaggagaagcagcggaccatccaggccaagaaggaggtggagcagcggagagccggcggctacagccggaagtacgccagcaaagccaagaatctggcagacgatatggtgagaaacaccgctagagatctgctgtactacgccgtgacccaggatgccatgctgatcttcgccaacctgagccggggcttcggccggcagggcaagcggaccttcatggccgagagacagtacacacggatggaggactggctgaccgccaagctggcctacgagggcctgagcaagacctacctgtccaagacactggcccagtacacctccaagacatgcagcaactgtgggtttaccatcaccagcgccgactacgacagggtgctggagaagctgaagaagacagcaacaggctggatgaccacaattaacggcaaggagctgaaggtggagggccagattacctactacaacagatacaagagacagaacgtagtcaaggacctgtccgtcgagctggatagactgagcgaagaatctgtgaacaacgacatctcctcctggacaaagggcagaagcggagaagctctgagcctcctgaagaaaagattctcccatagacccgtgcaggagaagttcgtgtgcctgaactgcggcttcgagacacacgcagccgagcaagccgccctgaacatcgccagatcctggctgttcctgcggagccaggagtacaagaaataccagacaaacaagacaaccggcaacaccgataagagagccttcgtcgagacctggcagtccttttaccggaagaagcttaaggaggtgtggaaacctgccgtgcggtctggcggatctggcggaggctcctagcctggagagcgacctgttcagggacgtggccatcgtgttcagccaggaggagtgggagcagctggcccccgcccagagggacctgtacagggacgtgatgctggagacctacagcaacctggtgagcctgggcctggccatcgccaagcccgacgtgatcagcttcctggagcagggcaaggagccctgggtggtggagaagatgagcaggggcggcctgtgccccgtgctggagagcaggggatctggctccggcagcggccccaagaaaaagagaaaagtctaagctgccttctgcggggcttgccttctggccatgcccttcttctctcccttgcacctgtacctcttggtctttgaataaagcctgagtaggaaggctagcaaaaaaaaaaaaaaaaaaaaaaaaaaaaaaaaaaaaaaaaaaaaaaaaaaaaaaaaaaaaaaaaaaaaaaaaaaaaaaaa

SEQ ID NO: 16857 - RNA, 9485 nt, synthetic construct
  source 1..9485: mol_type = other RNA
aggaaataagagagaaaagaagagtaagaagaaatataagagccaccatggcccctaagaagaagcgtaaagtgagccggatggaacgcctcgtctacgaggtgcggcagaagtgcagaaacatcgaggacatctgcatctcctgcggatctctgaacgtgaccctggagcacccactgttcatcggcggcatgtgccagaactgtaaaaactgttttctggagtgtgcctatcaatacgacgatgacggctaccagagctactgcaccatctgttgcggcggaagagaggtgctgatgtgtggaaataacaactgctgccggtgcttctgcgtggaatgcgtggacctgctggtgggccccggcgccgcccaggccgctattaaggaagatccttggaactgctacatgtgcggccacaagggcacatacggcctgctgagacggagagaggactggcctagcagactgcagatgttcttcgccaataaccacgaccaggagttcgacccccctaaggtgtaccctcccgtccccgccgagaagagaaagcccatccgggtcctgagcctgttcgatggcatcgccaccggtctgctggtgctgaaggacctgggcatccaggtggataggtacattgcctccgaggtgtgcgaggactccatcaccgtgggaatggtgcgtcatcagggcaagatcatgtacgtgggcgacgtgcggagcgtgacacagaagcatatccaggagtggggccctttcgacctggtgatcggcggcagcccttgcaatgacctgagcatcgtgaacccagcccggaagggcctgtacgagggaaccggcagactgttcttcgagttttacagactgctgcacgacgcccggcctaaggaaggcgacgaccggcccttcttttggctgttcgagaatgtggtggccatgggagtcagcgacaagcgggatattagccggttcctggagagcaaccccgtgatgatcgatgccaaggaagtgagcgccgcccaccgggccagatacttctggggcaatctgcctggcatgaacagacccctggccagcaccgtgaacgacaagctggagctgcaggagtgcctggagcacggccggatcgccaagttcagcaaggtgagaaccatcaccacccgaagcaacagcatcaaacaaggcaaggaccagcactttcctgtgttcatgaacgagaaggaggacatcctgtggtgtaccgagatggagagagtgttcgggttcccagtccactacacagatgtcagcaacatgtctagactggccagacagagactgctgggaagaagctggtccgtccctgtgatcagacacctgttcgcccctctgaaggagtacttcgcctgcgtgagcagcggcaacagcaacgccaacagccggggccccagcttctctagcggcctggtgccactgtccctgagagggagccacatgggccccatggagatctacaaaaccgtgagcgcctggaagcggcagcctgtgcgcgtgctgagcctgtttcggaatatcgataaagtcctgaaaagcctgggattcctggagagcggctctggctccggcggtggcaccctgaagtacgtggaggatgtgacaaacgtggtcagacgggatgtggagaagtggggccccttcgatctggtgtacggcagcacccaacccctgggcagctcttgtgaccggtgccctggctggtacatgtttcagttccaccggatcctgcagtacgccctgccgagacaggagtcccagcggccattcttttggattttcatggacaacttgctgctgaccgaggatgaccaggaaactaccactcggttcctgcagaccgaagccgtgaccctgcaggacgtgagaggccgggactaccagaacgccatgcgggtgtggtccaacatccctggactgaaaagcaagcacgcacctctgacccctaaagaagaggagtacctgcaggcccaggtgcggagcagaagcaagctggacgcccctaaggtggatctgctggtgaagaattgcctcctgcccctgagagagtacttcaagtatttcagccagaatagtctgcccctgggaggcagcggcggcggcgccctggtgacatttgaggacgtcgccgtgcggttcacccaggaggaatgggctctgctggatccttctcagaaaatcctgtaccgggacgtgatgagagagacataccggaatctgacctccgtgggcatcaactgggaatgttgggaccttgaagcctgcttcagaagcctgggaagaaacctgagagtgcaggtggtgaagagaaagtgcgagctgaccaacagcggcccctgcgccgagggcggcccaagcagcggcgcccctcctcccagcggcggcagcccagccggctccccaacctctaccgaggagggcacctctgagtccgccacccccgagagcggccctggcacctccaccgagcccagcgagggcagcgcacccggcagccctgccggcagccccacctccacagaggagggaaccagcaccgagcccagcgaaggcagcgccccaggcaccagcaccgagcctagtgagcaggagattaaacggatcaacaagatcagaagaagacttgtgaaagacagcaacaccaagaaggccggcaagacaggccccatgaaaaccctgctggttagagtgatgacacccgatctgagagagcggctggaaaacctgagaaagaagcctgaaaatatcccccagcccatcagcaatacatctagagccaacctgaataagctgctgaccgattacaccgaaatgaagaaggcgatcctgcatgtgtactgggaagagttccagaaggaccctgtgggcctgatgagccgggtggcccagcctgccagcaagaagatcgatcagaacaagctgaaacctgagatggacgagaagggcaacctgaccaccgccggctttgcctgctctcagtgtggccagcccctgttcgtgtacaagctggagcaggtgtctgagaagggcaaggcttacaccaactacttcggacggtgcaatgtggccgagcacgaaaagctgatcctgctggcccagctgaagcccgagaaggatagcgacgaagccgtgacatatagcctgggaaagtttgggcagagggccctggatttctacagcattcatgtgaccaaggagtccacccaccccgtgaagcccctggcccagatcgccggaaacagatacgcctccggacctgtgggaaaggccctgagcgacgcatgtatgggcacaatcgcctccttcctgtctaagtaccaggacatcatcatcgaacaccagaaggtggtgaagggcaaccagaagagactggagagcctgcgggagctggccggcaaggaaaacctggaataccctagcgtgaccctgccacctcagcctcacaccaaggagggcgttgatgcctacaacgaagtgatcgcccgggtgcgaatgtgggtgaacctgaacctgtggcagaagctgaagctaagcagagatgatgccaagcctctgctgagactgaagggattcccttcctttcctctggtcgagagacaggccaacgaagtggactggtgggacatggtgtgtaacgtgaagaagctgatcaacgagaaaaaggaggatggcaaggtgttttggcagaatctggctggctacaagagacaggaagccctgagaccatacctgagcagcgaggaagatcggaagaagggaaagaaattcgctcggtaccagctgggcgacctgctgctgcacctggaaaagaagcacggcgaggactggggaaaggtgtacgacgaggcctgggagcggattgacaagaaagtggaaggcctgagcaagcacatcaagctggaagaggaacggagaagcgaggacgcccagagcaaggccgccctgaccgactggctgcgggctaaggccagcttcgtgatcgagggcctgaaggaggccgacaaggacgagttctgcagatgcgagctgaagctgcagaagtggtacggggacctgcggggaaagcccttcgccatcgaagccgagaacagcatcctggacatcagcggcttcagcaagcagtacaactgtgccttcatctggcagaaggacggcgtgaagaagctgaacctgtacctgatcatcaactacttcaagggcggcaagctgcggttcaagaagatcaaacctgaagccttcgaagccaacagattctacaccgtgatcaacaaaaagagcggcgagatcgtgcccatggaggtgaacttcaacttcgacgaccccaacctgatcatcctgcctctggcctttggcaagagacagggcagagaattcatctggaacgacctgctgtccctggaaaccggcagcctgaagctggccaacggaagagtgatcgagaagacactgtacaacagaagaacccggcaggatgagcctgccctgttcgtggccctgaccttcgagcggcgggaggtcctggactcctccaatatcaaaccaatgaacctgatcggcgtggcaagaggcgaaaacatccccgccgtgatcgccctgaccgaccccgagggctgcccactgagccggtttaaggatagcctgggaaacccaacccacatcctgagaatcggcgagagctataaggagaagcagcggaccatccaggccaagaaggaggtggagcagcggagagccggcggctacagccggaagtacgccagcaaagccaagaatctggcagacgatatggtgagaaacaccgctagagatctgctgtactacgccgtgacccaggatgccatgctgatcttcgccaacctgagccggggcttcggccggcagggcaagcggaccttcatggccgagagacagtacacacggatggaggactggctgaccgccaagctggcctacgagggcctgagcaagacctacctgtccaagacactggcccagtacacctccaagacatgcagcaactgtgggtttaccatcaccagcgccgactacgacagggtgctggagaagctgaagaagacagcaacaggctggatgaccacaattaacggcaaggagctgaaggtggagggccagattacctactacaacagatacaagagacagaacgtagtcaaggacctgtccgtcgagctggatagactgagcgaagaatctgtgaacaacgacatctcctcctggacaaagggcagaagcggagaagctctgagcctcctgaagaaaagattctcccatagacccgtgcaggagaagttcgtgtgcctgaactgcggcttcgagacacacgcagccgagcaagccgccctgaacatcgccagatcctggctgttcctgcggagccaggagtacaagaaataccagacaaacaagacaaccggcaacaccgataagagagccttcgtcgagacctggcagtccttttaccggaagaagcttaaggaggtgtggaaacctgccgtgcggtctggcggatctggcggaggctccatgatgaccgccgtgagcctgaccaccaggccccaggagagcgtggccttcgaggacgtggccgtgtacttcaccaccaaggagtgggccatcatggtgcccgccgagagggccctgtacagggacgtgatgctggagaactacgaggccgtggccttcgtggtgagccccaccagcaagcccgccctggtgagccacctggagcagggcaaggagagctgcttcaccaggccccagggcgtgggcggcccaagcagcggcgcccctcctcccagcggcggcagcccagccggctccccaacctctaccgaggagggcacctctgagtccgccacccccgagagcggccctggcacctccaccgagcccagcgagggcagcgcacccggcagccctgccggcagccccacctccacagaggagggaaccagcaccgagcccagcgaaggcagcgccccaggcaccagcaccgagcctagtgagcaggagattaaacggatcaacaagatcagaagaagacttgtgaaagacagcaacaccaagaaggccggcaagacaggccccatgaaaaccctgctggttagagtgatgacacccgatctgagagagcggctggaaaacctgagaaagaagcctgaaaatatcccccagcccatcagcaatacatctagagccaacctgaataagctgctgaccgattacaccgaaatgaagaaggcgatcctgcatgtgtactgggaagagttccagaaggaccctgtgggcctgatgagccgggtggcccagcctgccagcaagaagatcgatcagaacaagctgaaacctgagatggacgagaagggcaacctgaccaccgccggctttgcctgctctcagtgtggccagcccctgttcgtgtacaagctggagcaggtgtctgagaagggcaaggcttacaccaactacttcggacggtgcaatgtggccgagcacgaaaagctgatcctgctggcccagctgaagcccgagaaggatagcgacgaagccgtgacatatagcctgggaaagtttgggcagagggccctggatttctacagcattcatgtgaccaaggagtccacccaccccgtgaagcccctggcccagatcgccggaaacagatacgcctccggacctgtgggaaaggccctgagcgacgcatgtatgggcacaatcgcctccttcctgtctaagtaccaggacatcatcatcgaacaccagaaggtggtgaagggcaaccagaagagactggagagcctgcgggagctggccggcaaggaaaacctggaataccctagcgtgaccctgccacctcagcctcacaccaaggagggcgttgatgcctacaacgaagtgatcgcccgggtgcgaatgtgggtgaacctgaacctgtggcagaagctgaagctaagcagagatgatgccaagcctctgctgagactgaagggattcccttcctttcctctggtcgagagacaggccaacgaagtggactggtgggacatggtgtgtaacgtgaagaagctgatcaacgagaaaaaggaggatggcaaggtgttttggcagaatctggctggctacaagagacaggaagccctgagaccatacctgagcagcgaggaagatcggaagaagggaaagaaattcgctcggtaccagctgggcgacctgctgctgcacctggaaaagaagcacggcgaggactggggaaaggtgtacgacgaggcctgggagcggattgacaagaaagtggaaggcctgagcaagcacatcaagctggaagaggaacggagaagcgaggacgcccagagcaaggccgccctgaccgactggctgcgggctaaggccagcttcgtgatcgagggcctgaaggaggccgacaaggacgagttctgcagatgcgagctgaagctgcagaagtggtacggggacctgcggggaaagcccttcgccatcgaagccgagaacagcatcctggacatcagcggcttcagcaagcagtacaactgtgccttcatctggcagaaggacggcgtgaagaagctgaacctgtacctgatcatcaactacttcaagggcggcaagctgcggttcaagaagatcaaacctgaagccttcgaagccaacagattctacaccgtgatcaacaaaaagagcggcgagatcgtgcccatggaggtgaacttcaacttcgacgaccccaacctgatcatcctgcctctggcctttggcaagagacagggcagagaattcatctggaacgacctgctgtccctggaaaccggcagcctgaagctggccaacggaagagtgatcgagaagacactgtacaacagaagaacccggcaggatgagcctgccctgttcgtggccctgaccttcgagcggcgggaggtcctggactcctccaatatcaaaccaatgaacctgatcggcgtggcaagaggcgaaaacatccccgccgtgatcgccctgaccgaccccgagggctgcccactgagccggtttaaggatagcctgggaaacccaacccacatcctgagaatcggcgagagctataaggagaagcagcggaccatccaggccaagaaggaggtggagcagcggagagccggcggctacagccggaagtacgccagcaaagccaagaatctggcagacgatatggtgagaaacaccgctagagatctgctgtactacgccgtgacccaggatgccatgctgatcttcgccaacctgagccggggcttcggccggcagggcaagcggaccttcatggccgagagacagtacacacggatggaggactggctgaccgccaagctggcctacgagggcctgagcaagacctacctgtccaagacactggcccagtacacctccaagacatgcagcaactgtgggtttaccatcaccagcgccgactacgacagggtgctggagaagctgaagaagacagcaacaggctggatgaccacaattaacggcaaggagctgaaggtggagggccagattacctactacaacagatacaagagacagaacgtagtcaaggacctgtccgtcgagctggatagactgagcgaagaatctgtgaacaacgacatctcctcctggacaaagggcagaagcggagaagctctgagcctcctgaagaaaagattctcccatagacccgtgcaggagaagttcgtgtgcctgaactgcggcttcgagacacacgcagccgagcaagccgccctgaacatcgccagatcctggctgttcctgcggagccaggagtacaagaaataccagacaaacaagacaaccggcaacaccgataagagagccttcgtcgagacctggcagtccttttaccggaagaagcttaaggaggtgtggaaacctgccgtgcggtctggcggatctggcggaggctcctatgatgaccgccgtgagcctgaccaccaggccccaggagagcgtggccttcgaggacgtggccgtgtacttcaccaccaaggagtgggccatcatggtgcccgccgagagggccctgtacagggacgtgatgctggagaactacgaggccgtggccttcgtggtgagccccaccagcaagcccgccctggtgagccacctggagcagggcaaggagagctgcttcaccaggccccagggcgtgggatctggctccggcagcggccccaagaaaaagagaaaagtctaagctgccttctgcggggcttgccttctggccatgcccttcttctctcccttgcacctgtacctcttggtctttgaataaagcctgagtaggaaggctagcaaaaaaaaaaaaaaaaaaaaaaaaaaaaaaaaaaaaaaaaaaaaaaaaaaaaaaaaaaaaaaaaaaaaaaaaaaaaaaaa

SEQ ID NO: 16858 - RNA, 9485 nt, synthetic construct
  source 1..9485: mol_type = other RNA
aggaaataagagagaaaagaagagtaagaagaaatataagagccaccatggcccctaagaagaagcgtaaagtgagccggatggaacgcctcgtctacgaggtgcggcagaagtgcagaaacatcgaggacatctgcatctcctgcggatctctgaacgtgaccctggagcacccactgttcatcggcggcatgtgccagaactgtaaaaactgttttctggagtgtgcctatcaatacgacgatgacggctaccagagctactgcaccatctgttgcggcggaagagaggtgctgatgtgtggaaataacaactgctgccggtgcttctgcgtggaatgcgtggacctgctggtgggccccggcgccgcccaggccgctattaaggaagatccttggaactgctacatgtgcggccacaagggcacatacggcctgctgagacggagagaggactggcctagcagactgcagatgttcttcgccaataaccacgaccaggagttcgacccccctaaggtgtaccctcccgtccccgccgagaagagaaagcccatccgggtcctgagcctgttcgatggcatcgccaccggtctgctggtgctgaaggacctgggcatccaggtggataggtacattgcctccgaggtgtgcgaggactccatcaccgtgggaatggtgcgtcatcagggcaagatcatgtacgtgggcgacgtgcggagcgtgacacagaagcatatccaggagtggggccctttcgacctggtgatcggcggcagcccttgcaatgacctgagcatcgtgaacccagcccggaagggcctgtacgagggaaccggcagactgttcttcgagttttacagactgctgcacgacgcccggcctaaggaaggcgacgaccggcccttcttttggctgttcgagaatgtggtggccatgggagtcagcgacaagcgggatattagccggttcctggagagcaaccccgtgatgatcgatgccaaggaagtgagcgccgcccaccgggccagatacttctggggcaatctgcctggcatgaacagacccctggccagcaccgtgaacgacaagctggagctgcaggagtgcctggagcacggccggatcgccaagttcagcaaggtgagaaccatcaccacccgaagcaacagcatcaaacaaggcaaggaccagcactttcctgtgttcatgaacgagaaggaggacatcctgtggtgtaccgagatggagagagtgttcgggttcccagtccactacacagatgtcagcaacatgtctagactggccagacagagactgctgggaagaagctggtccgtccctgtgatcagacacctgttcgcccctctgaaggagtacttcgcctgcgtgagcagcggcaacagcaacgccaacagccggggccccagcttctctagcggcctggtgccactgtccctgagagggagccacatgggccccatggagatctacaaaaccgtgagcgcctggaagcggcagcctgtgcgcgtgctgagcctgtttcggaatatcgataaagtcctgaaaagcctgggattcctggagagcggctctggctccggcggtggcaccctgaagtacgtggaggatgtgacaaacgtggtcagacgggatgtggagaagtggggccccttcgatctggtgtacggcagcacccaacccctgggcagctcttgtgaccggtgccctggctggtacatgtttcagttccaccggatcctgcagtacgccctgccgagacaggagtcccagcggccattcttttggattttcatggacaacttgctgctgaccgaggatgaccaggaaactaccactcggttcctgcagaccgaagccgtgaccctgcaggacgtgagaggccgggactaccagaacgccatgcgggtgtggtccaacatccctggactgaaaagcaagcacgcacctctgacccctaaagaagaggagtacctgcaggcccaggtgcggagcagaagcaagctggacgcccctaaggtggatctgctggtgaagaattgcctcctgcccctgagagagtacttcaagtatttcagccagaatagtctgcccctgggaggcagcggcggcggcgccctggtgacatttgaggacgtcgccgtgcggttcacccaggaggaatgggctctgctggatccttctcagaaaatcctgtaccgggacgtgatgagagagacataccggaatctgacctccgtgggcatcaactgggaatgttgggaccttgaagcctgcttcagaagcctgggaagaaacctgagagtgcaggtggtgaagagaaagtgcgagctgaccaacagcggcccctgcgccgagggcggcccaagcagcggcgcccctcctcccagcggcggcagcccagccggctccccaacctctaccgaggagggcacctctgagtccgccacccccgagagcggccctggcacctccaccgagcccagcgagggcagcgcacccggcagccctgccggcagccccacctccacagaggagggaaccagcaccgagcccagcgaaggcagcgccccaggcaccagcaccgagcctagtgagcaggagattaaacggatcaacaagatcagaagaagacttgtgaaagacagcaacaccaagaaggccggcaagacaggccccatgaaaaccctgctggttagagtgatgacacccgatctgagagagcggctggaaaacctgagaaagaagcctgaaaatatcccccagcccatcagcaatacatctagagccaacctgaataagctgctgaccgattacaccgaaatgaagaaggcgatcctgcatgtgtactgggaagagttccagaaggaccctgtgggcctgatgagccgggtggcccagcctgccagcaagaagatcgatcagaacaagctgaaacctgagatggacgagaagggcaacctgaccaccgccggctttgcctgctctcagtgtggccagcccctgttcgtgtacaagctggagcaggtgtctgagaagggcaaggcttacaccaactacttcggacggtgcaatgtggccgagcacgaaaagctgatcctgctggcccagctgaagcccgagaaggatagcgacgaagccgtgacatatagcctgggaaagtttgggcagagggccctggatttctacagcattcatgtgaccaaggagtccacccaccccgtgaagcccctggcccagatcgccggaaacagatacgcctccggacctgtgggaaaggccctgagcgacgcatgtatgggcacaatcgcctccttcctgtctaagtaccaggacatcatcatcgaacaccagaaggtggtgaagggcaaccagaagagactggagagcctgcgggagctggccggcaaggaaaacctggaataccctagcgtgaccctgccacctcagcctcacaccaaggagggcgttgatgcctacaacgaagtgatcgcccgggtgcgaatgtgggtgaacctgaacctgtggcagaagctgaagctaagcagagatgatgccaagcctctgctgagactgaagggattcccttcctttcctctggtcgagagacaggccaacgaagtggactggtgggacatggtgtgtaacgtgaagaagctgatcaacgagaaaaaggaggatggcaaggtgttttggcagaatctggctggctacaagagacaggaagccctgagaccatacctgagcagcgaggaagatcggaagaagggaaagaaattcgctcggtaccagctgggcgacctgctgctgcacctggaaaagaagcacggcgaggactggggaaaggtgtacgacgaggcctgggagcggattgacaagaaagtggaaggcctgagcaagcacatcaagctggaagaggaacggagaagcgaggacgcccagagcaaggccgccctgaccgactggctgcgggctaaggccagcttcgtgatcgagggcctgaaggaggccgacaaggacgagttctgcagatgcgagctgaagctgcagaagtggtacggggacctgcggggaaagcccttcgccatcgaagccgagaacagcatcctggacatcagcggcttcagcaagcagtacaactgtgccttcatctggcagaaggacggcgtgaagaagctgaacctgtacctgatcatcaactacttcaagggcggcaagctgcggttcaagaagatcaaacctgaagccttcgaagccaacagattctacaccgtgatcaacaaaaagagcggcgagatcgtgcccatggaggtgaacttcaacttcgacgaccccaacctgatcatcctgcctctggcctttggcaagagacagggcagagaattcatctggaacgacctgctgtccctggaaaccggcagcctgaagctggccaacggaagagtgatcgagaagacactgtacaacagaagaacccggcaggatgagcctgccctgttcgtggccctgaccttcgagcggcgggaggtcctggactcctccaatatcaaaccaatgaacctgatcggcgtggcaagaggcgaaaacatccccgccgtgatcgccctgaccgaccccgagggctgcccactgagccggtttaaggatagcctgggaaacccaacccacatcctgagaatcggcgagagctataaggagaagcagcggaccatccaggccaagaaggaggtggagcagcggagagccggcggctacagccggaagtacgccagcaaagccaagaatctggcagacgatatggtgagaaacaccgctagagatctgctgtactacgccgtgacccaggatgccatgctgatcttcgccaacctgagccggggcttcggccggcagggcaagcggaccttcatggccgagagacagtacacacggatggaggactggctgaccgccaagctggcctacgagggcctgagcaagacctacctgtccaagacactggcccagtacacctccaagacatgcagcaactgtgggtttaccatcaccagcgccgactacgacagggtgctggagaagctgaagaagacagcaacaggctggatgaccacaattaacggcaaggagctgaaggtggagggccagattacctactacaacagatacaagagacagaacgtagtcaaggacctgtccgtcgagctggatagactgagcgaagaatctgtgaacaacgacatctcctcctggacaaagggcagaagcggagaagctctgagcctcctgaagaaaagattctcccatagacccgtgcaggagaagttcgtgtgcctgaactgcggcttcgagacacacgcagccgagcaagccgccctgaacatcgccagatcctggctgttcctgcggagccaggagtacaagaaataccagacaaacaagacaaccggcaacaccgataagagagccttcgtcgagacctggcagtccttttaccggaagaagcttaaggaggtgtggaaacctgccgtgcggtctggcggatctggcggaggctccctgaaggccagcgtgagcttcaaggacgtggccgtggagctgacccaggaggagtggcagcacatgggccccgcccagaggaccctgtacagggacgtgatgctggagaactacagccacctggtgagcgtgggctactgcatcttcaagcccgaggtgatcttcaagctggagcagggcgagcagccctggttcctggagcaggagttcagcaaccagagctaccccgaggactacaacatcggcggcccaagcagcggcgcccctcctcccagcggcggcagcccagccggctccccaacctctaccgaggagggcacctctgagtccgccacccccgagagcggccctggcacctccaccgagcccagcgagggcagcgcacccggcagccctgccggcagccccacctccacagaggagggaaccagcaccgagcccagcgaaggcagcgccccaggcaccagcaccgagcctagtgagcaggagattaaacggatcaacaagatcagaagaagacttgtgaaagacagcaacaccaagaaggccggcaagacaggccccatgaaaaccctgctggttagagtgatgacacccgatctgagagagcggctggaaaacctgagaaagaagcctgaaaatatcccccagcccatcagcaatacatctagagccaacctgaataagctgctgaccgattacaccgaaatgaagaaggcgatcctgcatgtgtactgggaagagttccagaaggaccctgtgggcctgatgagccgggtggcccagcctgccagcaagaagatcgatcagaacaagctgaaacctgagatggacgagaagggcaacctgaccaccgccggctttgcctgctctcagtgtggccagcccctgttcgtgtacaagctggagcaggtgtctgagaagggcaaggcttacaccaactacttcggacggtgcaatgtggccgagcacgaaaagctgatcctgctggcccagctgaagcccgagaaggatagcgacgaagccgtgacatatagcctgggaaagtttgggcagagggccctggatttctacagcattcatgtgaccaaggagtccacccaccccgtgaagcccctggcccagatcgccggaaacagatacgcctccggacctgtgggaaaggccctgagcgacgcatgtatgggcacaatcgcctccttcctgtctaagtaccaggacatcatcatcgaacaccagaaggtggtgaagggcaaccagaagagactggagagcctgcgggagctggccggcaaggaaaacctggaataccctagcgtgaccctgccacctcagcctcacaccaaggagggcgttgatgcctacaacgaagtgatcgcccgggtgcgaatgtgggtgaacctgaacctgtggcagaagctgaagctaagcagagatgatgccaagcctctgctgagactgaagggattcccttcctttcctctggtcgagagacaggccaacgaagtggactggtgggacatggtgtgtaacgtgaagaagctgatcaacgagaaaaaggaggatggcaaggtgttttggcagaatctggctggctacaagagacaggaagccctgagaccatacctgagcagcgaggaagatcggaagaagggaaagaaattcgctcggtaccagctgggcgacctgctgctgcacctggaaaagaagcacggcgaggactggggaaaggtgtacgacgaggcctgggagcggattgacaagaaagtggaaggcctgagcaagcacatcaagctggaagaggaacggagaagcgaggacgcccagagcaaggccgccctgaccgactggctgcgggctaaggccagcttcgtgatcgagggcctgaaggaggccgacaaggacgagttctgcagatgcgagctgaagctgcagaagtggtacggggacctgcggggaaagcccttcgccatcgaagccgagaacagcatcctggacatcagcggcttcagcaagcagtacaactgtgccttcatctggcagaaggacggcgtgaagaagctgaacctgtacctgatcatcaactacttcaagggcggcaagctgcggttcaagaagatcaaacctgaagccttcgaagccaacagattctacaccgtgatcaacaaaaagagcggcgagatcgtgcccatggaggtgaacttcaacttcgacgaccccaacctgatcatcctgcctctggcctttggcaagagacagggcagagaattcatctggaacgacctgctgtccctggaaaccggcagcctgaagctggccaacggaagagtgatcgagaagacactgtacaacagaagaacccggcaggatgagcctgccctgttcgtggccctgaccttcgagcggcgggaggtcctggactcctccaatatcaaaccaatgaacctgatcggcgtggcaagaggcgaaaacatccccgccgtgatcgccctgaccgaccccgagggctgcccactgagccggtttaaggatagcctgggaaacccaacccacatcctgagaatcggcgagagctataaggagaagcagcggaccatccaggccaagaaggaggtggagcagcggagagccggcggctacagccggaagtacgccagcaaagccaagaatctggcagacgatatggtgagaaacaccgctagagatctgctgtactacgccgtgacccaggatgccatgctgatcttcgccaacctgagccggggcttcggccggcagggcaagcggaccttcatggccgagagacagtacacacggatggaggactggctgaccgccaagctggcctacgagggcctgagcaagacctacctgtccaagacactggcccagtacacctccaagacatgcagcaactgtgggtttaccatcaccagcgccgactacgacagggtgctggagaagctgaagaagacagcaacaggctggatgaccacaattaacggcaaggagctgaaggtggagggccagattacctactacaacagatacaagagacagaacgtagtcaaggacctgtccgtcgagctggatagactgagcgaagaatctgtgaacaacgacatctcctcctggacaaagggcagaagcggagaagctctgagcctcctgaagaaaagattctcccatagacccgtgcaggagaagttcgtgtgcctgaactgcggcttcgagacacacgcagccgagcaagccgccctgaacatcgccagatcctggctgttcctgcggagccaggagtacaagaaataccagacaaacaagacaaccggcaacaccgataagagagccttcgtcgagacctggcagtccttttaccggaagaagcttaaggaggtgtggaaacctgccgtgcggtctggcggatctggcggaggctcctctgaaggccagcgtgagcttcaaggacgtggccgtggagctgacccaggaggagtggcagcacatgggccccgcccagaggaccctgtacagggacgtgatgctggagaactacagccacctggtgagcgtgggctactgcatcttcaagcccgaggtgatcttcaagctggagcagggcgagcagccctggttcctggagcaggagttcagcaaccagagctaccccgaggactacaacatcggatctggctccggcagcggccccaagaaaaagagaaaagtctaagctgccttctgcggggcttgccttctggccatgcccttcttctctcccttgcacctgtacctcttggtctttgaataaagcctgagtaggaaggctagcaaaaaaaaaaaaaaaaaaaaaaaaaaaaaaaaaaaaaaaaaaaaaaaaaaaaaaaaaaaaaaaaaaaaaaaaaaaaaaaa

SEQ ID NO: 16859 - RNA, 9485 nt, synthetic construct
  source 1..9485: mol_type = other RNA
aggaaataagagagaaaagaagagtaagaagaaatataagagccaccatggcccctaagaagaagcgtaaagtgagccggatggaacgcctcgtctacgaggtgcggcagaagtgcagaaacatcgaggacatctgcatctcctgcggatctctgaacgtgaccctggagcacccactgttcatcggcggcatgtgccagaactgtaaaaactgttttctggagtgtgcctatcaatacgacgatgacggctaccagagctactgcaccatctgttgcggcggaagagaggtgctgatgtgtggaaataacaactgctgccggtgcttctgcgtggaatgcgtggacctgctggtgggccccggcgccgcccaggccgctattaaggaagatccttggaactgctacatgtgcggccacaagggcacatacggcctgctgagacggagagaggactggcctagcagactgcagatgttcttcgccaataaccacgaccaggagttcgacccccctaaggtgtaccctcccgtccccgccgagaagagaaagcccatccgggtcctgagcctgttcgatggcatcgccaccggtctgctggtgctgaaggacctgggcatccaggtggataggtacattgcctccgaggtgtgcgaggactccatcaccgtgggaatggtgcgtcatcagggcaagatcatgtacgtgggcgacgtgcggagcgtgacacagaagcatatccaggagtggggccctttcgacctggtgatcggcggcagcccttgcaatgacctgagcatcgtgaacccagcccggaagggcctgtacgagggaaccggcagactgttcttcgagttttacagactgctgcacgacgcccggcctaaggaaggcgacgaccggcccttcttttggctgttcgagaatgtggtggccatgggagtcagcgacaagcgggatattagccggttcctggagagcaaccccgtgatgatcgatgccaaggaagtgagcgccgcccaccgggccagatacttctggggcaatctgcctggcatgaacagacccctggccagcaccgtgaacgacaagctggagctgcaggagtgcctggagcacggccggatcgccaagttcagcaaggtgagaaccatcaccacccgaagcaacagcatcaaacaaggcaaggaccagcactttcctgtgttcatgaacgagaaggaggacatcctgtggtgtaccgagatggagagagtgttcgggttcccagtccactacacagatgtcagcaacatgtctagactggccagacagagactgctgggaagaagctggtccgtccctgtgatcagacacctgttcgcccctctgaaggagtacttcgcctgcgtgagcagcggcaacagcaacgccaacagccggggccccagcttctctagcggcctggtgccactgtccctgagagggagccacatgggccccatggagatctacaaaaccgtgagcgcctggaagcggcagcctgtgcgcgtgctgagcctgtttcggaatatcgataaagtcctgaaaagcctgggattcctggagagcggctctggctccggcggtggcaccctgaagtacgtggaggatgtgacaaacgtggtcagacgggatgtggagaagtggggccccttcgatctggtgtacggcagcacccaacccctgggcagctcttgtgaccggtgccctggctggtacatgtttcagttccaccggatcctgcagtacgccctgccgagacaggagtcccagcggccattcttttggattttcatggacaacttgctgctgaccgaggatgaccaggaaactaccactcggttcctgcagaccgaagccgtgaccctgcaggacgtgagaggccgggactaccagaacgccatgcgggtgtggtccaacatccctggactgaaaagcaagcacgcacctctgacccctaaagaagaggagtacctgcaggcccaggtgcggagcagaagcaagctggacgcccctaaggtggatctgctggtgaagaattgcctcctgcccctgagagagtacttcaagtatttcagccagaatagtctgcccctgggaggcagcggcggcggcgccctggtgacatttgaggacgtcgccgtgcggttcacccaggaggaatgggctctgctggatccttctcagaaaatcctgtaccgggacgtgatgagagagacataccggaatctgacctccgtgggcatcaactgggaatgttgggaccttgaagcctgcttcagaagcctgggaagaaacctgagagtgcaggtggtgaagagaaagtgcgagctgaccaacagcggcccctgcgccgagggcggcccaagcagcggcgcccctcctcccagcggcggcagcccagccggctccccaacctctaccgaggagggcacctctgagtccgccacccccgagagcggccctggcacctccaccgagcccagcgagggcagcgcacccggcagccctgccggcagccccacctccacagaggagggaaccagcaccgagcccagcgaaggcagcgccccaggcaccagcaccgagcctagtgagcaggagattaaacggatcaacaagatcagaagaagacttgtgaaagacagcaacaccaagaaggccggcaagacaggccccatgaaaaccctgctggttagagtgatgacacccgatctgagagagcggctggaaaacctgagaaagaagcctgaaaatatcccccagcccatcagcaatacatctagagccaacctgaataagctgctgaccgattacaccgaaatgaagaaggcgatcctgcatgtgtactgggaagagttccagaaggaccctgtgggcctgatgagccgggtggcccagcctgccagcaagaagatcgatcagaacaagctgaaacctgagatggacgagaagggcaacctgaccaccgccggctttgcctgctctcagtgtggccagcccctgttcgtgtacaagctggagcaggtgtctgagaagggcaaggcttacaccaactacttcggacggtgcaatgtggccgagcacgaaaagctgatcctgctggcccagctgaagcccgagaaggatagcgacgaagccgtgacatatagcctgggaaagtttgggcagagggccctggatttctacagcattcatgtgaccaaggagtccacccaccccgtgaagcccctggcccagatcgccggaaacagatacgcctccggacctgtgggaaaggccctgagcgacgcatgtatgggcacaatcgcctccttcctgtctaagtaccaggacatcatcatcgaacaccagaaggtggtgaagggcaaccagaagagactggagagcctgcgggagctggccggcaaggaaaacctggaataccctagcgtgaccctgccacctcagcctcacaccaaggagggcgttgatgcctacaacgaagtgatcgcccgggtgcgaatgtgggtgaacctgaacctgtggcagaagctgaagctaagcagagatgatgccaagcctctgctgagactgaagggattcccttcctttcctctggtcgagagacaggccaacgaagtggactggtgggacatggtgtgtaacgtgaagaagctgatcaacgagaaaaaggaggatggcaaggtgttttggcagaatctggctggctacaagagacaggaagccctgagaccatacctgagcagcgaggaagatcggaagaagggaaagaaattcgctcggtaccagctgggcgacctgctgctgcacctggaaaagaagcacggcgaggactggggaaaggtgtacgacgaggcctgggagcggattgacaagaaagtggaaggcctgagcaagcacatcaagctggaagaggaacggagaagcgaggacgcccagagcaaggccgccctgaccgactggctgcgggctaaggccagcttcgtgatcgagggcctgaaggaggccgacaaggacgagttctgcagatgcgagctgaagctgcagaagtggtacggggacctgcggggaaagcccttcgccatcgaagccgagaacagcatcctggacatcagcggcttcagcaagcagtacaactgtgccttcatctggcagaaggacggcgtgaagaagctgaacctgtacctgatcatcaactacttcaagggcggcaagctgcggttcaagaagatcaaacctgaagccttcgaagccaacagattctacaccgtgatcaacaaaaagagcggcgagatcgtgcccatggaggtgaacttcaacttcgacgaccccaacctgatcatcctgcctctggcctttggcaagagacagggcagagaattcatctggaacgacctgctgtccctggaaaccggcagcctgaagctggccaacggaagagtgatcgagaagacactgtacaacagaagaacccggcaggatgagcctgccctgttcgtggccctgaccttcgagcggcgggaggtcctggactcctccaatatcaaaccaatgaacctgatcggcgtggcaagaggcgaaaacatccccgccgtgatcgccctgaccgaccccgagggctgcccactgagccggtttaaggatagcctgggaaacccaacccacatcctgagaatcggcgagagctataaggagaagcagcggaccatccaggccaagaaggaggtggagcagcggagagccggcggctacagccggaagtacgccagcaaagccaagaatctggcagacgatatggtgagaaacaccgctagagatctgctgtactacgccgtgacccaggatgccatgctgatcttcgccaacctgagccggggcttcggccggcagggcaagcggaccttcatggccgagagacagtacacacggatggaggactggctgaccgccaagctggcctacgagggcctgagcaagacctacctgtccaagacactggcccagtacacctccaagacatgcagcaactgtgggtttaccatcaccagcgccgactacgacagggtgctggagaagctgaagaagacagcaacaggctggatgaccacaattaacggcaaggagctgaaggtggagggccagattacctactacaacagatacaagagacagaacgtagtcaaggacctgtccgtcgagctggatagactgagcgaagaatctgtgaacaacgacatctcctcctggacaaagggcagaagcggagaagctctgagcctcctgaagaaaagattctcccatagacccgtgcaggagaagttcgtgtgcctgaactgcggcttcgagacacacgcagccgagcaagccgccctgaacatcgccagatcctggctgttcctgcggagccaggagtacaagaaataccagacaaacaagacaaccggcaacaccgataagagagccttcgtcgagacctggcagtccttttaccggaagaagcttaaggaggtgtggaaacctgccgtgcggtctggcggatctggcggaggctccagccagccccccgtgagcttcaaggacgtggtggtgagcttcaccagggaggagtggggccagctggacaccgtgcagaggaccctgtacagggacgtgaccctggagacctgcggccacctggtgagcctgggcctgctgctgcccaacctggacgtgatcagccacctggagaacggcgaggacccctggagggccgagcaggagccccccacccaggactggaagaccaccctggagaagggcggcccaagcagcggcgcccctcctcccagcggcggcagcccagccggctccccaacctctaccgaggagggcacctctgagtccgccacccccgagagcggccctggcacctccaccgagcccagcgagggcagcgcacccggcagccctgccggcagccccacctccacagaggagggaaccagcaccgagcccagcgaaggcagcgccccaggcaccagcaccgagcctagtgagcaggagattaaacggatcaacaagatcagaagaagacttgtgaaagacagcaacaccaagaaggccggcaagacaggccccatgaaaaccctgctggttagagtgatgacacccgatctgagagagcggctggaaaacctgagaaagaagcctgaaaatatcccccagcccatcagcaatacatctagagccaacctgaataagctgctgaccgattacaccgaaatgaagaaggcgatcctgcatgtgtactgggaagagttccagaaggaccctgtgggcctgatgagccgggtggcccagcctgccagcaagaagatcgatcagaacaagctgaaacctgagatggacgagaagggcaacctgaccaccgccggctttgcctgctctcagtgtggccagcccctgttcgtgtacaagctggagcaggtgtctgagaagggcaaggcttacaccaactacttcggacggtgcaatgtggccgagcacgaaaagctgatcctgctggcccagctgaagcccgagaaggatagcgacgaagccgtgacatatagcctgggaaagtttgggcagagggccctggatttctacagcattcatgtgaccaaggagtccacccaccccgtgaagcccctggcccagatcgccggaaacagatacgcctccggacctgtgggaaaggccctgagcgacgcatgtatgggcacaatcgcctccttcctgtctaagtaccaggacatcatcatcgaacaccagaaggtggtgaagggcaaccagaagagactggagagcctgcgggagctggccggcaaggaaaacctggaataccctagcgtgaccctgccacctcagcctcacaccaaggagggcgttgatgcctacaacgaagtgatcgcccgggtgcgaatgtgggtgaacctgaacctgtggcagaagctgaagctaagcagagatgatgccaagcctctgctgagactgaagggattcccttcctttcctctggtcgagagacaggccaacgaagtggactggtgggacatggtgtgtaacgtgaagaagctgatcaacgagaaaaaggaggatggcaaggtgttttggcagaatctggctggctacaagagacaggaagccctgagaccatacctgagcagcgaggaagatcggaagaagggaaagaaattcgctcggtaccagctgggcgacctgctgctgcacctggaaaagaagcacggcgaggactggggaaaggtgtacgacgaggcctgggagcggattgacaagaaagtggaaggcctgagcaagcacatcaagctggaagaggaacggagaagcgaggacgcccagagcaaggccgccctgaccgactggctgcgggctaaggccagcttcgtgatcgagggcctgaaggaggccgacaaggacgagttctgcagatgcgagctgaagctgcagaagtggtacggggacctgcggggaaagcccttcgccatcgaagccgagaacagcatcctggacatcagcggcttcagcaagcagtacaactgtgccttcatctggcagaaggacggcgtgaagaagctgaacctgtacctgatcatcaactacttcaagggcggcaagctgcggttcaagaagatcaaacctgaagccttcgaagccaacagattctacaccgtgatcaacaaaaagagcggcgagatcgtgcccatggaggtgaacttcaacttcgacgaccccaacctgatcatcctgcctctggcctttggcaagagacagggcagagaattcatctggaacgacctgctgtccctggaaaccggcagcctgaagctggccaacggaagagtgatcgagaagacactgtacaacagaagaacccggcaggatgagcctgccctgttcgtggccctgaccttcgagcggcgggaggtcctggactcctccaatatcaaaccaatgaacctgatcggcgtggcaagaggcgaaaacatccccgccgtgatcgccctgaccgaccccgagggctgcccactgagccggtttaaggatagcctgggaaacccaacccacatcctgagaatcggcgagagctataaggagaagcagcggaccatccaggccaagaaggaggtggagcagcggagagccggcggctacagccggaagtacgccagcaaagccaagaatctggcagacgatatggtgagaaacaccgctagagatctgctgtactacgccgtgacccaggatgccatgctgatcttcgccaacctgagccggggcttcggccggcagggcaagcggaccttcatggccgagagacagtacacacggatggaggactggctgaccgccaagctggcctacgagggcctgagcaagacctacctgtccaagacactggcccagtacacctccaagacatgcagcaactgtgggtttaccatcaccagcgccgactacgacagggtgctggagaagctgaagaagacagcaacaggctggatgaccacaattaacggcaaggagctgaaggtggagggccagattacctactacaacagatacaagagacagaacgtagtcaaggacctgtccgtcgagctggatagactgagcgaagaatctgtgaacaacgacatctcctcctggacaaagggcagaagcggagaagctctgagcctcctgaagaaaagattctcccatagacccgtgcaggagaagttcgtgtgcctgaactgcggcttcgagacacacgcagccgagcaagccgccctgaacatcgccagatcctggctgttcctgcggagccaggagtacaagaaataccagacaaacaagacaaccggcaacaccgataagagagccttcgtcgagacctggcagtccttttaccggaagaagcttaaggaggtgtggaaacctgccgtgcggtctggcggatctggcggaggctcctagccagccccccgtgagcttcaaggacgtggtggtgagcttcaccagggaggagtggggccagctggacaccgtgcagaggaccctgtacagggacgtgaccctggagacctgcggccacctggtgagcctgggcctgctgctgcccaacctggacgtgatcagccacctggagaacggcgaggacccctggagggccgagcaggagccccccacccaggactggaagaccaccctggagaagggatctggctccggcagcggccccaagaaaaagagaaaagtctaagctgccttctgcggggcttgccttctggccatgcccttcttctctcccttgcacctgtacctcttggtctttgaataaagcctgagtaggaaggctagcaaaaaaaaaaaaaaaaaaaaaaaaaaaaaaaaaaaaaaaaaaaaaaaaaaaaaaaaaaaaaaaaaaaaaaaaaaaaaaaa

SEQ ID NO: 16860 - RNA, 9485 nt, synthetic construct
  source 1..9485: mol_type = other RNA
aggaaataagagagaaaagaagagtaagaagaaatataagagccaccatggcccctaagaagaagcgtaaagtgagccggatggaacgcctcgtctacgaggtgcggcagaagtgcagaaacatcgaggacatctgcatctcctgcggatctctgaacgtgaccctggagcacccactgttcatcggcggcatgtgccagaactgtaaaaactgttttctggagtgtgcctatcaatacgacgatgacggctaccagagctactgcaccatctgttgcggcggaagagaggtgctgatgtgtggaaataacaactgctgccggtgcttctgcgtggaatgcgtggacctgctggtgggccccggcgccgcccaggccgctattaaggaagatccttggaactgctacatgtgcggccacaagggcacatacggcctgctgagacggagagaggactggcctagcagactgcagatgttcttcgccaataaccacgaccaggagttcgacccccctaaggtgtaccctcccgtccccgccgagaagagaaagcccatccgggtcctgagcctgttcgatggcatcgccaccggtctgctggtgctgaaggacctgggcatccaggtggataggtacattgcctccgaggtgtgcgaggactccatcaccgtgggaatggtgcgtcatcagggcaagatcatgtacgtgggcgacgtgcggagcgtgacacagaagcatatccaggagtggggccctttcgacctggtgatcggcggcagcccttgcaatgacctgagcatcgtgaacccagcccggaagggcctgtacgagggaaccggcagactgttcttcgagttttacagactgctgcacgacgcccggcctaaggaaggcgacgaccggcccttcttttggctgttcgagaatgtggtggccatgggagtcagcgacaagcgggatattagccggttcctggagagcaaccccgtgatgatcgatgccaaggaagtgagcgccgcccaccgggccagatacttctggggcaatctgcctggcatgaacagacccctggccagcaccgtgaacgacaagctggagctgcaggagtgcctggagcacggccggatcgccaagttcagcaaggtgagaaccatcaccacccgaagcaacagcatcaaacaaggcaaggaccagcactttcctgtgttcatgaacgagaaggaggacatcctgtggtgtaccgagatggagagagtgttcgggttcccagtccactacacagatgtcagcaacatgtctagactggccagacagagactgctgggaagaagctggtccgtccctgtgatcagacacctgttcgcccctctgaaggagtacttcgcctgcgtgagcagcggcaacagcaacgccaacagccggggccccagcttctctagcggcctggtgccactgtccctgagagggagccacatgggccccatggagatctacaaaaccgtgagcgcctggaagcggcagcctgtgcgcgtgctgagcctgtttcggaatatcgataaagtcctgaaaagcctgggattcctggagagcggctctggctccggcggtggcaccctgaagtacgtggaggatgtgacaaacgtggtcagacgggatgtggagaagtggggccccttcgatctggtgtacggcagcacccaacccctgggcagctcttgtgaccggtgccctggctggtacatgtttcagttccaccggatcctgcagtacgccctgccgagacaggagtcccagcggccattcttttggattttcatggacaacttgctgctgaccgaggatgaccaggaaactaccactcggttcctgcagaccgaagccgtgaccctgcaggacgtgagaggccgggactaccagaacgccatgcgggtgtggtccaacatccctggactgaaaagcaagcacgcacctctgacccctaaagaagaggagtacctgcaggcccaggtgcggagcagaagcaagctggacgcccctaaggtggatctgctggtgaagaattgcctcctgcccctgagagagtacttcaagtatttcagccagaatagtctgcccctgggaggcagcggcggcggcgccctggtgacatttgaggacgtcgccgtgcggttcacccaggaggaatgggctctgctggatccttctcagaaaatcctgtaccgggacgtgatgagagagacataccggaatctgacctccgtgggcatcaactgggaatgttgggaccttgaagcctgcttcagaagcctgggaagaaacctgagagtgcaggtggtgaagagaaagtgcgagctgaccaacagcggcccctgcgccgagggcggcccaagcagcggcgcccctcctcccagcggcggcagcccagccggctccccaacctctaccgaggagggcacctctgagtccgccacccccgagagcggccctggcacctccaccgagcccagcgagggcagcgcacccggcagccctgccggcagccccacctccacagaggagggaaccagcaccgagcccagcgaaggcagcgccccaggcaccagcaccgagcctagtgagcaggagattaaacggatcaacaagatcagaagaagacttgtgaaagacagcaacaccaagaaggccggcaagacaggccccatgaaaaccctgctggttagagtgatgacacccgatctgagagagcggctggaaaacctgagaaagaagcctgaaaatatcccccagcccatcagcaatacatctagagccaacctgaataagctgctgaccgattacaccgaaatgaagaaggcgatcctgcatgtgtactgggaagagttccagaaggaccctgtgggcctgatgagccgggtggcccagcctgccagcaagaagatcgatcagaacaagctgaaacctgagatggacgagaagggcaacctgaccaccgccggctttgcctgctctcagtgtggccagcccctgttcgtgtacaagctggagcaggtgtctgagaagggcaaggcttacaccaactacttcggacggtgcaatgtggccgagcacgaaaagctgatcctgctggcccagctgaagcccgagaaggatagcgacgaagccgtgacatatagcctgggaaagtttgggcagagggccctggatttctacagcattcatgtgaccaaggagtccacccaccccgtgaagcccctggcccagatcgccggaaacagatacgcctccggacctgtgggaaaggccctgagcgacgcatgtatgggcacaatcgcctccttcctgtctaagtaccaggacatcatcatcgaacaccagaaggtggtgaagggcaaccagaagagactggagagcctgcgggagctggccggcaaggaaaacctggaataccctagcgtgaccctgccacctcagcctcacaccaaggagggcgttgatgcctacaacgaagtgatcgcccgggtgcgaatgtgggtgaacctgaacctgtggcagaagctgaagctaagcagagatgatgccaagcctctgctgagactgaagggattcccttcctttcctctggtcgagagacaggccaacgaagtggactggtgggacatggtgtgtaacgtgaagaagctgatcaacgagaaaaaggaggatggcaaggtgttttggcagaatctggctggctacaagagacaggaagccctgagaccatacctgagcagcgaggaagatcggaagaagggaaagaaattcgctcggtaccagctgggcgacctgctgctgcacctggaaaagaagcacggcgaggactggggaaaggtgtacgacgaggcctgggagcggattgacaagaaagtggaaggcctgagcaagcacatcaagctggaagaggaacggagaagcgaggacgcccagagcaaggccgccctgaccgactggctgcgggctaaggccagcttcgtgatcgagggcctgaaggaggccgacaaggacgagttctgcagatgcgagctgaagctgcagaagtggtacggggacctgcggggaaagcccttcgccatcgaagccgagaacagcatcctggacatcagcggcttcagcaagcagtacaactgtgccttcatctggcagaaggacggcgtgaagaagctgaacctgtacctgatcatcaactacttcaagggcggcaagctgcggttcaagaagatcaaacctgaagccttcgaagccaacagattctacaccgtgatcaacaaaaagagcggcgagatcgtgcccatggaggtgaacttcaacttcgacgaccccaacctgatcatcctgcctctggcctttggcaagagacagggcagagaattcatctggaacgacctgctgtccctggaaaccggcagcctgaagctggccaacggaagagtgatcgagaagacactgtacaacagaagaacccggcaggatgagcctgccctgttcgtggccctgaccttcgagcggcgggaggtcctggactcctccaatatcaaaccaatgaacctgatcggcgtggcaagaggcgaaaacatccccgccgtgatcgccctgaccgaccccgagggctgcccactgagccggtttaaggatagcctgggaaacccaacccacatcctgagaatcggcgagagctataaggagaagcagcggaccatccaggccaagaaggaggtggagcagcggagagccggcggctacagccggaagtacgccagcaaagccaagaatctggcagacgatatggtgagaaacaccgctagagatctgctgtactacgccgtgacccaggatgccatgctgatcttcgccaacctgagccggggcttcggccggcagggcaagcggaccttcatggccgagagacagtacacacggatggaggactggctgaccgccaagctggcctacgagggcctgagcaagacctacctgtccaagacactggcccagtacacctccaagacatgcagcaactgtgggtttaccatcaccagcgccgactacgacagggtgctggagaagctgaagaagacagcaacaggctggatgaccacaattaacggcaaggagctgaaggtggagggccagattacctactacaacagatacaagagacagaacgtagtcaaggacctgtccgtcgagctggatagactgagcgaagaatctgtgaacaacgacatctcctcctggacaaagggcagaagcggagaagctctgagcctcctgaagaaaagattctcccatagacccgtgcaggagaagttcgtgtgcctgaactgcggcttcgagacacacgcagccgagcaagccgccctgaacatcgccagatcctggctgttcctgcggagccaggagtacaagaaataccagacaaacaagacaaccggcaacaccgataagagagccttcgtcgagacctggcagtccttttaccggaagaagcttaaggaggtgtggaaacctgccgtgcggtctggcggatctggcggaggctccgcccagggccaggtgaccttcgaggacgtggccgtgtgcttcagccaggaggagtggggcctgctggacgagacccagaggctgctgtacaggagcgtgatgctggagaccttcagcctgatggccagcctgggcctgaccagcagcaggacccacgacatcagccagctggagaggtggggcgagcccttcctgagcgccagcggcgccatgagggccaccaggcccaccggctgctggcacggcggcccaagcagcggcgcccctcctcccagcggcggcagcccagccggctccccaacctctaccgaggagggcacctctgagtccgccacccccgagagcggccctggcacctccaccgagcccagcgagggcagcgcacccggcagccctgccggcagccccacctccacagaggagggaaccagcaccgagcccagcgaaggcagcgccccaggcaccagcaccgagcctagtgagcaggagattaaacggatcaacaagatcagaagaagacttgtgaaagacagcaacaccaagaaggccggcaagacaggccccatgaaaaccctgctggttagagtgatgacacccgatctgagagagcggctggaaaacctgagaaagaagcctgaaaatatcccccagcccatcagcaatacatctagagccaacctgaataagctgctgaccgattacaccgaaatgaagaaggcgatcctgcatgtgtactgggaagagttccagaaggaccctgtgggcctgatgagccgggtggcccagcctgccagcaagaagatcgatcagaacaagctgaaacctgagatggacgagaagggcaacctgaccaccgccggctttgcctgctctcagtgtggccagcccctgttcgtgtacaagctggagcaggtgtctgagaagggcaaggcttacaccaactacttcggacggtgcaatgtggccgagcacgaaaagctgatcctgctggcccagctgaagcccgagaaggatagcgacgaagccgtgacatatagcctgggaaagtttgggcagagggccctggatttctacagcattcatgtgaccaaggagtccacccaccccgtgaagcccctggcccagatcgccggaaacagatacgcctccggacctgtgggaaaggccctgagcgacgcatgtatgggcacaatcgcctccttcctgtctaagtaccaggacatcatcatcgaacaccagaaggtggtgaagggcaaccagaagagactggagagcctgcgggagctggccggcaaggaaaacctggaataccctagcgtgaccctgccacctcagcctcacaccaaggagggcgttgatgcctacaacgaagtgatcgcccgggtgcgaatgtgggtgaacctgaacctgtggcagaagctgaagctaagcagagatgatgccaagcctctgctgagactgaagggattcccttcctttcctctggtcgagagacaggccaacgaagtggactggtgggacatggtgtgtaacgtgaagaagctgatcaacgagaaaaaggaggatggcaaggtgttttggcagaatctggctggctacaagagacaggaagccctgagaccatacctgagcagcgaggaagatcggaagaagggaaagaaattcgctcggtaccagctgggcgacctgctgctgcacctggaaaagaagcacggcgaggactggggaaaggtgtacgacgaggcctgggagcggattgacaagaaagtggaaggcctgagcaagcacatcaagctggaagaggaacggagaagcgaggacgcccagagcaaggccgccctgaccgactggctgcgggctaaggccagcttcgtgatcgagggcctgaaggaggccgacaaggacgagttctgcagatgcgagctgaagctgcagaagtggtacggggacctgcggggaaagcccttcgccatcgaagccgagaacagcatcctggacatcagcggcttcagcaagcagtacaactgtgccttcatctggcagaaggacggcgtgaagaagctgaacctgtacctgatcatcaactacttcaagggcggcaagctgcggttcaagaagatcaaacctgaagccttcgaagccaacagattctacaccgtgatcaacaaaaagagcggcgagatcgtgcccatggaggtgaacttcaacttcgacgaccccaacctgatcatcctgcctctggcctttggcaagagacagggcagagaattcatctggaacgacctgctgtccctggaaaccggcagcctgaagctggccaacggaagagtgatcgagaagacactgtacaacagaagaacccggcaggatgagcctgccctgttcgtggccctgaccttcgagcggcgggaggtcctggactcctccaatatcaaaccaatgaacctgatcggcgtggcaagaggcgaaaacatccccgccgtgatcgccctgaccgaccccgagggctgcccactgagccggtttaaggatagcctgggaaacccaacccacatcctgagaatcggcgagagctataaggagaagcagcggaccatccaggccaagaaggaggtggagcagcggagagccggcggctacagccggaagtacgccagcaaagccaagaatctggcagacgatatggtgagaaacaccgctagagatctgctgtactacgccgtgacccaggatgccatgctgatcttcgccaacctgagccggggcttcggccggcagggcaagcggaccttcatggccgagagacagtacacacggatggaggactggctgaccgccaagctggcctacgagggcctgagcaagacctacctgtccaagacactggcccagtacacctccaagacatgcagcaactgtgggtttaccatcaccagcgccgactacgacagggtgctggagaagctgaagaagacagcaacaggctggatgaccacaattaacggcaaggagctgaaggtggagggccagattacctactacaacagatacaagagacagaacgtagtcaaggacctgtccgtcgagctggatagactgagcgaagaatctgtgaacaacgacatctcctcctggacaaagggcagaagcggagaagctctgagcctcctgaagaaaagattctcccatagacccgtgcaggagaagttcgtgtgcctgaactgcggcttcgagacacacgcagccgagcaagccgccctgaacatcgccagatcctggctgttcctgcggagccaggagtacaagaaataccagacaaacaagacaaccggcaacaccgataagagagccttcgtcgagacctggcagtccttttaccggaagaagcttaaggaggtgtggaaacctgccgtgcggtctggcggatctggcggaggctcctgcccagggccaggtgaccttcgaggacgtggccgtgtgcttcagccaggaggagtggggcctgctggacgagacccagaggctgctgtacaggagcgtgatgctggagaccttcagcctgatggccagcctgggcctgaccagcagcaggacccacgacatcagccagctggagaggtggggcgagcccttcctgagcgccagcggcgccatgagggccaccaggcccaccggctgctggcacggatctggctccggcagcggccccaagaaaaagagaaaagtctaagctgccttctgcggggcttgccttctggccatgcccttcttctctcccttgcacctgtacctcttggtctttgaataaagcctgagtaggaaggctagcaaaaaaaaaaaaaaaaaaaaaaaaaaaaaaaaaaaaaaaaaaaaaaaaaaaaaaaaaaaaaaaaaaaaaaaaaaaaaaaa

SEQ ID NO: 16861 - RNA, 9479 nt, synthetic construct
  source 1..9479: mol_type = other RNA
aggaaataagagagaaaagaagagtaagaagaaatataagagccaccatggcccctaagaagaagcgtaaagtgagccggatggaacgcctcgtctacgaggtgcggcagaagtgcagaaacatcgaggacatctgcatctcctgcggatctctgaacgtgaccctggagcacccactgttcatcggcggcatgtgccagaactgtaaaaactgttttctggagtgtgcctatcaatacgacgatgacggctaccagagctactgcaccatctgttgcggcggaagagaggtgctgatgtgtggaaataacaactgctgccggtgcttctgcgtggaatgcgtggacctgctggtgggccccggcgccgcccaggccgctattaaggaagatccttggaactgctacatgtgcggccacaagggcacatacggcctgctgagacggagagaggactggcctagcagactgcagatgttcttcgccaataaccacgaccaggagttcgacccccctaaggtgtaccctcccgtccccgccgagaagagaaagcccatccgggtcctgagcctgttcgatggcatcgccaccggtctgctggtgctgaaggacctgggcatccaggtggataggtacattgcctccgaggtgtgcgaggactccatcaccgtgggaatggtgcgtcatcagggcaagatcatgtacgtgggcgacgtgcggagcgtgacacagaagcatatccaggagtggggccctttcgacctggtgatcggcggcagcccttgcaatgacctgagcatcgtgaacccagcccggaagggcctgtacgagggaaccggcagactgttcttcgagttttacagactgctgcacgacgcccggcctaaggaaggcgacgaccggcccttcttttggctgttcgagaatgtggtggccatgggagtcagcgacaagcgggatattagccggttcctggagagcaaccccgtgatgatcgatgccaaggaagtgagcgccgcccaccgggccagatacttctggggcaatctgcctggcatgaacagacccctggccagcaccgtgaacgacaagctggagctgcaggagtgcctggagcacggccggatcgccaagttcagcaaggtgagaaccatcaccacccgaagcaacagcatcaaacaaggcaaggaccagcactttcctgtgttcatgaacgagaaggaggacatcctgtggtgtaccgagatggagagagtgttcgggttcccagtccactacacagatgtcagcaacatgtctagactggccagacagagactgctgggaagaagctggtccgtccctgtgatcagacacctgttcgcccctctgaaggagtacttcgcctgcgtgagcagcggcaacagcaacgccaacagccggggccccagcttctctagcggcctggtgccactgtccctgagagggagccacatgggccccatggagatctacaaaaccgtgagcgcctggaagcggcagcctgtgcgcgtgctgagcctgtttcggaatatcgataaagtcctgaaaagcctgggattcctggagagcggctctggctccggcggtggcaccctgaagtacgtggaggatgtgacaaacgtggtcagacgggatgtggagaagtggggccccttcgatctggtgtacggcagcacccaacccctgggcagctcttgtgaccggtgccctggctggtacatgtttcagttccaccggatcctgcagtacgccctgccgagacaggagtcccagcggccattcttttggattttcatggacaacttgctgctgaccgaggatgaccaggaaactaccactcggttcctgcagaccgaagccgtgaccctgcaggacgtgagaggccgggactaccagaacgccatgcgggtgtggtccaacatccctggactgaaaagcaagcacgcacctctgacccctaaagaagaggagtacctgcaggcccaggtgcggagcagaagcaagctggacgcccctaaggtggatctgctggtgaagaattgcctcctgcccctgagagagtacttcaagtatttcagccagaatagtctgcccctgggaggcagcggcggcggcgccctggtgacatttgaggacgtcgccgtgcggttcacccaggaggaatgggctctgctggatccttctcagaaaatcctgtaccgggacgtgatgagagagacataccggaatctgacctccgtgggcatcaactgggaatgttgggaccttgaagcctgcttcagaagcctgggaagaaacctgagagtgcaggtggtgaagagaaagtgcgagctgaccaacagcggcccctgcgccgagggcggcccaagcagcggcgcccctcctcccagcggcggcagcccagccggctccccaacctctaccgaggagggcacctctgagtccgccacccccgagagcggccctggcacctccaccgagcccagcgagggcagcgcacccggcagccctgccggcagccccacctccacagaggagggaaccagcaccgagcccagcgaaggcagcgccccaggcaccagcaccgagcctagtgagcaggagattaaacggatcaacaagatcagaagaagacttgtgaaagacagcaacaccaagaaggccggcaagacaggccccatgaaaaccctgctggttagagtgatgacacccgatctgagagagcggctggaaaacctgagaaagaagcctgaaaatatcccccagcccatcagcaatacatctagagccaacctgaataagctgctgaccgattacaccgaaatgaagaaggcgatcctgcatgtgtactgggaagagttccagaaggaccctgtgggcctgatgagccgggtggcccagcctgccagcaagaagatcgatcagaacaagctgaaacctgagatggacgagaagggcaacctgaccaccgccggctttgcctgctctcagtgtggccagcccctgttcgtgtacaagctggagcaggtgtctgagaagggcaaggcttacaccaactacttcggacggtgcaatgtggccgagcacgaaaagctgatcctgctggcccagctgaagcccgagaaggatagcgacgaagccgtgacatatagcctgggaaagtttgggcagagggccctggatttctacagcattcatgtgaccaaggagtccacccaccccgtgaagcccctggcccagatcgccggaaacagatacgcctccggacctgtgggaaaggccctgagcgacgcatgtatgggcacaatcgcctccttcctgtctaagtaccaggacatcatcatcgaacaccagaaggtggtgaagggcaaccagaagagactggagagcctgcgggagctggccggcaaggaaaacctggaataccctagcgtgaccctgccacctcagcctcacaccaaggagggcgttgatgcctacaacgaagtgatcgcccgggtgcgaatgtgggtgaacctgaacctgtggcagaagctgaagctaagcagagatgatgccaagcctctgctgagactgaagggattcccttcctttcctctggtcgagagacaggccaacgaagtggactggtgggacatggtgtgtaacgtgaagaagctgatcaacgagaaaaaggaggatggcaaggtgttttggcagaatctggctggctacaagagacaggaagccctgagaccatacctgagcagcgaggaagatcggaagaagggaaagaaattcgctcggtaccagctgggcgacctgctgctgcacctggaaaagaagcacggcgaggactggggaaaggtgtacgacgaggcctgggagcggattgacaagaaagtggaaggcctgagcaagcacatcaagctggaagaggaacggagaagcgaggacgcccagagcaaggccgccctgaccgactggctgcgggctaaggccagcttcgtgatcgagggcctgaaggaggccgacaaggacgagttctgcagatgcgagctgaagctgcagaagtggtacggggacctgcggggaaagcccttcgccatcgaagccgagaacagcatcctggacatcagcggcttcagcaagcagtacaactgtgccttcatctggcagaaggacggcgtgaagaagctgaacctgtacctgatcatcaactacttcaagggcggcaagctgcggttcaagaagatcaaacctgaagccttcgaagccaacagattctacaccgtgatcaacaaaaagagcggcgagatcgtgcccatggaggtgaacttcaacttcgacgaccccaacctgatcatcctgcctctggcctttggcaagagacagggcagagaattcatctggaacgacctgctgtccctggaaaccggcagcctgaagctggccaacggaagagtgatcgagaagacactgtacaacagaagaacccggcaggatgagcctgccctgttcgtggccctgaccttcgagcggcgggaggtcctggactcctccaatatcaaaccaatgaacctgatcggcgtggcaagaggcgaaaacatccccgccgtgatcgccctgaccgaccccgagggctgcccactgagccggtttaaggatagcctgggaaacccaacccacatcctgagaatcggcgagagctataaggagaagcagcggaccatccaggccaagaaggaggtggagcagcggagagccggcggctacagccggaagtacgccagcaaagccaagaatctggcagacgatatggtgagaaacaccgctagagatctgctgtactacgccgtgacccaggatgccatgctgatcttcgccaacctgagccggggcttcggccggcagggcaagcggaccttcatggccgagagacagtacacacggatggaggactggctgaccgccaagctggcctacgagggcctgagcaagacctacctgtccaagacactggcccagtacacctccaagacatgcagcaactgtgggtttaccatcaccagcgccgactacgacagggtgctggagaagctgaagaagacagcaacaggctggatgaccacaattaacggcaaggagctgaaggtggagggccagattacctactacaacagatacaagagacagaacgtagtcaaggacctgtccgtcgagctggatagactgagcgaagaatctgtgaacaacgacatctcctcctggacaaagggcagaagcggagaagctctgagcctcctgaagaaaagattctcccatagacccgtgcaggagaagttcgtgtgcctgaactgcggcttcgagacacacgcagccgagcaagccgccctgaacatcgccagatcctggctgttcctgcggagccaggagtacaagaaataccagacaaacaagacaaccggcaacaccgataagagagccttcgtcgagacctggcagtccttttaccggaagaagcttaaggaggtgtggaaacctgccgtgcggtctggcggatctggcggaggctccatgggcgagcccctggagttcagggacgtggccatcgagttcagcctggaggagtggcactgcctggacaccgcccagaggaacctgtacagggacgtgatgctggagaactacaggaacctggtgttcctgggcatcgccgtgagcaagcccgacctgatcacctggctggagcagggcaagaagcccctgaccgtgaagggccacgagatgatcgccaccccccccggcaggtgcaagggcggcccaagcagcggcgcccctcctcccagcggcggcagcccagccggctccccaacctctaccgaggagggcacctctgagtccgccacccccgagagcggccctggcacctccaccgagcccagcgagggcagcgcacccggcagccctgccggcagccccacctccacagaggagggaaccagcaccgagcccagcgaaggcagcgccccaggcaccagcaccgagcctagtgagcaggagattaaacggatcaacaagatcagaagaagacttgtgaaagacagcaacaccaagaaggccggcaagacaggccccatgaaaaccctgctggttagagtgatgacacccgatctgagagagcggctggaaaacctgagaaagaagcctgaaaatatcccccagcccatcagcaatacatctagagccaacctgaataagctgctgaccgattacaccgaaatgaagaaggcgatcctgcatgtgtactgggaagagttccagaaggaccctgtgggcctgatgagccgggtggcccagcctgccagcaagaagatcgatcagaacaagctgaaacctgagatggacgagaagggcaacctgaccaccgccggctttgcctgctctcagtgtggccagcccctgttcgtgtacaagctggagcaggtgtctgagaagggcaaggcttacaccaactacttcggacggtgcaatgtggccgagcacgaaaagctgatcctgctggcccagctgaagcccgagaaggatagcgacgaagccgtgacatatagcctgggaaagtttgggcagagggccctggatttctacagcattcatgtgaccaaggagtccacccaccccgtgaagcccctggcccagatcgccggaaacagatacgcctccggacctgtgggaaaggccctgagcgacgcatgtatgggcacaatcgcctccttcctgtctaagtaccaggacatcatcatcgaacaccagaaggtggtgaagggcaaccagaagagactggagagcctgcgggagctggccggcaaggaaaacctggaataccctagcgtgaccctgccacctcagcctcacaccaaggagggcgttgatgcctacaacgaagtgatcgcccgggtgcgaatgtgggtgaacctgaacctgtggcagaagctgaagctaagcagagatgatgccaagcctctgctgagactgaagggattcccttcctttcctctggtcgagagacaggccaacgaagtggactggtgggacatggtgtgtaacgtgaagaagctgatcaacgagaaaaaggaggatggcaaggtgttttggcagaatctggctggctacaagagacaggaagccctgagaccatacctgagcagcgaggaagatcggaagaagggaaagaaattcgctcggtaccagctgggcgacctgctgctgcacctggaaaagaagcacggcgaggactggggaaaggtgtacgacgaggcctgggagcggattgacaagaaagtggaaggcctgagcaagcacatcaagctggaagaggaacggagaagcgaggacgcccagagcaaggccgccctgaccgactggctgcgggctaaggccagcttcgtgatcgagggcctgaaggaggccgacaaggacgagttctgcagatgcgagctgaagctgcagaagtggtacggggacctgcggggaaagcccttcgccatcgaagccgagaacagcatcctggacatcagcggcttcagcaagcagtacaactgtgccttcatctggcagaaggacggcgtgaagaagctgaacctgtacctgatcatcaactacttcaagggcggcaagctgcggttcaagaagatcaaacctgaagccttcgaagccaacagattctacaccgtgatcaacaaaaagagcggcgagatcgtgcccatggaggtgaacttcaacttcgacgaccccaacctgatcatcctgcctctggcctttggcaagagacagggcagagaattcatctggaacgacctgctgtccctggaaaccggcagcctgaagctggccaacggaagagtgatcgagaagacactgtacaacagaagaacccggcaggatgagcctgccctgttcgtggccctgaccttcgagcggcgggaggtcctggactcctccaatatcaaaccaatgaacctgatcggcgtggcaagaggcgaaaacatccccgccgtgatcgccctgaccgaccccgagggctgcccactgagccggtttaaggatagcctgggaaacccaacccacatcctgagaatcggcgagagctataaggagaagcagcggaccatccaggccaagaaggaggtggagcagcggagagccggcggctacagccggaagtacgccagcaaagccaagaatctggcagacgatatggtgagaaacaccgctagagatctgctgtactacgccgtgacccaggatgccatgctgatcttcgccaacctgagccggggcttcggccggcagggcaagcggaccttcatggccgagagacagtacacacggatggaggactggctgaccgccaagctggcctacgagggcctgagcaagacctacctgtccaagacactggcccagtacacctccaagacatgcagcaactgtgggtttaccatcaccagcgccgactacgacagggtgctggagaagctgaagaagacagcaacaggctggatgaccacaattaacggcaaggagctgaaggtggagggccagattacctactacaacagatacaagagacagaacgtagtcaaggacctgtccgtcgagctggatagactgagcgaagaatctgtgaacaacgacatctcctcctggacaaagggcagaagcggagaagctctgagcctcctgaagaaaagattctcccatagacccgtgcaggagaagttcgtgtgcctgaactgcggcttcgagacacacgcagccgagcaagccgccctgaacatcgccagatcctggctgttcctgcggagccaggagtacaagaaataccagacaaacaagacaaccggcaacaccgataagagagccttcgtcgagacctggcagtccttttaccggaagaagcttaaggaggtgtggaaacctgccgtgcggtctggcggatctggcggaggctcctatgggcgagcccctggagttcagggacgtggccatcgagttcagcctggaggagtggcactgcctggacaccgcccagaggaacctgtacagggacgtgatgctggagaactacaggaacctggtgttcctgggcatcgccgtgagcaagcccgacctgatcacctggctggagcagggcaagaagcccctgaccgtgaagggccacgagatgatcgccaccccccccggcaggtgcaagggatctggctccggcagcggccccaagaaaaagagaaaagtctaagctgccttctgcggggcttgccttctggccatgcccttcttctctcccttgcacctgtacctcttggtctttgaataaagcctgagtaggaaggctagcaaaaaaaaaaaaaaaaaaaaaaaaaaaaaaaaaaaaaaaaaaaaaaaaaaaaaaaaaaaaaaaaaaaaaaaaaaaaaaaa

SEQ ID NO: 16862 - RNA, 9485 nt, synthetic construct
  source 1..9485: mol_type = other RNA
aggaaataagagagaaaagaagagtaagaagaaatataagagccaccatggcccctaagaagaagcgtaaagtgagccggatggaacgcctcgtctacgaggtgcggcagaagtgcagaaacatcgaggacatctgcatctcctgcggatctctgaacgtgaccctggagcacccactgttcatcggcggcatgtgccagaactgtaaaaactgttttctggagtgtgcctatcaatacgacgatgacggctaccagagctactgcaccatctgttgcggcggaagagaggtgctgatgtgtggaaataacaactgctgccggtgcttctgcgtggaatgcgtggacctgctggtgggccccggcgccgcccaggccgctattaaggaagatccttggaactgctacatgtgcggccacaagggcacatacggcctgctgagacggagagaggactggcctagcagactgcagatgttcttcgccaataaccacgaccaggagttcgacccccctaaggtgtaccctcccgtccccgccgagaagagaaagcccatccgggtcctgagcctgttcgatggcatcgccaccggtctgctggtgctgaaggacctgggcatccaggtggataggtacattgcctccgaggtgtgcgaggactccatcaccgtgggaatggtgcgtcatcagggcaagatcatgtacgtgggcgacgtgcggagcgtgacacagaagcatatccaggagtggggccctttcgacctggtgatcggcggcagcccttgcaatgacctgagcatcgtgaacccagcccggaagggcctgtacgagggaaccggcagactgttcttcgagttttacagactgctgcacgacgcccggcctaaggaaggcgacgaccggcccttcttttggctgttcgagaatgtggtggccatgggagtcagcgacaagcgggatattagccggttcctggagagcaaccccgtgatgatcgatgccaaggaagtgagcgccgcccaccgggccagatacttctggggcaatctgcctggcatgaacagacccctggccagcaccgtgaacgacaagctggagctgcaggagtgcctggagcacggccggatcgccaagttcagcaaggtgagaaccatcaccacccgaagcaacagcatcaaacaaggcaaggaccagcactttcctgtgttcatgaacgagaaggaggacatcctgtggtgtaccgagatggagagagtgttcgggttcccagtccactacacagatgtcagcaacatgtctagactggccagacagagactgctgggaagaagctggtccgtccctgtgatcagacacctgttcgcccctctgaaggagtacttcgcctgcgtgagcagcggcaacagcaacgccaacagccggggccccagcttctctagcggcctggtgccactgtccctgagagggagccacatgggccccatggagatctacaaaaccgtgagcgcctggaagcggcagcctgtgcgcgtgctgagcctgtttcggaatatcgataaagtcctgaaaagcctgggattcctggagagcggctctggctccggcggtggcaccctgaagtacgtggaggatgtgacaaacgtggtcagacgggatgtggagaagtggggccccttcgatctggtgtacggcagcacccaacccctgggcagctcttgtgaccggtgccctggctggtacatgtttcagttccaccggatcctgcagtacgccctgccgagacaggagtcccagcggccattcttttggattttcatggacaacttgctgctgaccgaggatgaccaggaaactaccactcggttcctgcagaccgaagccgtgaccctgcaggacgtgagaggccgggactaccagaacgccatgcgggtgtggtccaacatccctggactgaaaagcaagcacgcacctctgacccctaaagaagaggagtacctgcaggcccaggtgcggagcagaagcaagctggacgcccctaaggtggatctgctggtgaagaattgcctcctgcccctgagagagtacttcaagtatttcagccagaatagtctgcccctgggaggcagcggcggcggcgccctggtgacatttgaggacgtcgccgtgcggttcacccaggaggaatgggctctgctggatccttctcagaaaatcctgtaccgggacgtgatgagagagacataccggaatctgacctccgtgggcatcaactgggaatgttgggaccttgaagcctgcttcagaagcctgggaagaaacctgagagtgcaggtggtgaagagaaagtgcgagctgaccaacagcggcccctgcgccgagggcggcccaagcagcggcgcccctcctcccagcggcggcagcccagccggctccccaacctctaccgaggagggcacctctgagtccgccacccccgagagcggccctggcacctccaccgagcccagcgagggcagcgcacccggcagccctgccggcagccccacctccacagaggagggaaccagcaccgagcccagcgaaggcagcgccccaggcaccagcaccgagcctagtgagcaggagattaaacggatcaacaagatcagaagaagacttgtgaaagacagcaacaccaagaaggccggcaagacaggccccatgaaaaccctgctggttagagtgatgacacccgatctgagagagcggctggaaaacctgagaaagaagcctgaaaatatcccccagcccatcagcaatacatctagagccaacctgaataagctgctgaccgattacaccgaaatgaagaaggcgatcctgcatgtgtactgggaagagttccagaaggaccctgtgggcctgatgagccgggtggcccagcctgccagcaagaagatcgatcagaacaagctgaaacctgagatggacgagaagggcaacctgaccaccgccggctttgcctgctctcagtgtggccagcccctgttcgtgtacaagctggagcaggtgtctgagaagggcaaggcttacaccaactacttcggacggtgcaatgtggccgagcacgaaaagctgatcctgctggcccagctgaagcccgagaaggatagcgacgaagccgtgacatatagcctgggaaagtttgggcagagggccctggatttctacagcattcatgtgaccaaggagtccacccaccccgtgaagcccctggcccagatcgccggaaacagatacgcctccggacctgtgggaaaggccctgagcgacgcatgtatgggcacaatcgcctccttcctgtctaagtaccaggacatcatcatcgaacaccagaaggtggtgaagggcaaccagaagagactggagagcctgcgggagctggccggcaaggaaaacctggaataccctagcgtgaccctgccacctcagcctcacaccaaggagggcgttgatgcctacaacgaagtgatcgcccgggtgcgaatgtgggtgaacctgaacctgtggcagaagctgaagctaagcagagatgatgccaagcctctgctgagactgaagggattcccttcctttcctctggtcgagagacaggccaacgaagtggactggtgggacatggtgtgtaacgtgaagaagctgatcaacgagaaaaaggaggatggcaaggtgttttggcagaatctggctggctacaagagacaggaagccctgagaccatacctgagcagcgaggaagatcggaagaagggaaagaaattcgctcggtaccagctgggcgacctgctgctgcacctggaaaagaagcacggcgaggactggggaaaggtgtacgacgaggcctgggagcggattgacaagaaagtggaaggcctgagcaagcacatcaagctggaagaggaacggagaagcgaggacgcccagagcaaggccgccctgaccgactggctgcgggctaaggccagcttcgtgatcgagggcctgaaggaggccgacaaggacgagttctgcagatgcgagctgaagctgcagaagtggtacggggacctgcggggaaagcccttcgccatcgaagccgagaacagcatcctggacatcagcggcttcagcaagcagtacaactgtgccttcatctggcagaaggacggcgtgaagaagctgaacctgtacctgatcatcaactacttcaagggcggcaagctgcggttcaagaagatcaaacctgaagccttcgaagccaacagattctacaccgtgatcaacaaaaagagcggcgagatcgtgcccatggaggtgaacttcaacttcgacgaccccaacctgatcatcctgcctctggcctttggcaagagacagggcagagaattcatctggaacgacctgctgtccctggaaaccggcagcctgaagctggccaacggaagagtgatcgagaagacactgtacaacagaagaacccggcaggatgagcctgccctgttcgtggccctgaccttcgagcggcgggaggtcctggactcctccaatatcaaaccaatgaacctgatcggcgtggcaagaggcgaaaacatccccgccgtgatcgccctgaccgaccccgagggctgcccactgagccggtttaaggatagcctgggaaacccaacccacatcctgagaatcggcgagagctataaggagaagcagcggaccatccaggccaagaaggaggtggagcagcggagagccggcggctacagccggaagtacgccagcaaagccaagaatctggcagacgatatggtgagaaacaccgctagagatctgctgtactacgccgtgacccaggatgccatgctgatcttcgccaacctgagccggggcttcggccggcagggcaagcggaccttcatggccgagagacagtacacacggatggaggactggctgaccgccaagctggcctacgagggcctgagcaagacctacctgtccaagacactggcccagtacacctccaagacatgcagcaactgtgggtttaccatcaccagcgccgactacgacagggtgctggagaagctgaagaagacagcaacaggctggatgaccacaattaacggcaaggagctgaaggtggagggccagattacctactacaacagatacaagagacagaacgtagtcaaggacctgtccgtcgagctggatagactgagcgaagaatctgtgaacaacgacatctcctcctggacaaagggcagaagcggagaagctctgagcctcctgaagaaaagattctcccatagacccgtgcaggagaagttcgtgtgcctgaactgcggcttcgagacacacgcagccgagcaagccgccctgaacatcgccagatcctggctgttcctgcggagccaggagtacaagaaataccagacaaacaagacaaccggcaacaccgataagagagccttcgtcgagacctggcagtccttttaccggaagaagcttaaggaggtgtggaaacctgccgtgcggtctggcggatctggcggaggctcccccggccaggaggtggtgaccttcaaggacatggccgtggacttcaccagggaggagtggaggctgctgacccccccccagaaggagctgtacaaggaggtgatgctggagaacgccaggaacctgctgagcgtgggcttcgccgtgcccggcgacgtgatcagctacctggagcagagggaggccccctggctgctggagcaggagggcctgaggagctgcagccccggcgacatcagccccggcggcccaagcagcggcgcccctcctcccagcggcggcagcccagccggctccccaacctctaccgaggagggcacctctgagtccgccacccccgagagcggccctggcacctccaccgagcccagcgagggcagcgcacccggcagccctgccggcagccccacctccacagaggagggaaccagcaccgagcccagcgaaggcagcgccccaggcaccagcaccgagcctagtgagcaggagattaaacggatcaacaagatcagaagaagacttgtgaaagacagcaacaccaagaaggccggcaagacaggccccatgaaaaccctgctggttagagtgatgacacccgatctgagagagcggctggaaaacctgagaaagaagcctgaaaatatcccccagcccatcagcaatacatctagagccaacctgaataagctgctgaccgattacaccgaaatgaagaaggcgatcctgcatgtgtactgggaagagttccagaaggaccctgtgggcctgatgagccgggtggcccagcctgccagcaagaagatcgatcagaacaagctgaaacctgagatggacgagaagggcaacctgaccaccgccggctttgcctgctctcagtgtggccagcccctgttcgtgtacaagctggagcaggtgtctgagaagggcaaggcttacaccaactacttcggacggtgcaatgtggccgagcacgaaaagctgatcctgctggcccagctgaagcccgagaaggatagcgacgaagccgtgacatatagcctgggaaagtttgggcagagggccctggatttctacagcattcatgtgaccaaggagtccacccaccccgtgaagcccctggcccagatcgccggaaacagatacgcctccggacctgtgggaaaggccctgagcgacgcatgtatgggcacaatcgcctccttcctgtctaagtaccaggacatcatcatcgaacaccagaaggtggtgaagggcaaccagaagagactggagagcctgcgggagctggccggcaaggaaaacctggaataccctagcgtgaccctgccacctcagcctcacaccaaggagggcgttgatgcctacaacgaagtgatcgcccgggtgcgaatgtgggtgaacctgaacctgtggcagaagctgaagctaagcagagatgatgccaagcctctgctgagactgaagggattcccttcctttcctctggtcgagagacaggccaacgaagtggactggtgggacatggtgtgtaacgtgaagaagctgatcaacgagaaaaaggaggatggcaaggtgttttggcagaatctggctggctacaagagacaggaagccctgagaccatacctgagcagcgaggaagatcggaagaagggaaagaaattcgctcggtaccagctgggcgacctgctgctgcacctggaaaagaagcacggcgaggactggggaaaggtgtacgacgaggcctgggagcggattgacaagaaagtggaaggcctgagcaagcacatcaagctggaagaggaacggagaagcgaggacgcccagagcaaggccgccctgaccgactggctgcgggctaaggccagcttcgtgatcgagggcctgaaggaggccgacaaggacgagttctgcagatgcgagctgaagctgcagaagtggtacggggacctgcggggaaagcccttcgccatcgaagccgagaacagcatcctggacatcagcggcttcagcaagcagtacaactgtgccttcatctggcagaaggacggcgtgaagaagctgaacctgtacctgatcatcaactacttcaagggcggcaagctgcggttcaagaagatcaaacctgaagccttcgaagccaacagattctacaccgtgatcaacaaaaagagcggcgagatcgtgcccatggaggtgaacttcaacttcgacgaccccaacctgatcatcctgcctctggcctttggcaagagacagggcagagaattcatctggaacgacctgctgtccctggaaaccggcagcctgaagctggccaacggaagagtgatcgagaagacactgtacaacagaagaacccggcaggatgagcctgccctgttcgtggccctgaccttcgagcggcgggaggtcctggactcctccaatatcaaaccaatgaacctgatcggcgtggcaagaggcgaaaacatccccgccgtgatcgccctgaccgaccccgagggctgcccactgagccggtttaaggatagcctgggaaacccaacccacatcctgagaatcggcgagagctataaggagaagcagcggaccatccaggccaagaaggaggtggagcagcggagagccggcggctacagccggaagtacgccagcaaagccaagaatctggcagacgatatggtgagaaacaccgctagagatctgctgtactacgccgtgacccaggatgccatgctgatcttcgccaacctgagccggggcttcggccggcagggcaagcggaccttcatggccgagagacagtacacacggatggaggactggctgaccgccaagctggcctacgagggcctgagcaagacctacctgtccaagacactggcccagtacacctccaagacatgcagcaactgtgggtttaccatcaccagcgccgactacgacagggtgctggagaagctgaagaagacagcaacaggctggatgaccacaattaacggcaaggagctgaaggtggagggccagattacctactacaacagatacaagagacagaacgtagtcaaggacctgtccgtcgagctggatagactgagcgaagaatctgtgaacaacgacatctcctcctggacaaagggcagaagcggagaagctctgagcctcctgaagaaaagattctcccatagacccgtgcaggagaagttcgtgtgcctgaactgcggcttcgagacacacgcagccgagcaagccgccctgaacatcgccagatcctggctgttcctgcggagccaggagtacaagaaataccagacaaacaagacaaccggcaacaccgataagagagccttcgtcgagacctggcagtccttttaccggaagaagcttaaggaggtgtggaaacctgccgtgcggtctggcggatctggcggaggctcctcccggccaggaggtggtgaccttcaaggacatggccgtggacttcaccagggaggagtggaggctgctgacccccccccagaaggagctgtacaaggaggtgatgctggagaacgccaggaacctgctgagcgtgggcttcgccgtgcccggcgacgtgatcagctacctggagcagagggaggccccctggctgctggagcaggagggcctgaggagctgcagccccggcgacatcagccccggatctggctccggcagcggccccaagaaaaagagaaaagtctaagctgccttctgcggggcttgccttctggccatgcccttcttctctcccttgcacctgtacctcttggtctttgaataaagcctgagtaggaaggctagcaaaaaaaaaaaaaaaaaaaaaaaaaaaaaaaaaaaaaaaaaaaaaaaaaaaaaaaaaaaaaaaaaaaaaaaaaaaaaaaa

SEQ ID NO: 16863 - RNA, 9485 nt, synthetic construct
  source 1..9485: mol_type = other RNA
aggaaataagagagaaaagaagagtaagaagaaatataagagccaccatggcccctaagaagaagcgtaaagtgagccggatggaacgcctcgtctacgaggtgcggcagaagtgcagaaacatcgaggacatctgcatctcctgcggatctctgaacgtgaccctggagcacccactgttcatcggcggcatgtgccagaactgtaaaaactgttttctggagtgtgcctatcaatacgacgatgacggctaccagagctactgcaccatctgttgcggcggaagagaggtgctgatgtgtggaaataacaactgctgccggtgcttctgcgtggaatgcgtggacctgctggtgggccccggcgccgcccaggccgctattaaggaagatccttggaactgctacatgtgcggccacaagggcacatacggcctgctgagacggagagaggactggcctagcagactgcagatgttcttcgccaataaccacgaccaggagttcgacccccctaaggtgtaccctcccgtccccgccgagaagagaaagcccatccgggtcctgagcctgttcgatggcatcgccaccggtctgctggtgctgaaggacctgggcatccaggtggataggtacattgcctccgaggtgtgcgaggactccatcaccgtgggaatggtgcgtcatcagggcaagatcatgtacgtgggcgacgtgcggagcgtgacacagaagcatatccaggagtggggccctttcgacctggtgatcggcggcagcccttgcaatgacctgagcatcgtgaacccagcccggaagggcctgtacgagggaaccggcagactgttcttcgagttttacagactgctgcacgacgcccggcctaaggaaggcgacgaccggcccttcttttggctgttcgagaatgtggtggccatgggagtcagcgacaagcgggatattagccggttcctggagagcaaccccgtgatgatcgatgccaaggaagtgagcgccgcccaccgggccagatacttctggggcaatctgcctggcatgaacagacccctggccagcaccgtgaacgacaagctggagctgcaggagtgcctggagcacggccggatcgccaagttcagcaaggtgagaaccatcaccacccgaagcaacagcatcaaacaaggcaaggaccagcactttcctgtgttcatgaacgagaaggaggacatcctgtggtgtaccgagatggagagagtgttcgggttcccagtccactacacagatgtcagcaacatgtctagactggccagacagagactgctgggaagaagctggtccgtccctgtgatcagacacctgttcgcccctctgaaggagtacttcgcctgcgtgagcagcggcaacagcaacgccaacagccggggccccagcttctctagcggcctggtgccactgtccctgagagggagccacatgggccccatggagatctacaaaaccgtgagcgcctggaagcggcagcctgtgcgcgtgctgagcctgtttcggaatatcgataaagtcctgaaaagcctgggattcctggagagcggctctggctccggcggtggcaccctgaagtacgtggaggatgtgacaaacgtggtcagacgggatgtggagaagtggggccccttcgatctggtgtacggcagcacccaacccctgggcagctcttgtgaccggtgccctggctggtacatgtttcagttccaccggatcctgcagtacgccctgccgagacaggagtcccagcggccattcttttggattttcatggacaacttgctgctgaccgaggatgaccaggaaactaccactcggttcctgcagaccgaagccgtgaccctgcaggacgtgagaggccgggactaccagaacgccatgcgggtgtggtccaacatccctggactgaaaagcaagcacgcacctctgacccctaaagaagaggagtacctgcaggcccaggtgcggagcagaagcaagctggacgcccctaaggtggatctgctggtgaagaattgcctcctgcccctgagagagtacttcaagtatttcagccagaatagtctgcccctgggaggcagcggcggcggcgccctggtgacatttgaggacgtcgccgtgcggttcacccaggaggaatgggctctgctggatccttctcagaaaatcctgtaccgggacgtgatgagagagacataccggaatctgacctccgtgggcatcaactgggaatgttgggaccttgaagcctgcttcagaagcctgggaagaaacctgagagtgcaggtggtgaagagaaagtgcgagctgaccaacagcggcccctgcgccgagggcggcccaagcagcggcgcccctcctcccagcggcggcagcccagccggctccccaacctctaccgaggagggcacctctgagtccgccacccccgagagcggccctggcacctccaccgagcccagcgagggcagcgcacccggcagccctgccggcagccccacctccacagaggagggaaccagcaccgagcccagcgaaggcagcgccccaggcaccagcaccgagcctagtgagcaggagattaaacggatcaacaagatcagaagaagacttgtgaaagacagcaacaccaagaaggccggcaagacaggccccatgaaaaccctgctggttagagtgatgacacccgatctgagagagcggctggaaaacctgagaaagaagcctgaaaatatcccccagcccatcagcaatacatctagagccaacctgaataagctgctgaccgattacaccgaaatgaagaaggcgatcctgcatgtgtactgggaagagttccagaaggaccctgtgggcctgatgagccgggtggcccagcctgccagcaagaagatcgatcagaacaagctgaaacctgagatggacgagaagggcaacctgaccaccgccggctttgcctgctctcagtgtggccagcccctgttcgtgtacaagctggagcaggtgtctgagaagggcaaggcttacaccaactacttcggacggtgcaatgtggccgagcacgaaaagctgatcctgctggcccagctgaagcccgagaaggatagcgacgaagccgtgacatatagcctgggaaagtttgggcagagggccctggatttctacagcattcatgtgaccaaggagtccacccaccccgtgaagcccctggcccagatcgccggaaacagatacgcctccggacctgtgggaaaggccctgagcgacgcatgtatgggcacaatcgcctccttcctgtctaagtaccaggacatcatcatcgaacaccagaaggtggtgaagggcaaccagaagagactggagagcctgcgggagctggccggcaaggaaaacctggaataccctagcgtgaccctgccacctcagcctcacaccaaggagggcgttgatgcctacaacgaagtgatcgcccgggtgcgaatgtgggtgaacctgaacctgtggcagaagctgaagctaagcagagatgatgccaagcctctgctgagactgaagggattcccttcctttcctctggtcgagagacaggccaacgaagtggactggtgggacatggtgtgtaacgtgaagaagctgatcaacgagaaaaaggaggatggcaaggtgttttggcagaatctggctggctacaagagacaggaagccctgagaccatacctgagcagcgaggaagatcggaagaagggaaagaaattcgctcggtaccagctgggcgacctgctgctgcacctggaaaagaagcacggcgaggactggggaaaggtgtacgacgaggcctgggagcggattgacaagaaagtggaaggcctgagcaagcacatcaagctggaagaggaacggagaagcgaggacgcccagagcaaggccgccctgaccgactggctgcgggctaaggccagcttcgtgatcgagggcctgaaggaggccgacaaggacgagttctgcagatgcgagctgaagctgcagaagtggtacggggacctgcggggaaagcccttcgccatcgaagccgagaacagcatcctggacatcagcggcttcagcaagcagtacaactgtgccttcatctggcagaaggacggcgtgaagaagctgaacctgtacctgatcatcaactacttcaagggcggcaagctgcggttcaagaagatcaaacctgaagccttcgaagccaacagattctacaccgtgatcaacaaaaagagcggcgagatcgtgcccatggaggtgaacttcaacttcgacgaccccaacctgatcatcctgcctctggcctttggcaagagacagggcagagaattcatctggaacgacctgctgtccctggaaaccggcagcctgaagctggccaacggaagagtgatcgagaagacactgtacaacagaagaacccggcaggatgagcctgccctgttcgtggccctgaccttcgagcggcgggaggtcctggactcctccaatatcaaaccaatgaacctgatcggcgtggcaagaggcgaaaacatccccgccgtgatcgccctgaccgaccccgagggctgcccactgagccggtttaaggatagcctgggaaacccaacccacatcctgagaatcggcgagagctataaggagaagcagcggaccatccaggccaagaaggaggtggagcagcggagagccggcggctacagccggaagtacgccagcaaagccaagaatctggcagacgatatggtgagaaacaccgctagagatctgctgtactacgccgtgacccaggatgccatgctgatcttcgccaacctgagccggggcttcggccggcagggcaagcggaccttcatggccgagagacagtacacacggatggaggactggctgaccgccaagctggcctacgagggcctgagcaagacctacctgtccaagacactggcccagtacacctccaagacatgcagcaactgtgggtttaccatcaccagcgccgactacgacagggtgctggagaagctgaagaagacagcaacaggctggatgaccacaattaacggcaaggagctgaaggtggagggccagattacctactacaacagatacaagagacagaacgtagtcaaggacctgtccgtcgagctggatagactgagcgaagaatctgtgaacaacgacatctcctcctggacaaagggcagaagcggagaagctctgagcctcctgaagaaaagattctcccatagacccgtgcaggagaagttcgtgtgcctgaactgcggcttcgagacacacgcagccgagcaagccgccctgaacatcgccagatcctggctgttcctgcggagccaggagtacaagaaataccagacaaacaagacaaccggcaacaccgataagagagccttcgtcgagacctggcagtccttttaccggaagaagcttaaggaggtgtggaaacctgccgtgcggtctggcggatctggcggaggctccaagcccaggaccgtgagcttcgccgacgtggccgtgtacttcagcagggaggagtggggctgcctgaggcccgcccagagggccctgtacagggacgtgatgagggagacctacggccacctgggcgccctgggcgtgggcggcagcaagcccgccctgatcagctgggtggaggaggaggccgagctgtgggaccccgccgcccaggaccccgaggtgaccaagtgccccaccgagaccgacggcggcccaagcagcggcgcccctcctcccagcggcggcagcccagccggctccccaacctctaccgaggagggcacctctgagtccgccacccccgagagcggccctggcacctccaccgagcccagcgagggcagcgcacccggcagccctgccggcagccccacctccacagaggagggaaccagcaccgagcccagcgaaggcagcgccccaggcaccagcaccgagcctagtgagcaggagattaaacggatcaacaagatcagaagaagacttgtgaaagacagcaacaccaagaaggccggcaagacaggccccatgaaaaccctgctggttagagtgatgacacccgatctgagagagcggctggaaaacctgagaaagaagcctgaaaatatcccccagcccatcagcaatacatctagagccaacctgaataagctgctgaccgattacaccgaaatgaagaaggcgatcctgcatgtgtactgggaagagttccagaaggaccctgtgggcctgatgagccgggtggcccagcctgccagcaagaagatcgatcagaacaagctgaaacctgagatggacgagaagggcaacctgaccaccgccggctttgcctgctctcagtgtggccagcccctgttcgtgtacaagctggagcaggtgtctgagaagggcaaggcttacaccaactacttcggacggtgcaatgtggccgagcacgaaaagctgatcctgctggcccagctgaagcccgagaaggatagcgacgaagccgtgacatatagcctgggaaagtttgggcagagggccctggatttctacagcattcatgtgaccaaggagtccacccaccccgtgaagcccctggcccagatcgccggaaacagatacgcctccggacctgtgggaaaggccctgagcgacgcatgtatgggcacaatcgcctccttcctgtctaagtaccaggacatcatcatcgaacaccagaaggtggtgaagggcaaccagaagagactggagagcctgcgggagctggccggcaaggaaaacctggaataccctagcgtgaccctgccacctcagcctcacaccaaggagggcgttgatgcctacaacgaagtgatcgcccgggtgcgaatgtgggtgaacctgaacctgtggcagaagctgaagctaagcagagatgatgccaagcctctgctgagactgaagggattcccttcctttcctctggtcgagagacaggccaacgaagtggactggtgggacatggtgtgtaacgtgaagaagctgatcaacgagaaaaaggaggatggcaaggtgttttggcagaatctggctggctacaagagacaggaagccctgagaccatacctgagcagcgaggaagatcggaagaagggaaagaaattcgctcggtaccagctgggcgacctgctgctgcacctggaaaagaagcacggcgaggactggggaaaggtgtacgacgaggcctgggagcggattgacaagaaagtggaaggcctgagcaagcacatcaagctggaagaggaacggagaagcgaggacgcccagagcaaggccgccctgaccgactggctgcgggctaaggccagcttcgtgatcgagggcctgaaggaggccgacaaggacgagttctgcagatgcgagctgaagctgcagaagtggtacggggacctgcggggaaagcccttcgccatcgaagccgagaacagcatcctggacatcagcggcttcagcaagcagtacaactgtgccttcatctggcagaaggacggcgtgaagaagctgaacctgtacctgatcatcaactacttcaagggcggcaagctgcggttcaagaagatcaaacctgaagccttcgaagccaacagattctacaccgtgatcaacaaaaagagcggcgagatcgtgcccatggaggtgaacttcaacttcgacgaccccaacctgatcatcctgcctctggcctttggcaagagacagggcagagaattcatctggaacgacctgctgtccctggaaaccggcagcctgaagctggccaacggaagagtgatcgagaagacactgtacaacagaagaacccggcaggatgagcctgccctgttcgtggccctgaccttcgagcggcgggaggtcctggactcctccaatatcaaaccaatgaacctgatcggcgtggcaagaggcgaaaacatccccgccgtgatcgccctgaccgaccccgagggctgcccactgagccggtttaaggatagcctgggaaacccaacccacatcctgagaatcggcgagagctataaggagaagcagcggaccatccaggccaagaaggaggtggagcagcggagagccggcggctacagccggaagtacgccagcaaagccaagaatctggcagacgatatggtgagaaacaccgctagagatctgctgtactacgccgtgacccaggatgccatgctgatcttcgccaacctgagccggggcttcggccggcagggcaagcggaccttcatggccgagagacagtacacacggatggaggactggctgaccgccaagctggcctacgagggcctgagcaagacctacctgtccaagacactggcccagtacacctccaagacatgcagcaactgtgggtttaccatcaccagcgccgactacgacagggtgctggagaagctgaagaagacagcaacaggctggatgaccacaattaacggcaaggagctgaaggtggagggccagattacctactacaacagatacaagagacagaacgtagtcaaggacctgtccgtcgagctggatagactgagcgaagaatctgtgaacaacgacatctcctcctggacaaagggcagaagcggagaagctctgagcctcctgaagaaaagattctcccatagacccgtgcaggagaagttcgtgtgcctgaactgcggcttcgagacacacgcagccgagcaagccgccctgaacatcgccagatcctggctgttcctgcggagccaggagtacaagaaataccagacaaacaagacaaccggcaacaccgataagagagccttcgtcgagacctggcagtccttttaccggaagaagcttaaggaggtgtggaaacctgccgtgcggtctggcggatctggcggaggctcctaagcccaggaccgtgagcttcgccgacgtggccgtgtacttcagcagggaggagtggggctgcctgaggcccgcccagagggccctgtacagggacgtgatgagggagacctacggccacctgggcgccctgggcgtgggcggcagcaagcccgccctgatcagctgggtggaggaggaggccgagctgtgggaccccgccgcccaggaccccgaggtgaccaagtgccccaccgagaccgacggatctggctccggcagcggccccaagaaaaagagaaaagtctaagctgccttctgcggggcttgccttctggccatgcccttcttctctcccttgcacctgtacctcttggtctttgaataaagcctgagtaggaaggctagcaaaaaaaaaaaaaaaaaaaaaaaaaaaaaaaaaaaaaaaaaaaaaaaaaaaaaaaaaaaaaaaaaaaaaaaaaaaaaaaa

SEQ ID NO: 16864 - RNA, 9485 nt, synthetic construct
  source 1..9485: mol_type = other RNA
aggaaataagagagaaaagaagagtaagaagaaatataagagccaccatggcccctaagaagaagcgtaaagtgagccggatggaacgcctcgtctacgaggtgcggcagaagtgcagaaacatcgaggacatctgcatctcctgcggatctctgaacgtgaccctggagcacccactgttcatcggcggcatgtgccagaactgtaaaaactgttttctggagtgtgcctatcaatacgacgatgacggctaccagagctactgcaccatctgttgcggcggaagagaggtgctgatgtgtggaaataacaactgctgccggtgcttctgcgtggaatgcgtggacctgctggtgggccccggcgccgcccaggccgctattaaggaagatccttggaactgctacatgtgcggccacaagggcacatacggcctgctgagacggagagaggactggcctagcagactgcagatgttcttcgccaataaccacgaccaggagttcgacccccctaaggtgtaccctcccgtccccgccgagaagagaaagcccatccgggtcctgagcctgttcgatggcatcgccaccggtctgctggtgctgaaggacctgggcatccaggtggataggtacattgcctccgaggtgtgcgaggactccatcaccgtgggaatggtgcgtcatcagggcaagatcatgtacgtgggcgacgtgcggagcgtgacacagaagcatatccaggagtggggccctttcgacctggtgatcggcggcagcccttgcaatgacctgagcatcgtgaacccagcccggaagggcctgtacgagggaaccggcagactgttcttcgagttttacagactgctgcacgacgcccggcctaaggaaggcgacgaccggcccttcttttggctgttcgagaatgtggtggccatgggagtcagcgacaagcgggatattagccggttcctggagagcaaccccgtgatgatcgatgccaaggaagtgagcgccgcccaccgggccagatacttctggggcaatctgcctggcatgaacagacccctggccagcaccgtgaacgacaagctggagctgcaggagtgcctggagcacggccggatcgccaagttcagcaaggtgagaaccatcaccacccgaagcaacagcatcaaacaaggcaaggaccagcactttcctgtgttcatgaacgagaaggaggacatcctgtggtgtaccgagatggagagagtgttcgggttcccagtccactacacagatgtcagcaacatgtctagactggccagacagagactgctgggaagaagctggtccgtccctgtgatcagacacctgttcgcccctctgaaggagtacttcgcctgcgtgagcagcggcaacagcaacgccaacagccggggccccagcttctctagcggcctggtgccactgtccctgagagggagccacatgggccccatggagatctacaaaaccgtgagcgcctggaagcggcagcctgtgcgcgtgctgagcctgtttcggaatatcgataaagtcctgaaaagcctgggattcctggagagcggctctggctccggcggtggcaccctgaagtacgtggaggatgtgacaaacgtggtcagacgggatgtggagaagtggggccccttcgatctggtgtacggcagcacccaacccctgggcagctcttgtgaccggtgccctggctggtacatgtttcagttccaccggatcctgcagtacgccctgccgagacaggagtcccagcggccattcttttggattttcatggacaacttgctgctgaccgaggatgaccaggaaactaccactcggttcctgcagaccgaagccgtgaccctgcaggacgtgagaggccgggactaccagaacgccatgcgggtgtggtccaacatccctggactgaaaagcaagcacgcacctctgacccctaaagaagaggagtacctgcaggcccaggtgcggagcagaagcaagctggacgcccctaaggtggatctgctggtgaagaattgcctcctgcccctgagagagtacttcaagtatttcagccagaatagtctgcccctgggaggcagcggcggcggcgccctggtgacatttgaggacgtcgccgtgcggttcacccaggaggaatgggctctgctggatccttctcagaaaatcctgtaccgggacgtgatgagagagacataccggaatctgacctccgtgggcatcaactgggaatgttgggaccttgaagcctgcttcagaagcctgggaagaaacctgagagtgcaggtggtgaagagaaagtgcgagctgaccaacagcggcccctgcgccgagggcggcccaagcagcggcgcccctcctcccagcggcggcagcccagccggctccccaacctctaccgaggagggcacctctgagtccgccacccccgagagcggccctggcacctccaccgagcccagcgagggcagcgcacccggcagccctgccggcagccccacctccacagaggagggaaccagcaccgagcccagcgaaggcagcgccccaggcaccagcaccgagcctagtgagcaggagattaaacggatcaacaagatcagaagaagacttgtgaaagacagcaacaccaagaaggccggcaagacaggccccatgaaaaccctgctggttagagtgatgacacccgatctgagagagcggctggaaaacctgagaaagaagcctgaaaatatcccccagcccatcagcaatacatctagagccaacctgaataagctgctgaccgattacaccgaaatgaagaaggcgatcctgcatgtgtactgggaagagttccagaaggaccctgtgggcctgatgagccgggtggcccagcctgccagcaagaagatcgatcagaacaagctgaaacctgagatggacgagaagggcaacctgaccaccgccggctttgcctgctctcagtgtggccagcccctgttcgtgtacaagctggagcaggtgtctgagaagggcaaggcttacaccaactacttcggacggtgcaatgtggccgagcacgaaaagctgatcctgctggcccagctgaagcccgagaaggatagcgacgaagccgtgacatatagcctgggaaagtttgggcagagggccctggatttctacagcattcatgtgaccaaggagtccacccaccccgtgaagcccctggcccagatcgccggaaacagatacgcctccggacctgtgggaaaggccctgagcgacgcatgtatgggcacaatcgcctccttcctgtctaagtaccaggacatcatcatcgaacaccagaaggtggtgaagggcaaccagaagagactggagagcctgcgggagctggccggcaaggaaaacctggaataccctagcgtgaccctgccacctcagcctcacaccaaggagggcgttgatgcctacaacgaagtgatcgcccgggtgcgaatgtgggtgaacctgaacctgtggcagaagctgaagctaagcagagatgatgccaagcctctgctgagactgaagggattcccttcctttcctctggtcgagagacaggccaacgaagtggactggtgggacatggtgtgtaacgtgaagaagctgatcaacgagaaaaaggaggatggcaaggtgttttggcagaatctggctggctacaagagacaggaagccctgagaccatacctgagcagcgaggaagatcggaagaagggaaagaaattcgctcggtaccagctgggcgacctgctgctgcacctggaaaagaagcacggcgaggactggggaaaggtgtacgacgaggcctgggagcggattgacaagaaagtggaaggcctgagcaagcacatcaagctggaagaggaacggagaagcgaggacgcccagagcaaggccgccctgaccgactggctgcgggctaaggccagcttcgtgatcgagggcctgaaggaggccgacaaggacgagttctgcagatgcgagctgaagctgcagaagtggtacggggacctgcggggaaagcccttcgccatcgaagccgagaacagcatcctggacatcagcggcttcagcaagcagtacaactgtgccttcatctggcagaaggacggcgtgaagaagctgaacctgtacctgatcatcaactacttcaagggcggcaagctgcggttcaagaagatcaaacctgaagccttcgaagccaacagattctacaccgtgatcaacaaaaagagcggcgagatcgtgcccatggaggtgaacttcaacttcgacgaccccaacctgatcatcctgcctctggcctttggcaagagacagggcagagaattcatctggaacgacctgctgtccctggaaaccggcagcctgaagctggccaacggaagagtgatcgagaagacactgtacaacagaagaacccggcaggatgagcctgccctgttcgtggccctgaccttcgagcggcgggaggtcctggactcctccaatatcaaaccaatgaacctgatcggcgtggcaagaggcgaaaacatccccgccgtgatcgccctgaccgaccccgagggctgcccactgagccggtttaaggatagcctgggaaacccaacccacatcctgagaatcggcgagagctataaggagaagcagcggaccatccaggccaagaaggaggtggagcagcggagagccggcggctacagccggaagtacgccagcaaagccaagaatctggcagacgatatggtgagaaacaccgctagagatctgctgtactacgccgtgacccaggatgccatgctgatcttcgccaacctgagccggggcttcggccggcagggcaagcggaccttcatggccgagagacagtacacacggatggaggactggctgaccgccaagctggcctacgagggcctgagcaagacctacctgtccaagacactggcccagtacacctccaagacatgcagcaactgtgggtttaccatcaccagcgccgactacgacagggtgctggagaagctgaagaagacagcaacaggctggatgaccacaattaacggcaaggagctgaaggtggagggccagattacctactacaacagatacaagagacagaacgtagtcaaggacctgtccgtcgagctggatagactgagcgaagaatctgtgaacaacgacatctcctcctggacaaagggcagaagcggagaagctctgagcctcctgaagaaaagattctcccatagacccgtgcaggagaagttcgtgtgcctgaactgcggcttcgagacacacgcagccgagcaagccgccctgaacatcgccagatcctggctgttcctgcggagccaggagtacaagaaataccagacaaacaagacaaccggcaacaccgataagagagccttcgtcgagacctggcagtccttttaccggaagaagcttaaggaggtgtggaaacctgccgtgcggtctggcggatctggcggaggctccggccccctgaccttcagggacgtgaccatcgagttcagccacgaggagtggaagtgcctggaccccgcccagaaggccctgtacaaggacgtgatgctggagaactacaggaacctggtgttcctgggcatcacccccaagtgcaccaccaaggagctgccccccatcggcaacaacaacaccggcgagaagttcaggaccgtgaccctggagaggcacgagtgctacgacatcgaggacatcggcggcccaagcagcggcgcccctcctcccagcggcggcagcccagccggctccccaacctctaccgaggagggcacctctgagtccgccacccccgagagcggccctggcacctccaccgagcccagcgagggcagcgcacccggcagccctgccggcagccccacctccacagaggagggaaccagcaccgagcccagcgaaggcagcgccccaggcaccagcaccgagcctagtgagcaggagattaaacggatcaacaagatcagaagaagacttgtgaaagacagcaacaccaagaaggccggcaagacaggccccatgaaaaccctgctggttagagtgatgacacccgatctgagagagcggctggaaaacctgagaaagaagcctgaaaatatcccccagcccatcagcaatacatctagagccaacctgaataagctgctgaccgattacaccgaaatgaagaaggcgatcctgcatgtgtactgggaagagttccagaaggaccctgtgggcctgatgagccgggtggcccagcctgccagcaagaagatcgatcagaacaagctgaaacctgagatggacgagaagggcaacctgaccaccgccggctttgcctgctctcagtgtggccagcccctgttcgtgtacaagctggagcaggtgtctgagaagggcaaggcttacaccaactacttcggacggtgcaatgtggccgagcacgaaaagctgatcctgctggcccagctgaagcccgagaaggatagcgacgaagccgtgacatatagcctgggaaagtttgggcagagggccctggatttctacagcattcatgtgaccaaggagtccacccaccccgtgaagcccctggcccagatcgccggaaacagatacgcctccggacctgtgggaaaggccctgagcgacgcatgtatgggcacaatcgcctccttcctgtctaagtaccaggacatcatcatcgaacaccagaaggtggtgaagggcaaccagaagagactggagagcctgcgggagctggccggcaaggaaaacctggaataccctagcgtgaccctgccacctcagcctcacaccaaggagggcgttgatgcctacaacgaagtgatcgcccgggtgcgaatgtgggtgaacctgaacctgtggcagaagctgaagctaagcagagatgatgccaagcctctgctgagactgaagggattcccttcctttcctctggtcgagagacaggccaacgaagtggactggtgggacatggtgtgtaacgtgaagaagctgatcaacgagaaaaaggaggatggcaaggtgttttggcagaatctggctggctacaagagacaggaagccctgagaccatacctgagcagcgaggaagatcggaagaagggaaagaaattcgctcggtaccagctgggcgacctgctgctgcacctggaaaagaagcacggcgaggactggggaaaggtgtacgacgaggcctgggagcggattgacaagaaagtggaaggcctgagcaagcacatcaagctggaagaggaacggagaagcgaggacgcccagagcaaggccgccctgaccgactggctgcgggctaaggccagcttcgtgatcgagggcctgaaggaggccgacaaggacgagttctgcagatgcgagctgaagctgcagaagtggtacggggacctgcggggaaagcccttcgccatcgaagccgagaacagcatcctggacatcagcggcttcagcaagcagtacaactgtgccttcatctggcagaaggacggcgtgaagaagctgaacctgtacctgatcatcaactacttcaagggcggcaagctgcggttcaagaagatcaaacctgaagccttcgaagccaacagattctacaccgtgatcaacaaaaagagcggcgagatcgtgcccatggaggtgaacttcaacttcgacgaccccaacctgatcatcctgcctctggcctttggcaagagacagggcagagaattcatctggaacgacctgctgtccctggaaaccggcagcctgaagctggccaacggaagagtgatcgagaagacactgtacaacagaagaacccggcaggatgagcctgccctgttcgtggccctgaccttcgagcggcgggaggtcctggactcctccaatatcaaaccaatgaacctgatcggcgtggcaagaggcgaaaacatccccgccgtgatcgccctgaccgaccccgagggctgcccactgagccggtttaaggatagcctgggaaacccaacccacatcctgagaatcggcgagagctataaggagaagcagcggaccatccaggccaagaaggaggtggagcagcggagagccggcggctacagccggaagtacgccagcaaagccaagaatctggcagacgatatggtgagaaacaccgctagagatctgctgtactacgccgtgacccaggatgccatgctgatcttcgccaacctgagccggggcttcggccggcagggcaagcggaccttcatggccgagagacagtacacacggatggaggactggctgaccgccaagctggcctacgagggcctgagcaagacctacctgtccaagacactggcccagtacacctccaagacatgcagcaactgtgggtttaccatcaccagcgccgactacgacagggtgctggagaagctgaagaagacagcaacaggctggatgaccacaattaacggcaaggagctgaaggtggagggccagattacctactacaacagatacaagagacagaacgtagtcaaggacctgtccgtcgagctggatagactgagcgaagaatctgtgaacaacgacatctcctcctggacaaagggcagaagcggagaagctctgagcctcctgaagaaaagattctcccatagacccgtgcaggagaagttcgtgtgcctgaactgcggcttcgagacacacgcagccgagcaagccgccctgaacatcgccagatcctggctgttcctgcggagccaggagtacaagaaataccagacaaacaagacaaccggcaacaccgataagagagccttcgtcgagacctggcagtccttttaccggaagaagcttaaggaggtgtggaaacctgccgtgcggtctggcggatctggcggaggctcctggccccctgaccttcagggacgtgaccatcgagttcagccacgaggagtggaagtgcctggaccccgcccagaaggccctgtacaaggacgtgatgctggagaactacaggaacctggtgttcctgggcatcacccccaagtgcaccaccaaggagctgccccccatcggcaacaacaacaccggcgagaagttcaggaccgtgaccctggagaggcacgagtgctacgacatcgaggacatcggatctggctccggcagcggccccaagaaaaagagaaaagtctaagctgccttctgcggggcttgccttctggccatgcccttcttctctcccttgcacctgtacctcttggtctttgaataaagcctgagtaggaaggctagcaaaaaaaaaaaaaaaaaaaaaaaaaaaaaaaaaaaaaaaaaaaaaaaaaaaaaaaaaaaaaaaaaaaaaaaaaaaaaaaa

SEQ ID NO: 16865 - RNA, 9485 nt, synthetic construct
  source 1..9485: mol_type = other RNA
aggaaataagagagaaaagaagagtaagaagaaatataagagccaccatggcccctaagaagaagcgtaaagtgagccggatggaacgcctcgtctacgaggtgcggcagaagtgcagaaacatcgaggacatctgcatctcctgcggatctctgaacgtgaccctggagcacccactgttcatcggcggcatgtgccagaactgtaaaaactgttttctggagtgtgcctatcaatacgacgatgacggctaccagagctactgcaccatctgttgcggcggaagagaggtgctgatgtgtggaaataacaactgctgccggtgcttctgcgtggaatgcgtggacctgctggtgggccccggcgccgcccaggccgctattaaggaagatccttggaactgctacatgtgcggccacaagggcacatacggcctgctgagacggagagaggactggcctagcagactgcagatgttcttcgccaataaccacgaccaggagttcgacccccctaaggtgtaccctcccgtccccgccgagaagagaaagcccatccgggtcctgagcctgttcgatggcatcgccaccggtctgctggtgctgaaggacctgggcatccaggtggataggtacattgcctccgaggtgtgcgaggactccatcaccgtgggaatggtgcgtcatcagggcaagatcatgtacgtgggcgacgtgcggagcgtgacacagaagcatatccaggagtggggccctttcgacctggtgatcggcggcagcccttgcaatgacctgagcatcgtgaacccagcccggaagggcctgtacgagggaaccggcagactgttcttcgagttttacagactgctgcacgacgcccggcctaaggaaggcgacgaccggcccttcttttggctgttcgagaatgtggtggccatgggagtcagcgacaagcgggatattagccggttcctggagagcaaccccgtgatgatcgatgccaaggaagtgagcgccgcccaccgggccagatacttctggggcaatctgcctggcatgaacagacccctggccagcaccgtgaacgacaagctggagctgcaggagtgcctggagcacggccggatcgccaagttcagcaaggtgagaaccatcaccacccgaagcaacagcatcaaacaaggcaaggaccagcactttcctgtgttcatgaacgagaaggaggacatcctgtggtgtaccgagatggagagagtgttcgggttcccagtccactacacagatgtcagcaacatgtctagactggccagacagagactgctgggaagaagctggtccgtccctgtgatcagacacctgttcgcccctctgaaggagtacttcgcctgcgtgagcagcggcaacagcaacgccaacagccggggccccagcttctctagcggcctggtgccactgtccctgagagggagccacatgggccccatggagatctacaaaaccgtgagcgcctggaagcggcagcctgtgcgcgtgctgagcctgtttcggaatatcgataaagtcctgaaaagcctgggattcctggagagcggctctggctccggcggtggcaccctgaagtacgtggaggatgtgacaaacgtggtcagacgggatgtggagaagtggggccccttcgatctggtgtacggcagcacccaacccctgggcagctcttgtgaccggtgccctggctggtacatgtttcagttccaccggatcctgcagtacgccctgccgagacaggagtcccagcggccattcttttggattttcatggacaacttgctgctgaccgaggatgaccaggaaactaccactcggttcctgcagaccgaagccgtgaccctgcaggacgtgagaggccgggactaccagaacgccatgcgggtgtggtccaacatccctggactgaaaagcaagcacgcacctctgacccctaaagaagaggagtacctgcaggcccaggtgcggagcagaagcaagctggacgcccctaaggtggatctgctggtgaagaattgcctcctgcccctgagagagtacttcaagtatttcagccagaatagtctgcccctgggaggcagcggcggcggcgccctggtgacatttgaggacgtcgccgtgcggttcacccaggaggaatgggctctgctggatccttctcagaaaatcctgtaccgggacgtgatgagagagacataccggaatctgacctccgtgggcatcaactgggaatgttgggaccttgaagcctgcttcagaagcctgggaagaaacctgagagtgcaggtggtgaagagaaagtgcgagctgaccaacagcggcccctgcgccgagggcggcccaagcagcggcgcccctcctcccagcggcggcagcccagccggctccccaacctctaccgaggagggcacctctgagtccgccacccccgagagcggccctggcacctccaccgagcccagcgagggcagcgcacccggcagccctgccggcagccccacctccacagaggagggaaccagcaccgagcccagcgaaggcagcgccccaggcaccagcaccgagcctagtgagcaggagattaaacggatcaacaagatcagaagaagacttgtgaaagacagcaacaccaagaaggccggcaagacaggccccatgaaaaccctgctggttagagtgatgacacccgatctgagagagcggctggaaaacctgagaaagaagcctgaaaatatcccccagcccatcagcaatacatctagagccaacctgaataagctgctgaccgattacaccgaaatgaagaaggcgatcctgcatgtgtactgggaagagttccagaaggaccctgtgggcctgatgagccgggtggcccagcctgccagcaagaagatcgatcagaacaagctgaaacctgagatggacgagaagggcaacctgaccaccgccggctttgcctgctctcagtgtggccagcccctgttcgtgtacaagctggagcaggtgtctgagaagggcaaggcttacaccaactacttcggacggtgcaatgtggccgagcacgaaaagctgatcctgctggcccagctgaagcccgagaaggatagcgacgaagccgtgacatatagcctgggaaagtttgggcagagggccctggatttctacagcattcatgtgaccaaggagtccacccaccccgtgaagcccctggcccagatcgccggaaacagatacgcctccggacctgtgggaaaggccctgagcgacgcatgtatgggcacaatcgcctccttcctgtctaagtaccaggacatcatcatcgaacaccagaaggtggtgaagggcaaccagaagagactggagagcctgcgggagctggccggcaaggaaaacctggaataccctagcgtgaccctgccacctcagcctcacaccaaggagggcgttgatgcctacaacgaagtgatcgcccgggtgcgaatgtgggtgaacctgaacctgtggcagaagctgaagctaagcagagatgatgccaagcctctgctgagactgaagggattcccttcctttcctctggtcgagagacaggccaacgaagtggactggtgggacatggtgtgtaacgtgaagaagctgatcaacgagaaaaaggaggatggcaaggtgttttggcagaatctggctggctacaagagacaggaagccctgagaccatacctgagcagcgaggaagatcggaagaagggaaagaaattcgctcggtaccagctgggcgacctgctgctgcacctggaaaagaagcacggcgaggactggggaaaggtgtacgacgaggcctgggagcggattgacaagaaagtggaaggcctgagcaagcacatcaagctggaagaggaacggagaagcgaggacgcccagagcaaggccgccctgaccgactggctgcgggctaaggccagcttcgtgatcgagggcctgaaggaggccgacaaggacgagttctgcagatgcgagctgaagctgcagaagtggtacggggacctgcggggaaagcccttcgccatcgaagccgagaacagcatcctggacatcagcggcttcagcaagcagtacaactgtgccttcatctggcagaaggacggcgtgaagaagctgaacctgtacctgatcatcaactacttcaagggcggcaagctgcggttcaagaagatcaaacctgaagccttcgaagccaacagattctacaccgtgatcaacaaaaagagcggcgagatcgtgcccatggaggtgaacttcaacttcgacgaccccaacctgatcatcctgcctctggcctttggcaagagacagggcagagaattcatctggaacgacctgctgtccctggaaaccggcagcctgaagctggccaacggaagagtgatcgagaagacactgtacaacagaagaacccggcaggatgagcctgccctgttcgtggccctgaccttcgagcggcgggaggtcctggactcctccaatatcaaaccaatgaacctgatcggcgtggcaagaggcgaaaacatccccgccgtgatcgccctgaccgaccccgagggctgcccactgagccggtttaaggatagcctgggaaacccaacccacatcctgagaatcggcgagagctataaggagaagcagcggaccatccaggccaagaaggaggtggagcagcggagagccggcggctacagccggaagtacgccagcaaagccaagaatctggcagacgatatggtgagaaacaccgctagagatctgctgtactacgccgtgacccaggatgccatgctgatcttcgccaacctgagccggggcttcggccggcagggcaagcggaccttcatggccgagagacagtacacacggatggaggactggctgaccgccaagctggcctacgagggcctgagcaagacctacctgtccaagacactggcccagtacacctccaagacatgcagcaactgtgggtttaccatcaccagcgccgactacgacagggtgctggagaagctgaagaagacagcaacaggctggatgaccacaattaacggcaaggagctgaaggtggagggccagattacctactacaacagatacaagagacagaacgtagtcaaggacctgtccgtcgagctggatagactgagcgaagaatctgtgaacaacgacatctcctcctggacaaagggcagaagcggagaagctctgagcctcctgaagaaaagattctcccatagacccgtgcaggagaagttcgtgtgcctgaactgcggcttcgagacacacgcagccgagcaagccgccctgaacatcgccagatcctggctgttcctgcggagccaggagtacaagaaataccagacaaacaagacaaccggcaacaccgataagagagccttcgtcgagacctggcagtccttttaccggaagaagcttaaggaggtgtggaaacctgccgtgcggtctggcggatctggcggaggctccttccaggagagcgtgaccttcgaggacgtggccgtgtacttcagcgagaacgagtggatcggcctggcccccgcccagagggtgctgtacagggacgtgatgctggagaactacggcgtggtggccagcctggccttccccttccccaagcccgccctgatcagccagctggagaggggcgaggccccctggtgcaaggccccccagggcgccgtggacggcgagtgccccaggggcgtgagcggcggcccaagcagcggcgcccctcctcccagcggcggcagcccagccggctccccaacctctaccgaggagggcacctctgagtccgccacccccgagagcggccctggcacctccaccgagcccagcgagggcagcgcacccggcagccctgccggcagccccacctccacagaggagggaaccagcaccgagcccagcgaaggcagcgccccaggcaccagcaccgagcctagtgagcaggagattaaacggatcaacaagatcagaagaagacttgtgaaagacagcaacaccaagaaggccggcaagacaggccccatgaaaaccctgctggttagagtgatgacacccgatctgagagagcggctggaaaacctgagaaagaagcctgaaaatatcccccagcccatcagcaatacatctagagccaacctgaataagctgctgaccgattacaccgaaatgaagaaggcgatcctgcatgtgtactgggaagagttccagaaggaccctgtgggcctgatgagccgggtggcccagcctgccagcaagaagatcgatcagaacaagctgaaacctgagatggacgagaagggcaacctgaccaccgccggctttgcctgctctcagtgtggccagcccctgttcgtgtacaagctggagcaggtgtctgagaagggcaaggcttacaccaactacttcggacggtgcaatgtggccgagcacgaaaagctgatcctgctggcccagctgaagcccgagaaggatagcgacgaagccgtgacatatagcctgggaaagtttgggcagagggccctggatttctacagcattcatgtgaccaaggagtccacccaccccgtgaagcccctggcccagatcgccggaaacagatacgcctccggacctgtgggaaaggccctgagcgacgcatgtatgggcacaatcgcctccttcctgtctaagtaccaggacatcatcatcgaacaccagaaggtggtgaagggcaaccagaagagactggagagcctgcgggagctggccggcaaggaaaacctggaataccctagcgtgaccctgccacctcagcctcacaccaaggagggcgttgatgcctacaacgaagtgatcgcccgggtgcgaatgtgggtgaacctgaacctgtggcagaagctgaagctaagcagagatgatgccaagcctctgctgagactgaagggattcccttcctttcctctggtcgagagacaggccaacgaagtggactggtgggacatggtgtgtaacgtgaagaagctgatcaacgagaaaaaggaggatggcaaggtgttttggcagaatctggctggctacaagagacaggaagccctgagaccatacctgagcagcgaggaagatcggaagaagggaaagaaattcgctcggtaccagctgggcgacctgctgctgcacctggaaaagaagcacggcgaggactggggaaaggtgtacgacgaggcctgggagcggattgacaagaaagtggaaggcctgagcaagcacatcaagctggaagaggaacggagaagcgaggacgcccagagcaaggccgccctgaccgactggctgcgggctaaggccagcttcgtgatcgagggcctgaaggaggccgacaaggacgagttctgcagatgcgagctgaagctgcagaagtggtacggggacctgcggggaaagcccttcgccatcgaagccgagaacagcatcctggacatcagcggcttcagcaagcagtacaactgtgccttcatctggcagaaggacggcgtgaagaagctgaacctgtacctgatcatcaactacttcaagggcggcaagctgcggttcaagaagatcaaacctgaagccttcgaagccaacagattctacaccgtgatcaacaaaaagagcggcgagatcgtgcccatggaggtgaacttcaacttcgacgaccccaacctgatcatcctgcctctggcctttggcaagagacagggcagagaattcatctggaacgacctgctgtccctggaaaccggcagcctgaagctggccaacggaagagtgatcgagaagacactgtacaacagaagaacccggcaggatgagcctgccctgttcgtggccctgaccttcgagcggcgggaggtcctggactcctccaatatcaaaccaatgaacctgatcggcgtggcaagaggcgaaaacatccccgccgtgatcgccctgaccgaccccgagggctgcccactgagccggtttaaggatagcctgggaaacccaacccacatcctgagaatcggcgagagctataaggagaagcagcggaccatccaggccaagaaggaggtggagcagcggagagccggcggctacagccggaagtacgccagcaaagccaagaatctggcagacgatatggtgagaaacaccgctagagatctgctgtactacgccgtgacccaggatgccatgctgatcttcgccaacctgagccggggcttcggccggcagggcaagcggaccttcatggccgagagacagtacacacggatggaggactggctgaccgccaagctggcctacgagggcctgagcaagacctacctgtccaagacactggcccagtacacctccaagacatgcagcaactgtgggtttaccatcaccagcgccgactacgacagggtgctggagaagctgaagaagacagcaacaggctggatgaccacaattaacggcaaggagctgaaggtggagggccagattacctactacaacagatacaagagacagaacgtagtcaaggacctgtccgtcgagctggatagactgagcgaagaatctgtgaacaacgacatctcctcctggacaaagggcagaagcggagaagctctgagcctcctgaagaaaagattctcccatagacccgtgcaggagaagttcgtgtgcctgaactgcggcttcgagacacacgcagccgagcaagccgccctgaacatcgccagatcctggctgttcctgcggagccaggagtacaagaaataccagacaaacaagacaaccggcaacaccgataagagagccttcgtcgagacctggcagtccttttaccggaagaagcttaaggaggtgtggaaacctgccgtgcggtctggcggatctggcggaggctcctttccaggagagcgtgaccttcgaggacgtggccgtgtacttcagcgagaacgagtggatcggcctggcccccgcccagagggtgctgtacagggacgtgatgctggagaactacggcgtggtggccagcctggccttccccttccccaagcccgccctgatcagccagctggagaggggcgaggccccctggtgcaaggccccccagggcgccgtggacggcgagtgccccaggggcgtgagcggatctggctccggcagcggccccaagaaaaagagaaaagtctaagctgccttctgcggggcttgccttctggccatgcccttcttctctcccttgcacctgtacctcttggtctttgaataaagcctgagtaggaaggctagcaaaaaaaaaaaaaaaaaaaaaaaaaaaaaaaaaaaaaaaaaaaaaaaaaaaaaaaaaaaaaaaaaaaaaaaaaaaaaaaa

SEQ ID NO: 16866 - RNA, 9485 nt, synthetic construct
  source 1..9485: mol_type = other RNA
aggaaataagagagaaaagaagagtaagaagaaatataagagccaccatggcccctaagaagaagcgtaaagtgagccggatggaacgcctcgtctacgaggtgcggcagaagtgcagaaacatcgaggacatctgcatctcctgcggatctctgaacgtgaccctggagcacccactgttcatcggcggcatgtgccagaactgtaaaaactgttttctggagtgtgcctatcaatacgacgatgacggctaccagagctactgcaccatctgttgcggcggaagagaggtgctgatgtgtggaaataacaactgctgccggtgcttctgcgtggaatgcgtggacctgctggtgggccccggcgccgcccaggccgctattaaggaagatccttggaactgctacatgtgcggccacaagggcacatacggcctgctgagacggagagaggactggcctagcagactgcagatgttcttcgccaataaccacgaccaggagttcgacccccctaaggtgtaccctcccgtccccgccgagaagagaaagcccatccgggtcctgagcctgttcgatggcatcgccaccggtctgctggtgctgaaggacctgggcatccaggtggataggtacattgcctccgaggtgtgcgaggactccatcaccgtgggaatggtgcgtcatcagggcaagatcatgtacgtgggcgacgtgcggagcgtgacacagaagcatatccaggagtggggccctttcgacctggtgatcggcggcagcccttgcaatgacctgagcatcgtgaacccagcccggaagggcctgtacgagggaaccggcagactgttcttcgagttttacagactgctgcacgacgcccggcctaaggaaggcgacgaccggcccttcttttggctgttcgagaatgtggtggccatgggagtcagcgacaagcgggatattagccggttcctggagagcaaccccgtgatgatcgatgccaaggaagtgagcgccgcccaccgggccagatacttctggggcaatctgcctggcatgaacagacccctggccagcaccgtgaacgacaagctggagctgcaggagtgcctggagcacggccggatcgccaagttcagcaaggtgagaaccatcaccacccgaagcaacagcatcaaacaaggcaaggaccagcactttcctgtgttcatgaacgagaaggaggacatcctgtggtgtaccgagatggagagagtgttcgggttcccagtccactacacagatgtcagcaacatgtctagactggccagacagagactgctgggaagaagctggtccgtccctgtgatcagacacctgttcgcccctctgaaggagtacttcgcctgcgtgagcagcggcaacagcaacgccaacagccggggccccagcttctctagcggcctggtgccactgtccctgagagggagccacatgggccccatggagatctacaaaaccgtgagcgcctggaagcggcagcctgtgcgcgtgctgagcctgtttcggaatatcgataaagtcctgaaaagcctgggattcctggagagcggctctggctccggcggtggcaccctgaagtacgtggaggatgtgacaaacgtggtcagacgggatgtggagaagtggggccccttcgatctggtgtacggcagcacccaacccctgggcagctcttgtgaccggtgccctggctggtacatgtttcagttccaccggatcctgcagtacgccctgccgagacaggagtcccagcggccattcttttggattttcatggacaacttgctgctgaccgaggatgaccaggaaactaccactcggttcctgcagaccgaagccgtgaccctgcaggacgtgagaggccgggactaccagaacgccatgcgggtgtggtccaacatccctggactgaaaagcaagcacgcacctctgacccctaaagaagaggagtacctgcaggcccaggtgcggagcagaagcaagctggacgcccctaaggtggatctgctggtgaagaattgcctcctgcccctgagagagtacttcaagtatttcagccagaatagtctgcccctgggaggcagcggcggcggcgccctggtgacatttgaggacgtcgccgtgcggttcacccaggaggaatgggctctgctggatccttctcagaaaatcctgtaccgggacgtgatgagagagacataccggaatctgacctccgtgggcatcaactgggaatgttgggaccttgaagcctgcttcagaagcctgggaagaaacctgagagtgcaggtggtgaagagaaagtgcgagctgaccaacagcggcccctgcgccgagggcggcccaagcagcggcgcccctcctcccagcggcggcagcccagccggctccccaacctctaccgaggagggcacctctgagtccgccacccccgagagcggccctggcacctccaccgagcccagcgagggcagcgcacccggcagccctgccggcagccccacctccacagaggagggaaccagcaccgagcccagcgaaggcagcgccccaggcaccagcaccgagcctagtgagcaggagattaaacggatcaacaagatcagaagaagacttgtgaaagacagcaacaccaagaaggccggcaagacaggccccatgaaaaccctgctggttagagtgatgacacccgatctgagagagcggctggaaaacctgagaaagaagcctgaaaatatcccccagcccatcagcaatacatctagagccaacctgaataagctgctgaccgattacaccgaaatgaagaaggcgatcctgcatgtgtactgggaagagttccagaaggaccctgtgggcctgatgagccgggtggcccagcctgccagcaagaagatcgatcagaacaagctgaaacctgagatggacgagaagggcaacctgaccaccgccggctttgcctgctctcagtgtggccagcccctgttcgtgtacaagctggagcaggtgtctgagaagggcaaggcttacaccaactacttcggacggtgcaatgtggccgagcacgaaaagctgatcctgctggcccagctgaagcccgagaaggatagcgacgaagccgtgacatatagcctgggaaagtttgggcagagggccctggatttctacagcattcatgtgaccaaggagtccacccaccccgtgaagcccctggcccagatcgccggaaacagatacgcctccggacctgtgggaaaggccctgagcgacgcatgtatgggcacaatcgcctccttcctgtctaagtaccaggacatcatcatcgaacaccagaaggtggtgaagggcaaccagaagagactggagagcctgcgggagctggccggcaaggaaaacctggaataccctagcgtgaccctgccacctcagcctcacaccaaggagggcgttgatgcctacaacgaagtgatcgcccgggtgcgaatgtgggtgaacctgaacctgtggcagaagctgaagctaagcagagatgatgccaagcctctgctgagactgaagggattcccttcctttcctctggtcgagagacaggccaacgaagtggactggtgggacatggtgtgtaacgtgaagaagctgatcaacgagaaaaaggaggatggcaaggtgttttggcagaatctggctggctacaagagacaggaagccctgagaccatacctgagcagcgaggaagatcggaagaagggaaagaaattcgctcggtaccagctgggcgacctgctgctgcacctggaaaagaagcacggcgaggactggggaaaggtgtacgacgaggcctgggagcggattgacaagaaagtggaaggcctgagcaagcacatcaagctggaagaggaacggagaagcgaggacgcccagagcaaggccgccctgaccgactggctgcgggctaaggccagcttcgtgatcgagggcctgaaggaggccgacaaggacgagttctgcagatgcgagctgaagctgcagaagtggtacggggacctgcggggaaagcccttcgccatcgaagccgagaacagcatcctggacatcagcggcttcagcaagcagtacaactgtgccttcatctggcagaaggacggcgtgaagaagctgaacctgtacctgatcatcaactacttcaagggcggcaagctgcggttcaagaagatcaaacctgaagccttcgaagccaacagattctacaccgtgatcaacaaaaagagcggcgagatcgtgcccatggaggtgaacttcaacttcgacgaccccaacctgatcatcctgcctctggcctttggcaagagacagggcagagaattcatctggaacgacctgctgtccctggaaaccggcagcctgaagctggccaacggaagagtgatcgagaagacactgtacaacagaagaacccggcaggatgagcctgccctgttcgtggccctgaccttcgagcggcgggaggtcctggactcctccaatatcaaaccaatgaacctgatcggcgtggcaagaggcgaaaacatccccgccgtgatcgccctgaccgaccccgagggctgcccactgagccggtttaaggatagcctgggaaacccaacccacatcctgagaatcggcgagagctataaggagaagcagcggaccatccaggccaagaaggaggtggagcagcggagagccggcggctacagccggaagtacgccagcaaagccaagaatctggcagacgatatggtgagaaacaccgctagagatctgctgtactacgccgtgacccaggatgccatgctgatcttcgccaacctgagccggggcttcggccggcagggcaagcggaccttcatggccgagagacagtacacacggatggaggactggctgaccgccaagctggcctacgagggcctgagcaagacctacctgtccaagacactggcccagtacacctccaagacatgcagcaactgtgggtttaccatcaccagcgccgactacgacagggtgctggagaagctgaagaagacagcaacaggctggatgaccacaattaacggcaaggagctgaaggtggagggccagattacctactacaacagatacaagagacagaacgtagtcaaggacctgtccgtcgagctggatagactgagcgaagaatctgtgaacaacgacatctcctcctggacaaagggcagaagcggagaagctctgagcctcctgaagaaaagattctcccatagacccgtgcaggagaagttcgtgtgcctgaactgcggcttcgagacacacgcagccgagcaagccgccctgaacatcgccagatcctggctgttcctgcggagccaggagtacaagaaataccagacaaacaagacaaccggcaacaccgataagagagccttcgtcgagacctggcagtccttttaccggaagaagcttaaggaggtgtggaaacctgccgtgcggtctggcggatctggcggaggctccaggcccagggccgtgaagttcgccgacgtggccgtgtacttcagccccgaggagtggggctgcctgaggcccgcccagagggccctgtacagggacgtgatgagggagacctacggccacctgggcgccctgggctgcgccggccccaagcccgccctgatcagctggctggagaggaacaccgacgagtgggagcccgccgccctggaccccagggagtgccccaggggcgtgaccgtgcagggcggcccaagcagcggcgcccctcctcccagcggcggcagcccagccggctccccaacctctaccgaggagggcacctctgagtccgccacccccgagagcggccctggcacctccaccgagcccagcgagggcagcgcacccggcagccctgccggcagccccacctccacagaggagggaaccagcaccgagcccagcgaaggcagcgccccaggcaccagcaccgagcctagtgagcaggagattaaacggatcaacaagatcagaagaagacttgtgaaagacagcaacaccaagaaggccggcaagacaggccccatgaaaaccctgctggttagagtgatgacacccgatctgagagagcggctggaaaacctgagaaagaagcctgaaaatatcccccagcccatcagcaatacatctagagccaacctgaataagctgctgaccgattacaccgaaatgaagaaggcgatcctgcatgtgtactgggaagagttccagaaggaccctgtgggcctgatgagccgggtggcccagcctgccagcaagaagatcgatcagaacaagctgaaacctgagatggacgagaagggcaacctgaccaccgccggctttgcctgctctcagtgtggccagcccctgttcgtgtacaagctggagcaggtgtctgagaagggcaaggcttacaccaactacttcggacggtgcaatgtggccgagcacgaaaagctgatcctgctggcccagctgaagcccgagaaggatagcgacgaagccgtgacatatagcctgggaaagtttgggcagagggccctggatttctacagcattcatgtgaccaaggagtccacccaccccgtgaagcccctggcccagatcgccggaaacagatacgcctccggacctgtgggaaaggccctgagcgacgcatgtatgggcacaatcgcctccttcctgtctaagtaccaggacatcatcatcgaacaccagaaggtggtgaagggcaaccagaagagactggagagcctgcgggagctggccggcaaggaaaacctggaataccctagcgtgaccctgccacctcagcctcacaccaaggagggcgttgatgcctacaacgaagtgatcgcccgggtgcgaatgtgggtgaacctgaacctgtggcagaagctgaagctaagcagagatgatgccaagcctctgctgagactgaagggattcccttcctttcctctggtcgagagacaggccaacgaagtggactggtgggacatggtgtgtaacgtgaagaagctgatcaacgagaaaaaggaggatggcaaggtgttttggcagaatctggctggctacaagagacaggaagccctgagaccatacctgagcagcgaggaagatcggaagaagggaaagaaattcgctcggtaccagctgggcgacctgctgctgcacctggaaaagaagcacggcgaggactggggaaaggtgtacgacgaggcctgggagcggattgacaagaaagtggaaggcctgagcaagcacatcaagctggaagaggaacggagaagcgaggacgcccagagcaaggccgccctgaccgactggctgcgggctaaggccagcttcgtgatcgagggcctgaaggaggccgacaaggacgagttctgcagatgcgagctgaagctgcagaagtggtacggggacctgcggggaaagcccttcgccatcgaagccgagaacagcatcctggacatcagcggcttcagcaagcagtacaactgtgccttcatctggcagaaggacggcgtgaagaagctgaacctgtacctgatcatcaactacttcaagggcggcaagctgcggttcaagaagatcaaacctgaagccttcgaagccaacagattctacaccgtgatcaacaaaaagagcggcgagatcgtgcccatggaggtgaacttcaacttcgacgaccccaacctgatcatcctgcctctggcctttggcaagagacagggcagagaattcatctggaacgacctgctgtccctggaaaccggcagcctgaagctggccaacggaagagtgatcgagaagacactgtacaacagaagaacccggcaggatgagcctgccctgttcgtggccctgaccttcgagcggcgggaggtcctggactcctccaatatcaaaccaatgaacctgatcggcgtggcaagaggcgaaaacatccccgccgtgatcgccctgaccgaccccgagggctgcccactgagccggtttaaggatagcctgggaaacccaacccacatcctgagaatcggcgagagctataaggagaagcagcggaccatccaggccaagaaggaggtggagcagcggagagccggcggctacagccggaagtacgccagcaaagccaagaatctggcagacgatatggtgagaaacaccgctagagatctgctgtactacgccgtgacccaggatgccatgctgatcttcgccaacctgagccggggcttcggccggcagggcaagcggaccttcatggccgagagacagtacacacggatggaggactggctgaccgccaagctggcctacgagggcctgagcaagacctacctgtccaagacactggcccagtacacctccaagacatgcagcaactgtgggtttaccatcaccagcgccgactacgacagggtgctggagaagctgaagaagacagcaacaggctggatgaccacaattaacggcaaggagctgaaggtggagggccagattacctactacaacagatacaagagacagaacgtagtcaaggacctgtccgtcgagctggatagactgagcgaagaatctgtgaacaacgacatctcctcctggacaaagggcagaagcggagaagctctgagcctcctgaagaaaagattctcccatagacccgtgcaggagaagttcgtgtgcctgaactgcggcttcgagacacacgcagccgagcaagccgccctgaacatcgccagatcctggctgttcctgcggagccaggagtacaagaaataccagacaaacaagacaaccggcaacaccgataagagagccttcgtcgagacctggcagtccttttaccggaagaagcttaaggaggtgtggaaacctgccgtgcggtctggcggatctggcggaggctcctaggcccagggccgtgaagttcgccgacgtggccgtgtacttcagccccgaggagtggggctgcctgaggcccgcccagagggccctgtacagggacgtgatgagggagacctacggccacctgggcgccctgggctgcgccggccccaagcccgccctgatcagctggctggagaggaacaccgacgagtgggagcccgccgccctggaccccagggagtgccccaggggcgtgaccgtgcagggatctggctccggcagcggccccaagaaaaagagaaaagtctaagctgccttctgcggggcttgccttctggccatgcccttcttctctcccttgcacctgtacctcttggtctttgaataaagcctgagtaggaaggctagcaaaaaaaaaaaaaaaaaaaaaaaaaaaaaaaaaaaaaaaaaaaaaaaaaaaaaaaaaaaaaaaaaaaaaaaaaaaaaaaa

SEQ ID NO: 16867 - RNA, 9485 nt, synthetic construct
  source 1..9485: mol_type = other RNA
aggaaataagagagaaaagaagagtaagaagaaatataagagccaccatggcccctaagaagaagcgtaaagtgagccggatggaacgcctcgtctacgaggtgcggcagaagtgcagaaacatcgaggacatctgcatctcctgcggatctctgaacgtgaccctggagcacccactgttcatcggcggcatgtgccagaactgtaaaaactgttttctggagtgtgcctatcaatacgacgatgacggctaccagagctactgcaccatctgttgcggcggaagagaggtgctgatgtgtggaaataacaactgctgccggtgcttctgcgtggaatgcgtggacctgctggtgggccccggcgccgcccaggccgctattaaggaagatccttggaactgctacatgtgcggccacaagggcacatacggcctgctgagacggagagaggactggcctagcagactgcagatgttcttcgccaataaccacgaccaggagttcgacccccctaaggtgtaccctcccgtccccgccgagaagagaaagcccatccgggtcctgagcctgttcgatggcatcgccaccggtctgctggtgctgaaggacctgggcatccaggtggataggtacattgcctccgaggtgtgcgaggactccatcaccgtgggaatggtgcgtcatcagggcaagatcatgtacgtgggcgacgtgcggagcgtgacacagaagcatatccaggagtggggccctttcgacctggtgatcggcggcagcccttgcaatgacctgagcatcgtgaacccagcccggaagggcctgtacgagggaaccggcagactgttcttcgagttttacagactgctgcacgacgcccggcctaaggaaggcgacgaccggcccttcttttggctgttcgagaatgtggtggccatgggagtcagcgacaagcgggatattagccggttcctggagagcaaccccgtgatgatcgatgccaaggaagtgagcgccgcccaccgggccagatacttctggggcaatctgcctggcatgaacagacccctggccagcaccgtgaacgacaagctggagctgcaggagtgcctggagcacggccggatcgccaagttcagcaaggtgagaaccatcaccacccgaagcaacagcatcaaacaaggcaaggaccagcactttcctgtgttcatgaacgagaaggaggacatcctgtggtgtaccgagatggagagagtgttcgggttcccagtccactacacagatgtcagcaacatgtctagactggccagacagagactgctgggaagaagctggtccgtccctgtgatcagacacctgttcgcccctctgaaggagtacttcgcctgcgtgagcagcggcaacagcaacgccaacagccggggccccagcttctctagcggcctggtgccactgtccctgagagggagccacatgggccccatggagatctacaaaaccgtgagcgcctggaagcggcagcctgtgcgcgtgctgagcctgtttcggaatatcgataaagtcctgaaaagcctgggattcctggagagcggctctggctccggcggtggcaccctgaagtacgtggaggatgtgacaaacgtggtcagacgggatgtggagaagtggggccccttcgatctggtgtacggcagcacccaacccctgggcagctcttgtgaccggtgccctggctggtacatgtttcagttccaccggatcctgcagtacgccctgccgagacaggagtcccagcggccattcttttggattttcatggacaacttgctgctgaccgaggatgaccaggaaactaccactcggttcctgcagaccgaagccgtgaccctgcaggacgtgagaggccgggactaccagaacgccatgcgggtgtggtccaacatccctggactgaaaagcaagcacgcacctctgacccctaaagaagaggagtacctgcaggcccaggtgcggagcagaagcaagctggacgcccctaaggtggatctgctggtgaagaattgcctcctgcccctgagagagtacttcaagtatttcagccagaatagtctgcccctgggaggcagcggcggcggcgccctggtgacatttgaggacgtcgccgtgcggttcacccaggaggaatgggctctgctggatccttctcagaaaatcctgtaccgggacgtgatgagagagacataccggaatctgacctccgtgggcatcaactgggaatgttgggaccttgaagcctgcttcagaagcctgggaagaaacctgagagtgcaggtggtgaagagaaagtgcgagctgaccaacagcggcccctgcgccgagggcggcccaagcagcggcgcccctcctcccagcggcggcagcccagccggctccccaacctctaccgaggagggcacctctgagtccgccacccccgagagcggccctggcacctccaccgagcccagcgagggcagcgcacccggcagccctgccggcagccccacctccacagaggagggaaccagcaccgagcccagcgaaggcagcgccccaggcaccagcaccgagcctagtgagcaggagattaaacggatcaacaagatcagaagaagacttgtgaaagacagcaacaccaagaaggccggcaagacaggccccatgaaaaccctgctggttagagtgatgacacccgatctgagagagcggctggaaaacctgagaaagaagcctgaaaatatcccccagcccatcagcaatacatctagagccaacctgaataagctgctgaccgattacaccgaaatgaagaaggcgatcctgcatgtgtactgggaagagttccagaaggaccctgtgggcctgatgagccgggtggcccagcctgccagcaagaagatcgatcagaacaagctgaaacctgagatggacgagaagggcaacctgaccaccgccggctttgcctgctctcagtgtggccagcccctgttcgtgtacaagctggagcaggtgtctgagaagggcaaggcttacaccaactacttcggacggtgcaatgtggccgagcacgaaaagctgatcctgctggcccagctgaagcccgagaaggatagcgacgaagccgtgacatatagcctgggaaagtttgggcagagggccctggatttctacagcattcatgtgaccaaggagtccacccaccccgtgaagcccctggcccagatcgccggaaacagatacgcctccggacctgtgggaaaggccctgagcgacgcatgtatgggcacaatcgcctccttcctgtctaagtaccaggacatcatcatcgaacaccagaaggtggtgaagggcaaccagaagagactggagagcctgcgggagctggccggcaaggaaaacctggaataccctagcgtgaccctgccacctcagcctcacaccaaggagggcgttgatgcctacaacgaagtgatcgcccgggtgcgaatgtgggtgaacctgaacctgtggcagaagctgaagctaagcagagatgatgccaagcctctgctgagactgaagggattcccttcctttcctctggtcgagagacaggccaacgaagtggactggtgggacatggtgtgtaacgtgaagaagctgatcaacgagaaaaaggaggatggcaaggtgttttggcagaatctggctggctacaagagacaggaagccctgagaccatacctgagcagcgaggaagatcggaagaagggaaagaaattcgctcggtaccagctgggcgacctgctgctgcacctggaaaagaagcacggcgaggactggggaaaggtgtacgacgaggcctgggagcggattgacaagaaagtggaaggcctgagcaagcacatcaagctggaagaggaacggagaagcgaggacgcccagagcaaggccgccctgaccgactggctgcgggctaaggccagcttcgtgatcgagggcctgaaggaggccgacaaggacgagttctgcagatgcgagctgaagctgcagaagtggtacggggacctgcggggaaagcccttcgccatcgaagccgagaacagcatcctggacatcagcggcttcagcaagcagtacaactgtgccttcatctggcagaaggacggcgtgaagaagctgaacctgtacctgatcatcaactacttcaagggcggcaagctgcggttcaagaagatcaaacctgaagccttcgaagccaacagattctacaccgtgatcaacaaaaagagcggcgagatcgtgcccatggaggtgaacttcaacttcgacgaccccaacctgatcatcctgcctctggcctttggcaagagacagggcagagaattcatctggaacgacctgctgtccctggaaaccggcagcctgaagctggccaacggaagagtgatcgagaagacactgtacaacagaagaacccggcaggatgagcctgccctgttcgtggccctgaccttcgagcggcgggaggtcctggactcctccaatatcaaaccaatgaacctgatcggcgtggcaagaggcgaaaacatccccgccgtgatcgccctgaccgaccccgagggctgcccactgagccggtttaaggatagcctgggaaacccaacccacatcctgagaatcggcgagagctataaggagaagcagcggaccatccaggccaagaaggaggtggagcagcggagagccggcggctacagccggaagtacgccagcaaagccaagaatctggcagacgatatggtgagaaacaccgctagagatctgctgtactacgccgtgacccaggatgccatgctgatcttcgccaacctgagccggggcttcggccggcagggcaagcggaccttcatggccgagagacagtacacacggatggaggactggctgaccgccaagctggcctacgagggcctgagcaagacctacctgtccaagacactggcccagtacacctccaagacatgcagcaactgtgggtttaccatcaccagcgccgactacgacagggtgctggagaagctgaagaagacagcaacaggctggatgaccacaattaacggcaaggagctgaaggtggagggccagattacctactacaacagatacaagagacagaacgtagtcaaggacctgtccgtcgagctggatagactgagcgaagaatctgtgaacaacgacatctcctcctggacaaagggcagaagcggagaagctctgagcctcctgaagaaaagattctcccatagacccgtgcaggagaagttcgtgtgcctgaactgcggcttcgagacacacgcagccgagcaagccgccctgaacatcgccagatcctggctgttcctgcggagccaggagtacaagaaataccagacaaacaagacaaccggcaacaccgataagagagccttcgtcgagacctggcagtccttttaccggaagaagcttaaggaggtgtggaaacctgccgtgcggtctggcggatctggcggaggctccctgcaggagcccgtgaccttcgccgacgtggccgtgctgttcacccccgaggagtggatgttcctggacagcgcccagaggagcctgtacagggacgtgatgctggagaactacaggaacctggccagcgtgggcgaccagctgggcaagcccagcatgctgagcctgagcgagcccggcgaggagctgtgggcccccgagaggaggaccttccccggcaccaggcccgagccccagcaccagggcggcccaagcagcggcgcccctcctcccagcggcggcagcccagccggctccccaacctctaccgaggagggcacctctgagtccgccacccccgagagcggccctggcacctccaccgagcccagcgagggcagcgcacccggcagccctgccggcagccccacctccacagaggagggaaccagcaccgagcccagcgaaggcagcgccccaggcaccagcaccgagcctagtgagcaggagattaaacggatcaacaagatcagaagaagacttgtgaaagacagcaacaccaagaaggccggcaagacaggccccatgaaaaccctgctggttagagtgatgacacccgatctgagagagcggctggaaaacctgagaaagaagcctgaaaatatcccccagcccatcagcaatacatctagagccaacctgaataagctgctgaccgattacaccgaaatgaagaaggcgatcctgcatgtgtactgggaagagttccagaaggaccctgtgggcctgatgagccgggtggcccagcctgccagcaagaagatcgatcagaacaagctgaaacctgagatggacgagaagggcaacctgaccaccgccggctttgcctgctctcagtgtggccagcccctgttcgtgtacaagctggagcaggtgtctgagaagggcaaggcttacaccaactacttcggacggtgcaatgtggccgagcacgaaaagctgatcctgctggcccagctgaagcccgagaaggatagcgacgaagccgtgacatatagcctgggaaagtttgggcagagggccctggatttctacagcattcatgtgaccaaggagtccacccaccccgtgaagcccctggcccagatcgccggaaacagatacgcctccggacctgtgggaaaggccctgagcgacgcatgtatgggcacaatcgcctccttcctgtctaagtaccaggacatcatcatcgaacaccagaaggtggtgaagggcaaccagaagagactggagagcctgcgggagctggccggcaaggaaaacctggaataccctagcgtgaccctgccacctcagcctcacaccaaggagggcgttgatgcctacaacgaagtgatcgcccgggtgcgaatgtgggtgaacctgaacctgtggcagaagctgaagctaagcagagatgatgccaagcctctgctgagactgaagggattcccttcctttcctctggtcgagagacaggccaacgaagtggactggtgggacatggtgtgtaacgtgaagaagctgatcaacgagaaaaaggaggatggcaaggtgttttggcagaatctggctggctacaagagacaggaagccctgagaccatacctgagcagcgaggaagatcggaagaagggaaagaaattcgctcggtaccagctgggcgacctgctgctgcacctggaaaagaagcacggcgaggactggggaaaggtgtacgacgaggcctgggagcggattgacaagaaagtggaaggcctgagcaagcacatcaagctggaagaggaacggagaagcgaggacgcccagagcaaggccgccctgaccgactggctgcgggctaaggccagcttcgtgatcgagggcctgaaggaggccgacaaggacgagttctgcagatgcgagctgaagctgcagaagtggtacggggacctgcggggaaagcccttcgccatcgaagccgagaacagcatcctggacatcagcggcttcagcaagcagtacaactgtgccttcatctggcagaaggacggcgtgaagaagctgaacctgtacctgatcatcaactacttcaagggcggcaagctgcggttcaagaagatcaaacctgaagccttcgaagccaacagattctacaccgtgatcaacaaaaagagcggcgagatcgtgcccatggaggtgaacttcaacttcgacgaccccaacctgatcatcctgcctctggcctttggcaagagacagggcagagaattcatctggaacgacctgctgtccctggaaaccggcagcctgaagctggccaacggaagagtgatcgagaagacactgtacaacagaagaacccggcaggatgagcctgccctgttcgtggccctgaccttcgagcggcgggaggtcctggactcctccaatatcaaaccaatgaacctgatcggcgtggcaagaggcgaaaacatccccgccgtgatcgccctgaccgaccccgagggctgcccactgagccggtttaaggatagcctgggaaacccaacccacatcctgagaatcggcgagagctataaggagaagcagcggaccatccaggccaagaaggaggtggagcagcggagagccggcggctacagccggaagtacgccagcaaagccaagaatctggcagacgatatggtgagaaacaccgctagagatctgctgtactacgccgtgacccaggatgccatgctgatcttcgccaacctgagccggggcttcggccggcagggcaagcggaccttcatggccgagagacagtacacacggatggaggactggctgaccgccaagctggcctacgagggcctgagcaagacctacctgtccaagacactggcccagtacacctccaagacatgcagcaactgtgggtttaccatcaccagcgccgactacgacagggtgctggagaagctgaagaagacagcaacaggctggatgaccacaattaacggcaaggagctgaaggtggagggccagattacctactacaacagatacaagagacagaacgtagtcaaggacctgtccgtcgagctggatagactgagcgaagaatctgtgaacaacgacatctcctcctggacaaagggcagaagcggagaagctctgagcctcctgaagaaaagattctcccatagacccgtgcaggagaagttcgtgtgcctgaactgcggcttcgagacacacgcagccgagcaagccgccctgaacatcgccagatcctggctgttcctgcggagccaggagtacaagaaataccagacaaacaagacaaccggcaacaccgataagagagccttcgtcgagacctggcagtccttttaccggaagaagcttaaggaggtgtggaaacctgccgtgcggtctggcggatctggcggaggctcctctgcaggagcccgtgaccttcgccgacgtggccgtgctgttcacccccgaggagtggatgttcctggacagcgcccagaggagcctgtacagggacgtgatgctggagaactacaggaacctggccagcgtgggcgaccagctgggcaagcccagcatgctgagcctgagcgagcccggcgaggagctgtgggcccccgagaggaggaccttccccggcaccaggcccgagccccagcaccagggatctggctccggcagcggccccaagaaaaagagaaaagtctaagctgccttctgcggggcttgccttctggccatgcccttcttctctcccttgcacctgtacctcttggtctttgaataaagcctgagtaggaaggctagcaaaaaaaaaaaaaaaaaaaaaaaaaaaaaaaaaaaaaaaaaaaaaaaaaaaaaaaaaaaaaaaaaaaaaaaaaaaaaaaa

SEQ ID NO: 16868 - RNA, 9485 nt, synthetic construct
  source 1..9485: mol_type = other RNA
aggaaataagagagaaaagaagagtaagaagaaatataagagccaccatggcccctaagaagaagcgtaaagtgagccggatggaacgcctcgtctacgaggtgcggcagaagtgcagaaacatcgaggacatctgcatctcctgcggatctctgaacgtgaccctggagcacccactgttcatcggcggcatgtgccagaactgtaaaaactgttttctggagtgtgcctatcaatacgacgatgacggctaccagagctactgcaccatctgttgcggcggaagagaggtgctgatgtgtggaaataacaactgctgccggtgcttctgcgtggaatgcgtggacctgctggtgggccccggcgccgcccaggccgctattaaggaagatccttggaactgctacatgtgcggccacaagggcacatacggcctgctgagacggagagaggactggcctagcagactgcagatgttcttcgccaataaccacgaccaggagttcgacccccctaaggtgtaccctcccgtccccgccgagaagagaaagcccatccgggtcctgagcctgttcgatggcatcgccaccggtctgctggtgctgaaggacctgggcatccaggtggataggtacattgcctccgaggtgtgcgaggactccatcaccgtgggaatggtgcgtcatcagggcaagatcatgtacgtgggcgacgtgcggagcgtgacacagaagcatatccaggagtggggccctttcgacctggtgatcggcggcagcccttgcaatgacctgagcatcgtgaacccagcccggaagggcctgtacgagggaaccggcagactgttcttcgagttttacagactgctgcacgacgcccggcctaaggaaggcgacgaccggcccttcttttggctgttcgagaatgtggtggccatgggagtcagcgacaagcgggatattagccggttcctggagagcaaccccgtgatgatcgatgccaaggaagtgagcgccgcccaccgggccagatacttctggggcaatctgcctggcatgaacagacccctggccagcaccgtgaacgacaagctggagctgcaggagtgcctggagcacggccggatcgccaagttcagcaaggtgagaaccatcaccacccgaagcaacagcatcaaacaaggcaaggaccagcactttcctgtgttcatgaacgagaaggaggacatcctgtggtgtaccgagatggagagagtgttcgggttcccagtccactacacagatgtcagcaacatgtctagactggccagacagagactgctgggaagaagctggtccgtccctgtgatcagacacctgttcgcccctctgaaggagtacttcgcctgcgtgagcagcggcaacagcaacgccaacagccggggccccagcttctctagcggcctggtgccactgtccctgagagggagccacatgggccccatggagatctacaaaaccgtgagcgcctggaagcggcagcctgtgcgcgtgctgagcctgtttcggaatatcgataaagtcctgaaaagcctgggattcctggagagcggctctggctccggcggtggcaccctgaagtacgtggaggatgtgacaaacgtggtcagacgggatgtggagaagtggggccccttcgatctggtgtacggcagcacccaacccctgggcagctcttgtgaccggtgccctggctggtacatgtttcagttccaccggatcctgcagtacgccctgccgagacaggagtcccagcggccattcttttggattttcatggacaacttgctgctgaccgaggatgaccaggaaactaccactcggttcctgcagaccgaagccgtgaccctgcaggacgtgagaggccgggactaccagaacgccatgcgggtgtggtccaacatccctggactgaaaagcaagcacgcacctctgacccctaaagaagaggagtacctgcaggcccaggtgcggagcagaagcaagctggacgcccctaaggtggatctgctggtgaagaattgcctcctgcccctgagagagtacttcaagtatttcagccagaatagtctgcccctgggaggcagcggcggcggcgccctggtgacatttgaggacgtcgccgtgcggttcacccaggaggaatgggctctgctggatccttctcagaaaatcctgtaccgggacgtgatgagagagacataccggaatctgacctccgtgggcatcaactgggaatgttgggaccttgaagcctgcttcagaagcctgggaagaaacctgagagtgcaggtggtgaagagaaagtgcgagctgaccaacagcggcccctgcgccgagggcggcccaagcagcggcgcccctcctcccagcggcggcagcccagccggctccccaacctctaccgaggagggcacctctgagtccgccacccccgagagcggccctggcacctccaccgagcccagcgagggcagcgcacccggcagccctgccggcagccccacctccacagaggagggaaccagcaccgagcccagcgaaggcagcgccccaggcaccagcaccgagcctagtgagcaggagattaaacggatcaacaagatcagaagaagacttgtgaaagacagcaacaccaagaaggccggcaagacaggccccatgaaaaccctgctggttagagtgatgacacccgatctgagagagcggctggaaaacctgagaaagaagcctgaaaatatcccccagcccatcagcaatacatctagagccaacctgaataagctgctgaccgattacaccgaaatgaagaaggcgatcctgcatgtgtactgggaagagttccagaaggaccctgtgggcctgatgagccgggtggcccagcctgccagcaagaagatcgatcagaacaagctgaaacctgagatggacgagaagggcaacctgaccaccgccggctttgcctgctctcagtgtggccagcccctgttcgtgtacaagctggagcaggtgtctgagaagggcaaggcttacaccaactacttcggacggtgcaatgtggccgagcacgaaaagctgatcctgctggcccagctgaagcccgagaaggatagcgacgaagccgtgacatatagcctgggaaagtttgggcagagggccctggatttctacagcattcatgtgaccaaggagtccacccaccccgtgaagcccctggcccagatcgccggaaacagatacgcctccggacctgtgggaaaggccctgagcgacgcatgtatgggcacaatcgcctccttcctgtctaagtaccaggacatcatcatcgaacaccagaaggtggtgaagggcaaccagaagagactggagagcctgcgggagctggccggcaaggaaaacctggaataccctagcgtgaccctgccacctcagcctcacaccaaggagggcgttgatgcctacaacgaagtgatcgcccgggtgcgaatgtgggtgaacctgaacctgtggcagaagctgaagctaagcagagatgatgccaagcctctgctgagactgaagggattcccttcctttcctctggtcgagagacaggccaacgaagtggactggtgggacatggtgtgtaacgtgaagaagctgatcaacgagaaaaaggaggatggcaaggtgttttggcagaatctggctggctacaagagacaggaagccctgagaccatacctgagcagcgaggaagatcggaagaagggaaagaaattcgctcggtaccagctgggcgacctgctgctgcacctggaaaagaagcacggcgaggactggggaaaggtgtacgacgaggcctgggagcggattgacaagaaagtggaaggcctgagcaagcacatcaagctggaagaggaacggagaagcgaggacgcccagagcaaggccgccctgaccgactggctgcgggctaaggccagcttcgtgatcgagggcctgaaggaggccgacaaggacgagttctgcagatgcgagctgaagctgcagaagtggtacggggacctgcggggaaagcccttcgccatcgaagccgagaacagcatcctggacatcagcggcttcagcaagcagtacaactgtgccttcatctggcagaaggacggcgtgaagaagctgaacctgtacctgatcatcaactacttcaagggcggcaagctgcggttcaagaagatcaaacctgaagccttcgaagccaacagattctacaccgtgatcaacaaaaagagcggcgagatcgtgcccatggaggtgaacttcaacttcgacgaccccaacctgatcatcctgcctctggcctttggcaagagacagggcagagaattcatctggaacgacctgctgtccctggaaaccggcagcctgaagctggccaacggaagagtgatcgagaagacactgtacaacagaagaacccggcaggatgagcctgccctgttcgtggccctgaccttcgagcggcgggaggtcctggactcctccaatatcaaaccaatgaacctgatcggcgtggcaagaggcgaaaacatccccgccgtgatcgccctgaccgaccccgagggctgcccactgagccggtttaaggatagcctgggaaacccaacccacatcctgagaatcggcgagagctataaggagaagcagcggaccatccaggccaagaaggaggtggagcagcggagagccggcggctacagccggaagtacgccagcaaagccaagaatctggcagacgatatggtgagaaacaccgctagagatctgctgtactacgccgtgacccaggatgccatgctgatcttcgccaacctgagccggggcttcggccggcagggcaagcggaccttcatggccgagagacagtacacacggatggaggactggctgaccgccaagctggcctacgagggcctgagcaagacctacctgtccaagacactggcccagtacacctccaagacatgcagcaactgtgggtttaccatcaccagcgccgactacgacagggtgctggagaagctgaagaagacagcaacaggctggatgaccacaattaacggcaaggagctgaaggtggagggccagattacctactacaacagatacaagagacagaacgtagtcaaggacctgtccgtcgagctggatagactgagcgaagaatctgtgaacaacgacatctcctcctggacaaagggcagaagcggagaagctctgagcctcctgaagaaaagattctcccatagacccgtgcaggagaagttcgtgtgcctgaactgcggcttcgagacacacgcagccgagcaagccgccctgaacatcgccagatcctggctgttcctgcggagccaggagtacaagaaataccagacaaacaagacaaccggcaacaccgataagagagccttcgtcgagacctggcagtccttttaccggaagaagcttaaggaggtgtggaaacctgccgtgcggtctggcggatctggcggaggctccatcagggagttcggcggcatgggcgccggcatcgccaacatctggagcttccagggcagcgtgaccttcagggacgtggccatcgacttcagccaggaggagtggaagtggctgcagcccgcccagagggacctgtacaggtgcgtgatgctggagaactacggccacctggtgagcctgggcctgagcatcagcaagcccgacgtggtgagcctgctggagcagggcaaggagccctggctgggcggcccaagcagcggcgcccctcctcccagcggcggcagcccagccggctccccaacctctaccgaggagggcacctctgagtccgccacccccgagagcggccctggcacctccaccgagcccagcgagggcagcgcacccggcagccctgccggcagccccacctccacagaggagggaaccagcaccgagcccagcgaaggcagcgccccaggcaccagcaccgagcctagtgagcaggagattaaacggatcaacaagatcagaagaagacttgtgaaagacagcaacaccaagaaggccggcaagacaggccccatgaaaaccctgctggttagagtgatgacacccgatctgagagagcggctggaaaacctgagaaagaagcctgaaaatatcccccagcccatcagcaatacatctagagccaacctgaataagctgctgaccgattacaccgaaatgaagaaggcgatcctgcatgtgtactgggaagagttccagaaggaccctgtgggcctgatgagccgggtggcccagcctgccagcaagaagatcgatcagaacaagctgaaacctgagatggacgagaagggcaacctgaccaccgccggctttgcctgctctcagtgtggccagcccctgttcgtgtacaagctggagcaggtgtctgagaagggcaaggcttacaccaactacttcggacggtgcaatgtggccgagcacgaaaagctgatcctgctggcccagctgaagcccgagaaggatagcgacgaagccgtgacatatagcctgggaaagtttgggcagagggccctggatttctacagcattcatgtgaccaaggagtccacccaccccgtgaagcccctggcccagatcgccggaaacagatacgcctccggacctgtgggaaaggccctgagcgacgcatgtatgggcacaatcgcctccttcctgtctaagtaccaggacatcatcatcgaacaccagaaggtggtgaagggcaaccagaagagactggagagcctgcgggagctggccggcaaggaaaacctggaataccctagcgtgaccctgccacctcagcctcacaccaaggagggcgttgatgcctacaacgaagtgatcgcccgggtgcgaatgtgggtgaacctgaacctgtggcagaagctgaagctaagcagagatgatgccaagcctctgctgagactgaagggattcccttcctttcctctggtcgagagacaggccaacgaagtggactggtgggacatggtgtgtaacgtgaagaagctgatcaacgagaaaaaggaggatggcaaggtgttttggcagaatctggctggctacaagagacaggaagccctgagaccatacctgagcagcgaggaagatcggaagaagggaaagaaattcgctcggtaccagctgggcgacctgctgctgcacctggaaaagaagcacggcgaggactggggaaaggtgtacgacgaggcctgggagcggattgacaagaaagtggaaggcctgagcaagcacatcaagctggaagaggaacggagaagcgaggacgcccagagcaaggccgccctgaccgactggctgcgggctaaggccagcttcgtgatcgagggcctgaaggaggccgacaaggacgagttctgcagatgcgagctgaagctgcagaagtggtacggggacctgcggggaaagcccttcgccatcgaagccgagaacagcatcctggacatcagcggcttcagcaagcagtacaactgtgccttcatctggcagaaggacggcgtgaagaagctgaacctgtacctgatcatcaactacttcaagggcggcaagctgcggttcaagaagatcaaacctgaagccttcgaagccaacagattctacaccgtgatcaacaaaaagagcggcgagatcgtgcccatggaggtgaacttcaacttcgacgaccccaacctgatcatcctgcctctggcctttggcaagagacagggcagagaattcatctggaacgacctgctgtccctggaaaccggcagcctgaagctggccaacggaagagtgatcgagaagacactgtacaacagaagaacccggcaggatgagcctgccctgttcgtggccctgaccttcgagcggcgggaggtcctggactcctccaatatcaaaccaatgaacctgatcggcgtggcaagaggcgaaaacatccccgccgtgatcgccctgaccgaccccgagggctgcccactgagccggtttaaggatagcctgggaaacccaacccacatcctgagaatcggcgagagctataaggagaagcagcggaccatccaggccaagaaggaggtggagcagcggagagccggcggctacagccggaagtacgccagcaaagccaagaatctggcagacgatatggtgagaaacaccgctagagatctgctgtactacgccgtgacccaggatgccatgctgatcttcgccaacctgagccggggcttcggccggcagggcaagcggaccttcatggccgagagacagtacacacggatggaggactggctgaccgccaagctggcctacgagggcctgagcaagacctacctgtccaagacactggcccagtacacctccaagacatgcagcaactgtgggtttaccatcaccagcgccgactacgacagggtgctggagaagctgaagaagacagcaacaggctggatgaccacaattaacggcaaggagctgaaggtggagggccagattacctactacaacagatacaagagacagaacgtagtcaaggacctgtccgtcgagctggatagactgagcgaagaatctgtgaacaacgacatctcctcctggacaaagggcagaagcggagaagctctgagcctcctgaagaaaagattctcccatagacccgtgcaggagaagttcgtgtgcctgaactgcggcttcgagacacacgcagccgagcaagccgccctgaacatcgccagatcctggctgttcctgcggagccaggagtacaagaaataccagacaaacaagacaaccggcaacaccgataagagagccttcgtcgagacctggcagtccttttaccggaagaagcttaaggaggtgtggaaacctgccgtgcggtctggcggatctggcggaggctcctatcagggagttcggcggcatgggcgccggcatcgccaacatctggagcttccagggcagcgtgaccttcagggacgtggccatcgacttcagccaggaggagtggaagtggctgcagcccgcccagagggacctgtacaggtgcgtgatgctggagaactacggccacctggtgagcctgggcctgagcatcagcaagcccgacgtggtgagcctgctggagcagggcaaggagccctggctgggatctggctccggcagcggccccaagaaaaagagaaaagtctaagctgccttctgcggggcttgccttctggccatgcccttcttctctcccttgcacctgtacctcttggtctttgaataaagcctgagtaggaaggctagcaaaaaaaaaaaaaaaaaaaaaaaaaaaaaaaaaaaaaaaaaaaaaaaaaaaaaaaaaaaaaaaaaaaaaaaaaaaaaaaa

SEQ ID NO: 16869 - RNA, 9485 nt, synthetic construct
  source 1..9485: mol_type = other RNA
aggaaataagagagaaaagaagagtaagaagaaatataagagccaccatggcccctaagaagaagcgtaaagtgagccggatggaacgcctcgtctacgaggtgcggcagaagtgcagaaacatcgaggacatctgcatctcctgcggatctctgaacgtgaccctggagcacccactgttcatcggcggcatgtgccagaactgtaaaaactgttttctggagtgtgcctatcaatacgacgatgacggctaccagagctactgcaccatctgttgcggcggaagagaggtgctgatgtgtggaaataacaactgctgccggtgcttctgcgtggaatgcgtggacctgctggtgggccccggcgccgcccaggccgctattaaggaagatccttggaactgctacatgtgcggccacaagggcacatacggcctgctgagacggagagaggactggcctagcagactgcagatgttcttcgccaataaccacgaccaggagttcgacccccctaaggtgtaccctcccgtccccgccgagaagagaaagcccatccgggtcctgagcctgttcgatggcatcgccaccggtctgctggtgctgaaggacctgggcatccaggtggataggtacattgcctccgaggtgtgcgaggactccatcaccgtgggaatggtgcgtcatcagggcaagatcatgtacgtgggcgacgtgcggagcgtgacacagaagcatatccaggagtggggccctttcgacctggtgatcggcggcagcccttgcaatgacctgagcatcgtgaacccagcccggaagggcctgtacgagggaaccggcagactgttcttcgagttttacagactgctgcacgacgcccggcctaaggaaggcgacgaccggcccttcttttggctgttcgagaatgtggtggccatgggagtcagcgacaagcgggatattagccggttcctggagagcaaccccgtgatgatcgatgccaaggaagtgagcgccgcccaccgggccagatacttctggggcaatctgcctggcatgaacagacccctggccagcaccgtgaacgacaagctggagctgcaggagtgcctggagcacggccggatcgccaagttcagcaaggtgagaaccatcaccacccgaagcaacagcatcaaacaaggcaaggaccagcactttcctgtgttcatgaacgagaaggaggacatcctgtggtgtaccgagatggagagagtgttcgggttcccagtccactacacagatgtcagcaacatgtctagactggccagacagagactgctgggaagaagctggtccgtccctgtgatcagacacctgttcgcccctctgaaggagtacttcgcctgcgtgagcagcggcaacagcaacgccaacagccggggccccagcttctctagcggcctggtgccactgtccctgagagggagccacatgggccccatggagatctacaaaaccgtgagcgcctggaagcggcagcctgtgcgcgtgctgagcctgtttcggaatatcgataaagtcctgaaaagcctgggattcctggagagcggctctggctccggcggtggcaccctgaagtacgtggaggatgtgacaaacgtggtcagacgggatgtggagaagtggggccccttcgatctggtgtacggcagcacccaacccctgggcagctcttgtgaccggtgccctggctggtacatgtttcagttccaccggatcctgcagtacgccctgccgagacaggagtcccagcggccattcttttggattttcatggacaacttgctgctgaccgaggatgaccaggaaactaccactcggttcctgcagaccgaagccgtgaccctgcaggacgtgagaggccgggactaccagaacgccatgcgggtgtggtccaacatccctggactgaaaagcaagcacgcacctctgacccctaaagaagaggagtacctgcaggcccaggtgcggagcagaagcaagctggacgcccctaaggtggatctgctggtgaagaattgcctcctgcccctgagagagtacttcaagtatttcagccagaatagtctgcccctgggaggcagcggcggcggcgccctggtgacatttgaggacgtcgccgtgcggttcacccaggaggaatgggctctgctggatccttctcagaaaatcctgtaccgggacgtgatgagagagacataccggaatctgacctccgtgggcatcaactgggaatgttgggaccttgaagcctgcttcagaagcctgggaagaaacctgagagtgcaggtggtgaagagaaagtgcgagctgaccaacagcggcccctgcgccgagggcggcccaagcagcggcgcccctcctcccagcggcggcagcccagccggctccccaacctctaccgaggagggcacctctgagtccgccacccccgagagcggccctggcacctccaccgagcccagcgagggcagcgcacccggcagccctgccggcagccccacctccacagaggagggaaccagcaccgagcccagcgaaggcagcgccccaggcaccagcaccgagcctagtgagcaggagattaaacggatcaacaagatcagaagaagacttgtgaaagacagcaacaccaagaaggccggcaagacaggccccatgaaaaccctgctggttagagtgatgacacccgatctgagagagcggctggaaaacctgagaaagaagcctgaaaatatcccccagcccatcagcaatacatctagagccaacctgaataagctgctgaccgattacaccgaaatgaagaaggcgatcctgcatgtgtactgggaagagttccagaaggaccctgtgggcctgatgagccgggtggcccagcctgccagcaagaagatcgatcagaacaagctgaaacctgagatggacgagaagggcaacctgaccaccgccggctttgcctgctctcagtgtggccagcccctgttcgtgtacaagctggagcaggtgtctgagaagggcaaggcttacaccaactacttcggacggtgcaatgtggccgagcacgaaaagctgatcctgctggcccagctgaagcccgagaaggatagcgacgaagccgtgacatatagcctgggaaagtttgggcagagggccctggatttctacagcattcatgtgaccaaggagtccacccaccccgtgaagcccctggcccagatcgccggaaacagatacgcctccggacctgtgggaaaggccctgagcgacgcatgtatgggcacaatcgcctccttcctgtctaagtaccaggacatcatcatcgaacaccagaaggtggtgaagggcaaccagaagagactggagagcctgcgggagctggccggcaaggaaaacctggaataccctagcgtgaccctgccacctcagcctcacaccaaggagggcgttgatgcctacaacgaagtgatcgcccgggtgcgaatgtgggtgaacctgaacctgtggcagaagctgaagctaagcagagatgatgccaagcctctgctgagactgaagggattcccttcctttcctctggtcgagagacaggccaacgaagtggactggtgggacatggtgtgtaacgtgaagaagctgatcaacgagaaaaaggaggatggcaaggtgttttggcagaatctggctggctacaagagacaggaagccctgagaccatacctgagcagcgaggaagatcggaagaagggaaagaaattcgctcggtaccagctgggcgacctgctgctgcacctggaaaagaagcacggcgaggactggggaaaggtgtacgacgaggcctgggagcggattgacaagaaagtggaaggcctgagcaagcacatcaagctggaagaggaacggagaagcgaggacgcccagagcaaggccgccctgaccgactggctgcgggctaaggccagcttcgtgatcgagggcctgaaggaggccgacaaggacgagttctgcagatgcgagctgaagctgcagaagtggtacggggacctgcggggaaagcccttcgccatcgaagccgagaacagcatcctggacatcagcggcttcagcaagcagtacaactgtgccttcatctggcagaaggacggcgtgaagaagctgaacctgtacctgatcatcaactacttcaagggcggcaagctgcggttcaagaagatcaaacctgaagccttcgaagccaacagattctacaccgtgatcaacaaaaagagcggcgagatcgtgcccatggaggtgaacttcaacttcgacgaccccaacctgatcatcctgcctctggcctttggcaagagacagggcagagaattcatctggaacgacctgctgtccctggaaaccggcagcctgaagctggccaacggaagagtgatcgagaagacactgtacaacagaagaacccggcaggatgagcctgccctgttcgtggccctgaccttcgagcggcgggaggtcctggactcctccaatatcaaaccaatgaacctgatcggcgtggcaagaggcgaaaacatccccgccgtgatcgccctgaccgaccccgagggctgcccactgagccggtttaaggatagcctgggaaacccaacccacatcctgagaatcggcgagagctataaggagaagcagcggaccatccaggccaagaaggaggtggagcagcggagagccggcggctacagccggaagtacgccagcaaagccaagaatctggcagacgatatggtgagaaacaccgctagagatctgctgtactacgccgtgacccaggatgccatgctgatcttcgccaacctgagccggggcttcggccggcagggcaagcggaccttcatggccgagagacagtacacacggatggaggactggctgaccgccaagctggcctacgagggcctgagcaagacctacctgtccaagacactggcccagtacacctccaagacatgcagcaactgtgggtttaccatcaccagcgccgactacgacagggtgctggagaagctgaagaagacagcaacaggctggatgaccacaattaacggcaaggagctgaaggtggagggccagattacctactacaacagatacaagagacagaacgtagtcaaggacctgtccgtcgagctggatagactgagcgaagaatctgtgaacaacgacatctcctcctggacaaagggcagaagcggagaagctctgagcctcctgaagaaaagattctcccatagacccgtgcaggagaagttcgtgtgcctgaactgcggcttcgagacacacgcagccgagcaagccgccctgaacatcgccagatcctggctgttcctgcggagccaggagtacaagaaataccagacaaacaagacaaccggcaacaccgataagagagccttcgtcgagacctggcagtccttttaccggaagaagcttaaggaggtgtggaaacctgccgtgcggtctggcggatctggcggaggctccacccagggcctggtgaccttcagggacgtggccatcgagttcagccaggaggagtggaagtgcctggagcccgcccagaaggacctgtacaaggacgtgaccctggagaacttcagcaacctggtgagcctgggcctgagcctgcccaagcccgacgtgatcagcctgctggagcagggcaaggagccctggatggtgatcaacgacatgaccggcccctggtgccccgacctggagagcaggggcggcccaagcagcggcgcccctcctcccagcggcggcagcccagccggctccccaacctctaccgaggagggcacctctgagtccgccacccccgagagcggccctggcacctccaccgagcccagcgagggcagcgcacccggcagccctgccggcagccccacctccacagaggagggaaccagcaccgagcccagcgaaggcagcgccccaggcaccagcaccgagcctagtgagcaggagattaaacggatcaacaagatcagaagaagacttgtgaaagacagcaacaccaagaaggccggcaagacaggccccatgaaaaccctgctggttagagtgatgacacccgatctgagagagcggctggaaaacctgagaaagaagcctgaaaatatcccccagcccatcagcaatacatctagagccaacctgaataagctgctgaccgattacaccgaaatgaagaaggcgatcctgcatgtgtactgggaagagttccagaaggaccctgtgggcctgatgagccgggtggcccagcctgccagcaagaagatcgatcagaacaagctgaaacctgagatggacgagaagggcaacctgaccaccgccggctttgcctgctctcagtgtggccagcccctgttcgtgtacaagctggagcaggtgtctgagaagggcaaggcttacaccaactacttcggacggtgcaatgtggccgagcacgaaaagctgatcctgctggcccagctgaagcccgagaaggatagcgacgaagccgtgacatatagcctgggaaagtttgggcagagggccctggatttctacagcattcatgtgaccaaggagtccacccaccccgtgaagcccctggcccagatcgccggaaacagatacgcctccggacctgtgggaaaggccctgagcgacgcatgtatgggcacaatcgcctccttcctgtctaagtaccaggacatcatcatcgaacaccagaaggtggtgaagggcaaccagaagagactggagagcctgcgggagctggccggcaaggaaaacctggaataccctagcgtgaccctgccacctcagcctcacaccaaggagggcgttgatgcctacaacgaagtgatcgcccgggtgcgaatgtgggtgaacctgaacctgtggcagaagctgaagctaagcagagatgatgccaagcctctgctgagactgaagggattcccttcctttcctctggtcgagagacaggccaacgaagtggactggtgggacatggtgtgtaacgtgaagaagctgatcaacgagaaaaaggaggatggcaaggtgttttggcagaatctggctggctacaagagacaggaagccctgagaccatacctgagcagcgaggaagatcggaagaagggaaagaaattcgctcggtaccagctgggcgacctgctgctgcacctggaaaagaagcacggcgaggactggggaaaggtgtacgacgaggcctgggagcggattgacaagaaagtggaaggcctgagcaagcacatcaagctggaagaggaacggagaagcgaggacgcccagagcaaggccgccctgaccgactggctgcgggctaaggccagcttcgtgatcgagggcctgaaggaggccgacaaggacgagttctgcagatgcgagctgaagctgcagaagtggtacggggacctgcggggaaagcccttcgccatcgaagccgagaacagcatcctggacatcagcggcttcagcaagcagtacaactgtgccttcatctggcagaaggacggcgtgaagaagctgaacctgtacctgatcatcaactacttcaagggcggcaagctgcggttcaagaagatcaaacctgaagccttcgaagccaacagattctacaccgtgatcaacaaaaagagcggcgagatcgtgcccatggaggtgaacttcaacttcgacgaccccaacctgatcatcctgcctctggcctttggcaagagacagggcagagaattcatctggaacgacctgctgtccctggaaaccggcagcctgaagctggccaacggaagagtgatcgagaagacactgtacaacagaagaacccggcaggatgagcctgccctgttcgtggccctgaccttcgagcggcgggaggtcctggactcctccaatatcaaaccaatgaacctgatcggcgtggcaagaggcgaaaacatccccgccgtgatcgccctgaccgaccccgagggctgcccactgagccggtttaaggatagcctgggaaacccaacccacatcctgagaatcggcgagagctataaggagaagcagcggaccatccaggccaagaaggaggtggagcagcggagagccggcggctacagccggaagtacgccagcaaagccaagaatctggcagacgatatggtgagaaacaccgctagagatctgctgtactacgccgtgacccaggatgccatgctgatcttcgccaacctgagccggggcttcggccggcagggcaagcggaccttcatggccgagagacagtacacacggatggaggactggctgaccgccaagctggcctacgagggcctgagcaagacctacctgtccaagacactggcccagtacacctccaagacatgcagcaactgtgggtttaccatcaccagcgccgactacgacagggtgctggagaagctgaagaagacagcaacaggctggatgaccacaattaacggcaaggagctgaaggtggagggccagattacctactacaacagatacaagagacagaacgtagtcaaggacctgtccgtcgagctggatagactgagcgaagaatctgtgaacaacgacatctcctcctggacaaagggcagaagcggagaagctctgagcctcctgaagaaaagattctcccatagacccgtgcaggagaagttcgtgtgcctgaactgcggcttcgagacacacgcagccgagcaagccgccctgaacatcgccagatcctggctgttcctgcggagccaggagtacaagaaataccagacaaacaagacaaccggcaacaccgataagagagccttcgtcgagacctggcagtccttttaccggaagaagcttaaggaggtgtggaaacctgccgtgcggtctggcggatctggcggaggctcctacccagggcctggtgaccttcagggacgtggccatcgagttcagccaggaggagtggaagtgcctggagcccgcccagaaggacctgtacaaggacgtgaccctggagaacttcagcaacctggtgagcctgggcctgagcctgcccaagcccgacgtgatcagcctgctggagcagggcaaggagccctggatggtgatcaacgacatgaccggcccctggtgccccgacctggagagcaggggatctggctccggcagcggccccaagaaaaagagaaaagtctaagctgccttctgcggggcttgccttctggccatgcccttcttctctcccttgcacctgtacctcttggtctttgaataaagcctgagtaggaaggctagcaaaaaaaaaaaaaaaaaaaaaaaaaaaaaaaaaaaaaaaaaaaaaaaaaaaaaaaaaaaaaaaaaaaaaaaaaaaaaaaa

SEQ ID NO: 16870 - RNA, 9485 nt, synthetic construct
  source 1..9485: mol_type = other RNA
aggaaataagagagaaaagaagagtaagaagaaatataagagccaccatggcccctaagaagaagcgtaaagtgagccggatggaacgcctcgtctacgaggtgcggcagaagtgcagaaacatcgaggacatctgcatctcctgcggatctctgaacgtgaccctggagcacccactgttcatcggcggcatgtgccagaactgtaaaaactgttttctggagtgtgcctatcaatacgacgatgacggctaccagagctactgcaccatctgttgcggcggaagagaggtgctgatgtgtggaaataacaactgctgccggtgcttctgcgtggaatgcgtggacctgctggtgggccccggcgccgcccaggccgctattaaggaagatccttggaactgctacatgtgcggccacaagggcacatacggcctgctgagacggagagaggactggcctagcagactgcagatgttcttcgccaataaccacgaccaggagttcgacccccctaaggtgtaccctcccgtccccgccgagaagagaaagcccatccgggtcctgagcctgttcgatggcatcgccaccggtctgctggtgctgaaggacctgggcatccaggtggataggtacattgcctccgaggtgtgcgaggactccatcaccgtgggaatggtgcgtcatcagggcaagatcatgtacgtgggcgacgtgcggagcgtgacacagaagcatatccaggagtggggccctttcgacctggtgatcggcggcagcccttgcaatgacctgagcatcgtgaacccagcccggaagggcctgtacgagggaaccggcagactgttcttcgagttttacagactgctgcacgacgcccggcctaaggaaggcgacgaccggcccttcttttggctgttcgagaatgtggtggccatgggagtcagcgacaagcgggatattagccggttcctggagagcaaccccgtgatgatcgatgccaaggaagtgagcgccgcccaccgggccagatacttctggggcaatctgcctggcatgaacagacccctggccagcaccgtgaacgacaagctggagctgcaggagtgcctggagcacggccggatcgccaagttcagcaaggtgagaaccatcaccacccgaagcaacagcatcaaacaaggcaaggaccagcactttcctgtgttcatgaacgagaaggaggacatcctgtggtgtaccgagatggagagagtgttcgggttcccagtccactacacagatgtcagcaacatgtctagactggccagacagagactgctgggaagaagctggtccgtccctgtgatcagacacctgttcgcccctctgaaggagtacttcgcctgcgtgagcagcggcaacagcaacgccaacagccggggccccagcttctctagcggcctggtgccactgtccctgagagggagccacatgggccccatggagatctacaaaaccgtgagcgcctggaagcggcagcctgtgcgcgtgctgagcctgtttcggaatatcgataaagtcctgaaaagcctgggattcctggagagcggctctggctccggcggtggcaccctgaagtacgtggaggatgtgacaaacgtggtcagacgggatgtggagaagtggggccccttcgatctggtgtacggcagcacccaacccctgggcagctcttgtgaccggtgccctggctggtacatgtttcagttccaccggatcctgcagtacgccctgccgagacaggagtcccagcggccattcttttggattttcatggacaacttgctgctgaccgaggatgaccaggaaactaccactcggttcctgcagaccgaagccgtgaccctgcaggacgtgagaggccgggactaccagaacgccatgcgggtgtggtccaacatccctggactgaaaagcaagcacgcacctctgacccctaaagaagaggagtacctgcaggcccaggtgcggagcagaagcaagctggacgcccctaaggtggatctgctggtgaagaattgcctcctgcccctgagagagtacttcaagtatttcagccagaatagtctgcccctgggaggcagcggcggcggcgccctggtgacatttgaggacgtcgccgtgcggttcacccaggaggaatgggctctgctggatccttctcagaaaatcctgtaccgggacgtgatgagagagacataccggaatctgacctccgtgggcatcaactgggaatgttgggaccttgaagcctgcttcagaagcctgggaagaaacctgagagtgcaggtggtgaagagaaagtgcgagctgaccaacagcggcccctgcgccgagggcggcccaagcagcggcgcccctcctcccagcggcggcagcccagccggctccccaacctctaccgaggagggcacctctgagtccgccacccccgagagcggccctggcacctccaccgagcccagcgagggcagcgcacccggcagccctgccggcagccccacctccacagaggagggaaccagcaccgagcccagcgaaggcagcgccccaggcaccagcaccgagcctagtgagcaggagattaaacggatcaacaagatcagaagaagacttgtgaaagacagcaacaccaagaaggccggcaagacaggccccatgaaaaccctgctggttagagtgatgacacccgatctgagagagcggctggaaaacctgagaaagaagcctgaaaatatcccccagcccatcagcaatacatctagagccaacctgaataagctgctgaccgattacaccgaaatgaagaaggcgatcctgcatgtgtactgggaagagttccagaaggaccctgtgggcctgatgagccgggtggcccagcctgccagcaagaagatcgatcagaacaagctgaaacctgagatggacgagaagggcaacctgaccaccgccggctttgcctgctctcagtgtggccagcccctgttcgtgtacaagctggagcaggtgtctgagaagggcaaggcttacaccaactacttcggacggtgcaatgtggccgagcacgaaaagctgatcctgctggcccagctgaagcccgagaaggatagcgacgaagccgtgacatatagcctgggaaagtttgggcagagggccctggatttctacagcattcatgtgaccaaggagtccacccaccccgtgaagcccctggcccagatcgccggaaacagatacgcctccggacctgtgggaaaggccctgagcgacgcatgtatgggcacaatcgcctccttcctgtctaagtaccaggacatcatcatcgaacaccagaaggtggtgaagggcaaccagaagagactggagagcctgcgggagctggccggcaaggaaaacctggaataccctagcgtgaccctgccacctcagcctcacaccaaggagggcgttgatgcctacaacgaagtgatcgcccgggtgcgaatgtgggtgaacctgaacctgtggcagaagctgaagctaagcagagatgatgccaagcctctgctgagactgaagggattcccttcctttcctctggtcgagagacaggccaacgaagtggactggtgggacatggtgtgtaacgtgaagaagctgatcaacgagaaaaaggaggatggcaaggtgttttggcagaatctggctggctacaagagacaggaagccctgagaccatacctgagcagcgaggaagatcggaagaagggaaagaaattcgctcggtaccagctgggcgacctgctgctgcacctggaaaagaagcacggcgaggactggggaaaggtgtacgacgaggcctgggagcggattgacaagaaagtggaaggcctgagcaagcacatcaagctggaagaggaacggagaagcgaggacgcccagagcaaggccgccctgaccgactggctgcgggctaaggccagcttcgtgatcgagggcctgaaggaggccgacaaggacgagttctgcagatgcgagctgaagctgcagaagtggtacggggacctgcggggaaagcccttcgccatcgaagccgagaacagcatcctggacatcagcggcttcagcaagcagtacaactgtgccttcatctggcagaaggacggcgtgaagaagctgaacctgtacctgatcatcaactacttcaagggcggcaagctgcggttcaagaagatcaaacctgaagccttcgaagccaacagattctacaccgtgatcaacaaaaagagcggcgagatcgtgcccatggaggtgaacttcaacttcgacgaccccaacctgatcatcctgcctctggcctttggcaagagacagggcagagaattcatctggaacgacctgctgtccctggaaaccggcagcctgaagctggccaacggaagagtgatcgagaagacactgtacaacagaagaacccggcaggatgagcctgccctgttcgtggccctgaccttcgagcggcgggaggtcctggactcctccaatatcaaaccaatgaacctgatcggcgtggcaagaggcgaaaacatccccgccgtgatcgccctgaccgaccccgagggctgcccactgagccggtttaaggatagcctgggaaacccaacccacatcctgagaatcggcgagagctataaggagaagcagcggaccatccaggccaagaaggaggtggagcagcggagagccggcggctacagccggaagtacgccagcaaagccaagaatctggcagacgatatggtgagaaacaccgctagagatctgctgtactacgccgtgacccaggatgccatgctgatcttcgccaacctgagccggggcttcggccggcagggcaagcggaccttcatggccgagagacagtacacacggatggaggactggctgaccgccaagctggcctacgagggcctgagcaagacctacctgtccaagacactggcccagtacacctccaagacatgcagcaactgtgggtttaccatcaccagcgccgactacgacagggtgctggagaagctgaagaagacagcaacaggctggatgaccacaattaacggcaaggagctgaaggtggagggccagattacctactacaacagatacaagagacagaacgtagtcaaggacctgtccgtcgagctggatagactgagcgaagaatctgtgaacaacgacatctcctcctggacaaagggcagaagcggagaagctctgagcctcctgaagaaaagattctcccatagacccgtgcaggagaagttcgtgtgcctgaactgcggcttcgagacacacgcagccgagcaagccgccctgaacatcgccagatcctggctgttcctgcggagccaggagtacaagaaataccagacaaacaagacaaccggcaacaccgataagagagccttcgtcgagacctggcagtccttttaccggaagaagcttaaggaggtgtggaaacctgccgtgcggtctggcggatctggcggaggctccggcaggagccccaggaagaccgaccagttctgcaacagcaagaacatggtgcccggcagcgtgaccttcagggacgtggccatcgacttcagccaggaggagtgggagtgcctgcagcccgcccagaggaccctgtacagggacgtgatgctggagaactacagccacctgatcagcctgggcagcagcatcagcaagcccgacgtgatcaccctgctggagcaggagaaggagccctggatgggcggcccaagcagcggcgcccctcctcccagcggcggcagcccagccggctccccaacctctaccgaggagggcacctctgagtccgccacccccgagagcggccctggcacctccaccgagcccagcgagggcagcgcacccggcagccctgccggcagccccacctccacagaggagggaaccagcaccgagcccagcgaaggcagcgccccaggcaccagcaccgagcctagtgagcaggagattaaacggatcaacaagatcagaagaagacttgtgaaagacagcaacaccaagaaggccggcaagacaggccccatgaaaaccctgctggttagagtgatgacacccgatctgagagagcggctggaaaacctgagaaagaagcctgaaaatatcccccagcccatcagcaatacatctagagccaacctgaataagctgctgaccgattacaccgaaatgaagaaggcgatcctgcatgtgtactgggaagagttccagaaggaccctgtgggcctgatgagccgggtggcccagcctgccagcaagaagatcgatcagaacaagctgaaacctgagatggacgagaagggcaacctgaccaccgccggctttgcctgctctcagtgtggccagcccctgttcgtgtacaagctggagcaggtgtctgagaagggcaaggcttacaccaactacttcggacggtgcaatgtggccgagcacgaaaagctgatcctgctggcccagctgaagcccgagaaggatagcgacgaagccgtgacatatagcctgggaaagtttgggcagagggccctggatttctacagcattcatgtgaccaaggagtccacccaccccgtgaagcccctggcccagatcgccggaaacagatacgcctccggacctgtgggaaaggccctgagcgacgcatgtatgggcacaatcgcctccttcctgtctaagtaccaggacatcatcatcgaacaccagaaggtggtgaagggcaaccagaagagactggagagcctgcgggagctggccggcaaggaaaacctggaataccctagcgtgaccctgccacctcagcctcacaccaaggagggcgttgatgcctacaacgaagtgatcgcccgggtgcgaatgtgggtgaacctgaacctgtggcagaagctgaagctaagcagagatgatgccaagcctctgctgagactgaagggattcccttcctttcctctggtcgagagacaggccaacgaagtggactggtgggacatggtgtgtaacgtgaagaagctgatcaacgagaaaaaggaggatggcaaggtgttttggcagaatctggctggctacaagagacaggaagccctgagaccatacctgagcagcgaggaagatcggaagaagggaaagaaattcgctcggtaccagctgggcgacctgctgctgcacctggaaaagaagcacggcgaggactggggaaaggtgtacgacgaggcctgggagcggattgacaagaaagtggaaggcctgagcaagcacatcaagctggaagaggaacggagaagcgaggacgcccagagcaaggccgccctgaccgactggctgcgggctaaggccagcttcgtgatcgagggcctgaaggaggccgacaaggacgagttctgcagatgcgagctgaagctgcagaagtggtacggggacctgcggggaaagcccttcgccatcgaagccgagaacagcatcctggacatcagcggcttcagcaagcagtacaactgtgccttcatctggcagaaggacggcgtgaagaagctgaacctgtacctgatcatcaactacttcaagggcggcaagctgcggttcaagaagatcaaacctgaagccttcgaagccaacagattctacaccgtgatcaacaaaaagagcggcgagatcgtgcccatggaggtgaacttcaacttcgacgaccccaacctgatcatcctgcctctggcctttggcaagagacagggcagagaattcatctggaacgacctgctgtccctggaaaccggcagcctgaagctggccaacggaagagtgatcgagaagacactgtacaacagaagaacccggcaggatgagcctgccctgttcgtggccctgaccttcgagcggcgggaggtcctggactcctccaatatcaaaccaatgaacctgatcggcgtggcaagaggcgaaaacatccccgccgtgatcgccctgaccgaccccgagggctgcccactgagccggtttaaggatagcctgggaaacccaacccacatcctgagaatcggcgagagctataaggagaagcagcggaccatccaggccaagaaggaggtggagcagcggagagccggcggctacagccggaagtacgccagcaaagccaagaatctggcagacgatatggtgagaaacaccgctagagatctgctgtactacgccgtgacccaggatgccatgctgatcttcgccaacctgagccggggcttcggccggcagggcaagcggaccttcatggccgagagacagtacacacggatggaggactggctgaccgccaagctggcctacgagggcctgagcaagacctacctgtccaagacactggcccagtacacctccaagacatgcagcaactgtgggtttaccatcaccagcgccgactacgacagggtgctggagaagctgaagaagacagcaacaggctggatgaccacaattaacggcaaggagctgaaggtggagggccagattacctactacaacagatacaagagacagaacgtagtcaaggacctgtccgtcgagctggatagactgagcgaagaatctgtgaacaacgacatctcctcctggacaaagggcagaagcggagaagctctgagcctcctgaagaaaagattctcccatagacccgtgcaggagaagttcgtgtgcctgaactgcggcttcgagacacacgcagccgagcaagccgccctgaacatcgccagatcctggctgttcctgcggagccaggagtacaagaaataccagacaaacaagacaaccggcaacaccgataagagagccttcgtcgagacctggcagtccttttaccggaagaagcttaaggaggtgtggaaacctgccgtgcggtctggcggatctggcggaggctcctggcaggagccccaggaagaccgaccagttctgcaacagcaagaacatggtgcccggcagcgtgaccttcagggacgtggccatcgacttcagccaggaggagtgggagtgcctgcagcccgcccagaggaccctgtacagggacgtgatgctggagaactacagccacctgatcagcctgggcagcagcatcagcaagcccgacgtgatcaccctgctggagcaggagaaggagccctggatgggatctggctccggcagcggccccaagaaaaagagaaaagtctaagctgccttctgcggggcttgccttctggccatgcccttcttctctcccttgcacctgtacctcttggtctttgaataaagcctgagtaggaaggctagcaaaaaaaaaaaaaaaaaaaaaaaaaaaaaaaaaaaaaaaaaaaaaaaaaaaaaaaaaaaaaaaaaaaaaaaaaaaaaaaa

SEQ ID NO: 16871 - RNA, 9485 nt, synthetic construct
  source 1..9485: mol_type = other RNA
aggaaataagagagaaaagaagagtaagaagaaatataagagccaccatggcccctaagaagaagcgtaaagtgagccggatggaacgcctcgtctacgaggtgcggcagaagtgcagaaacatcgaggacatctgcatctcctgcggatctctgaacgtgaccctggagcacccactgttcatcggcggcatgtgccagaactgtaaaaactgttttctggagtgtgcctatcaatacgacgatgacggctaccagagctactgcaccatctgttgcggcggaagagaggtgctgatgtgtggaaataacaactgctgccggtgcttctgcgtggaatgcgtggacctgctggtgggccccggcgccgcccaggccgctattaaggaagatccttggaactgctacatgtgcggccacaagggcacatacggcctgctgagacggagagaggactggcctagcagactgcagatgttcttcgccaataaccacgaccaggagttcgacccccctaaggtgtaccctcccgtccccgccgagaagagaaagcccatccgggtcctgagcctgttcgatggcatcgccaccggtctgctggtgctgaaggacctgggcatccaggtggataggtacattgcctccgaggtgtgcgaggactccatcaccgtgggaatggtgcgtcatcagggcaagatcatgtacgtgggcgacgtgcggagcgtgacacagaagcatatccaggagtggggccctttcgacctggtgatcggcggcagcccttgcaatgacctgagcatcgtgaacccagcccggaagggcctgtacgagggaaccggcagactgttcttcgagttttacagactgctgcacgacgcccggcctaaggaaggcgacgaccggcccttcttttggctgttcgagaatgtggtggccatgggagtcagcgacaagcgggatattagccggttcctggagagcaaccccgtgatgatcgatgccaaggaagtgagcgccgcccaccgggccagatacttctggggcaatctgcctggcatgaacagacccctggccagcaccgtgaacgacaagctggagctgcaggagtgcctggagcacggccggatcgccaagttcagcaaggtgagaaccatcaccacccgaagcaacagcatcaaacaaggcaaggaccagcactttcctgtgttcatgaacgagaaggaggacatcctgtggtgtaccgagatggagagagtgttcgggttcccagtccactacacagatgtcagcaacatgtctagactggccagacagagactgctgggaagaagctggtccgtccctgtgatcagacacctgttcgcccctctgaaggagtacttcgcctgcgtgagcagcggcaacagcaacgccaacagccggggccccagcttctctagcggcctggtgccactgtccctgagagggagccacatgggccccatggagatctacaaaaccgtgagcgcctggaagcggcagcctgtgcgcgtgctgagcctgtttcggaatatcgataaagtcctgaaaagcctgggattcctggagagcggctctggctccggcggtggcaccctgaagtacgtggaggatgtgacaaacgtggtcagacgggatgtggagaagtggggccccttcgatctggtgtacggcagcacccaacccctgggcagctcttgtgaccggtgccctggctggtacatgtttcagttccaccggatcctgcagtacgccctgccgagacaggagtcccagcggccattcttttggattttcatggacaacttgctgctgaccgaggatgaccaggaaactaccactcggttcctgcagaccgaagccgtgaccctgcaggacgtgagaggccgggactaccagaacgccatgcgggtgtggtccaacatccctggactgaaaagcaagcacgcacctctgacccctaaagaagaggagtacctgcaggcccaggtgcggagcagaagcaagctggacgcccctaaggtggatctgctggtgaagaattgcctcctgcccctgagagagtacttcaagtatttcagccagaatagtctgcccctgggaggcagcggcggcggcgccctggtgacatttgaggacgtcgccgtgcggttcacccaggaggaatgggctctgctggatccttctcagaaaatcctgtaccgggacgtgatgagagagacataccggaatctgacctccgtgggcatcaactgggaatgttgggaccttgaagcctgcttcagaagcctgggaagaaacctgagagtgcaggtggtgaagagaaagtgcgagctgaccaacagcggcccctgcgccgagggcggcccaagcagcggcgcccctcctcccagcggcggcagcccagccggctccccaacctctaccgaggagggcacctctgagtccgccacccccgagagcggccctggcacctccaccgagcccagcgagggcagcgcacccggcagccctgccggcagccccacctccacagaggagggaaccagcaccgagcccagcgaaggcagcgccccaggcaccagcaccgagcctagtgagcaggagattaaacggatcaacaagatcagaagaagacttgtgaaagacagcaacaccaagaaggccggcaagacaggccccatgaaaaccctgctggttagagtgatgacacccgatctgagagagcggctggaaaacctgagaaagaagcctgaaaatatcccccagcccatcagcaatacatctagagccaacctgaataagctgctgaccgattacaccgaaatgaagaaggcgatcctgcatgtgtactgggaagagttccagaaggaccctgtgggcctgatgagccgggtggcccagcctgccagcaagaagatcgatcagaacaagctgaaacctgagatggacgagaagggcaacctgaccaccgccggctttgcctgctctcagtgtggccagcccctgttcgtgtacaagctggagcaggtgtctgagaagggcaaggcttacaccaactacttcggacggtgcaatgtggccgagcacgaaaagctgatcctgctggcccagctgaagcccgagaaggatagcgacgaagccgtgacatatagcctgggaaagtttgggcagagggccctggatttctacagcattcatgtgaccaaggagtccacccaccccgtgaagcccctggcccagatcgccggaaacagatacgcctccggacctgtgggaaaggccctgagcgacgcatgtatgggcacaatcgcctccttcctgtctaagtaccaggacatcatcatcgaacaccagaaggtggtgaagggcaaccagaagagactggagagcctgcgggagctggccggcaaggaaaacctggaataccctagcgtgaccctgccacctcagcctcacaccaaggagggcgttgatgcctacaacgaagtgatcgcccgggtgcgaatgtgggtgaacctgaacctgtggcagaagctgaagctaagcagagatgatgccaagcctctgctgagactgaagggattcccttcctttcctctggtcgagagacaggccaacgaagtggactggtgggacatggtgtgtaacgtgaagaagctgatcaacgagaaaaaggaggatggcaaggtgttttggcagaatctggctggctacaagagacaggaagccctgagaccatacctgagcagcgaggaagatcggaagaagggaaagaaattcgctcggtaccagctgggcgacctgctgctgcacctggaaaagaagcacggcgaggactggggaaaggtgtacgacgaggcctgggagcggattgacaagaaagtggaaggcctgagcaagcacatcaagctggaagaggaacggagaagcgaggacgcccagagcaaggccgccctgaccgactggctgcgggctaaggccagcttcgtgatcgagggcctgaaggaggccgacaaggacgagttctgcagatgcgagctgaagctgcagaagtggtacggggacctgcggggaaagcccttcgccatcgaagccgagaacagcatcctggacatcagcggcttcagcaagcagtacaactgtgccttcatctggcagaaggacggcgtgaagaagctgaacctgtacctgatcatcaactacttcaagggcggcaagctgcggttcaagaagatcaaacctgaagccttcgaagccaacagattctacaccgtgatcaacaaaaagagcggcgagatcgtgcccatggaggtgaacttcaacttcgacgaccccaacctgatcatcctgcctctggcctttggcaagagacagggcagagaattcatctggaacgacctgctgtccctggaaaccggcagcctgaagctggccaacggaagagtgatcgagaagacactgtacaacagaagaacccggcaggatgagcctgccctgttcgtggccctgaccttcgagcggcgggaggtcctggactcctccaatatcaaaccaatgaacctgatcggcgtggcaagaggcgaaaacatccccgccgtgatcgccctgaccgaccccgagggctgcccactgagccggtttaaggatagcctgggaaacccaacccacatcctgagaatcggcgagagctataaggagaagcagcggaccatccaggccaagaaggaggtggagcagcggagagccggcggctacagccggaagtacgccagcaaagccaagaatctggcagacgatatggtgagaaacaccgctagagatctgctgtactacgccgtgacccaggatgccatgctgatcttcgccaacctgagccggggcttcggccggcagggcaagcggaccttcatggccgagagacagtacacacggatggaggactggctgaccgccaagctggcctacgagggcctgagcaagacctacctgtccaagacactggcccagtacacctccaagacatgcagcaactgtgggtttaccatcaccagcgccgactacgacagggtgctggagaagctgaagaagacagcaacaggctggatgaccacaattaacggcaaggagctgaaggtggagggccagattacctactacaacagatacaagagacagaacgtagtcaaggacctgtccgtcgagctggatagactgagcgaagaatctgtgaacaacgacatctcctcctggacaaagggcagaagcggagaagctctgagcctcctgaagaaaagattctcccatagacccgtgcaggagaagttcgtgtgcctgaactgcggcttcgagacacacgcagccgagcaagccgccctgaacatcgccagatcctggctgttcctgcggagccaggagtacaagaaataccagacaaacaagacaaccggcaacaccgataagagagccttcgtcgagacctggcagtccttttaccggaagaagcttaaggaggtgtggaaacctgccgtgcggtctggcggatctggcggaggctcctgcagccacaggagctgcagggaggaccccggcaccagcgagagcagggagatggaccccgtggccttcgacgacgtggccgtgaacttcacccaggaggagtgggccctgctggacatcagccagaggaagctgtacagggaggtgatgctggagaccttcaggaacctgaccagcatcggcaagaagtggaaggaccagaacatcgagtacgagtaccagaaccccaggaggaacttcaggggcggcccaagcagcggcgcccctcctcccagcggcggcagcccagccggctccccaacctctaccgaggagggcacctctgagtccgccacccccgagagcggccctggcacctccaccgagcccagcgagggcagcgcacccggcagccctgccggcagccccacctccacagaggagggaaccagcaccgagcccagcgaaggcagcgccccaggcaccagcaccgagcctagtgagcaggagattaaacggatcaacaagatcagaagaagacttgtgaaagacagcaacaccaagaaggccggcaagacaggccccatgaaaaccctgctggttagagtgatgacacccgatctgagagagcggctggaaaacctgagaaagaagcctgaaaatatcccccagcccatcagcaatacatctagagccaacctgaataagctgctgaccgattacaccgaaatgaagaaggcgatcctgcatgtgtactgggaagagttccagaaggaccctgtgggcctgatgagccgggtggcccagcctgccagcaagaagatcgatcagaacaagctgaaacctgagatggacgagaagggcaacctgaccaccgccggctttgcctgctctcagtgtggccagcccctgttcgtgtacaagctggagcaggtgtctgagaagggcaaggcttacaccaactacttcggacggtgcaatgtggccgagcacgaaaagctgatcctgctggcccagctgaagcccgagaaggatagcgacgaagccgtgacatatagcctgggaaagtttgggcagagggccctggatttctacagcattcatgtgaccaaggagtccacccaccccgtgaagcccctggcccagatcgccggaaacagatacgcctccggacctgtgggaaaggccctgagcgacgcatgtatgggcacaatcgcctccttcctgtctaagtaccaggacatcatcatcgaacaccagaaggtggtgaagggcaaccagaagagactggagagcctgcgggagctggccggcaaggaaaacctggaataccctagcgtgaccctgccacctcagcctcacaccaaggagggcgttgatgcctacaacgaagtgatcgcccgggtgcgaatgtgggtgaacctgaacctgtggcagaagctgaagctaagcagagatgatgccaagcctctgctgagactgaagggattcccttcctttcctctggtcgagagacaggccaacgaagtggactggtgggacatggtgtgtaacgtgaagaagctgatcaacgagaaaaaggaggatggcaaggtgttttggcagaatctggctggctacaagagacaggaagccctgagaccatacctgagcagcgaggaagatcggaagaagggaaagaaattcgctcggtaccagctgggcgacctgctgctgcacctggaaaagaagcacggcgaggactggggaaaggtgtacgacgaggcctgggagcggattgacaagaaagtggaaggcctgagcaagcacatcaagctggaagaggaacggagaagcgaggacgcccagagcaaggccgccctgaccgactggctgcgggctaaggccagcttcgtgatcgagggcctgaaggaggccgacaaggacgagttctgcagatgcgagctgaagctgcagaagtggtacggggacctgcggggaaagcccttcgccatcgaagccgagaacagcatcctggacatcagcggcttcagcaagcagtacaactgtgccttcatctggcagaaggacggcgtgaagaagctgaacctgtacctgatcatcaactacttcaagggcggcaagctgcggttcaagaagatcaaacctgaagccttcgaagccaacagattctacaccgtgatcaacaaaaagagcggcgagatcgtgcccatggaggtgaacttcaacttcgacgaccccaacctgatcatcctgcctctggcctttggcaagagacagggcagagaattcatctggaacgacctgctgtccctggaaaccggcagcctgaagctggccaacggaagagtgatcgagaagacactgtacaacagaagaacccggcaggatgagcctgccctgttcgtggccctgaccttcgagcggcgggaggtcctggactcctccaatatcaaaccaatgaacctgatcggcgtggcaagaggcgaaaacatccccgccgtgatcgccctgaccgaccccgagggctgcccactgagccggtttaaggatagcctgggaaacccaacccacatcctgagaatcggcgagagctataaggagaagcagcggaccatccaggccaagaaggaggtggagcagcggagagccggcggctacagccggaagtacgccagcaaagccaagaatctggcagacgatatggtgagaaacaccgctagagatctgctgtactacgccgtgacccaggatgccatgctgatcttcgccaacctgagccggggcttcggccggcagggcaagcggaccttcatggccgagagacagtacacacggatggaggactggctgaccgccaagctggcctacgagggcctgagcaagacctacctgtccaagacactggcccagtacacctccaagacatgcagcaactgtgggtttaccatcaccagcgccgactacgacagggtgctggagaagctgaagaagacagcaacaggctggatgaccacaattaacggcaaggagctgaaggtggagggccagattacctactacaacagatacaagagacagaacgtagtcaaggacctgtccgtcgagctggatagactgagcgaagaatctgtgaacaacgacatctcctcctggacaaagggcagaagcggagaagctctgagcctcctgaagaaaagattctcccatagacccgtgcaggagaagttcgtgtgcctgaactgcggcttcgagacacacgcagccgagcaagccgccctgaacatcgccagatcctggctgttcctgcggagccaggagtacaagaaataccagacaaacaagacaaccggcaacaccgataagagagccttcgtcgagacctggcagtccttttaccggaagaagcttaaggaggtgtggaaacctgccgtgcggtctggcggatctggcggaggctccttgcagccacaggagctgcagggaggaccccggcaccagcgagagcagggagatggaccccgtggccttcgacgacgtggccgtgaacttcacccaggaggagtgggccctgctggacatcagccagaggaagctgtacagggaggtgatgctggagaccttcaggaacctgaccagcatcggcaagaagtggaaggaccagaacatcgagtacgagtaccagaaccccaggaggaacttcaggggatctggctccggcagcggccccaagaaaaagagaaaagtctaagctgccttctgcggggcttgccttctggccatgcccttcttctctcccttgcacctgtacctcttggtctttgaataaagcctgagtaggaaggctagcaaaaaaaaaaaaaaaaaaaaaaaaaaaaaaaaaaaaaaaaaaaaaaaaaaaaaaaaaaaaaaaaaaaaaaaaaaaaaaaa

SEQ ID NO: 16872 - RNA, 9485 nt, synthetic construct
  source 1..9485: mol_type = other RNA
aggaaataagagagaaaagaagagtaagaagaaatataagagccaccatggcccctaagaagaagcgtaaagtgagccggatggaacgcctcgtctacgaggtgcggcagaagtgcagaaacatcgaggacatctgcatctcctgcggatctctgaacgtgaccctggagcacccactgttcatcggcggcatgtgccagaactgtaaaaactgttttctggagtgtgcctatcaatacgacgatgacggctaccagagctactgcaccatctgttgcggcggaagagaggtgctgatgtgtggaaataacaactgctgccggtgcttctgcgtggaatgcgtggacctgctggtgggccccggcgccgcccaggccgctattaaggaagatccttggaactgctacatgtgcggccacaagggcacatacggcctgctgagacggagagaggactggcctagcagactgcagatgttcttcgccaataaccacgaccaggagttcgacccccctaaggtgtaccctcccgtccccgccgagaagagaaagcccatccgggtcctgagcctgttcgatggcatcgccaccggtctgctggtgctgaaggacctgggcatccaggtggataggtacattgcctccgaggtgtgcgaggactccatcaccgtgggaatggtgcgtcatcagggcaagatcatgtacgtgggcgacgtgcggagcgtgacacagaagcatatccaggagtggggccctttcgacctggtgatcggcggcagcccttgcaatgacctgagcatcgtgaacccagcccggaagggcctgtacgagggaaccggcagactgttcttcgagttttacagactgctgcacgacgcccggcctaaggaaggcgacgaccggcccttcttttggctgttcgagaatgtggtggccatgggagtcagcgacaagcgggatattagccggttcctggagagcaaccccgtgatgatcgatgccaaggaagtgagcgccgcccaccgggccagatacttctggggcaatctgcctggcatgaacagacccctggccagcaccgtgaacgacaagctggagctgcaggagtgcctggagcacggccggatcgccaagttcagcaaggtgagaaccatcaccacccgaagcaacagcatcaaacaaggcaaggaccagcactttcctgtgttcatgaacgagaaggaggacatcctgtggtgtaccgagatggagagagtgttcgggttcccagtccactacacagatgtcagcaacatgtctagactggccagacagagactgctgggaagaagctggtccgtccctgtgatcagacacctgttcgcccctctgaaggagtacttcgcctgcgtgagcagcggcaacagcaacgccaacagccggggccccagcttctctagcggcctggtgccactgtccctgagagggagccacatgggccccatggagatctacaaaaccgtgagcgcctggaagcggcagcctgtgcgcgtgctgagcctgtttcggaatatcgataaagtcctgaaaagcctgggattcctggagagcggctctggctccggcggtggcaccctgaagtacgtggaggatgtgacaaacgtggtcagacgggatgtggagaagtggggccccttcgatctggtgtacggcagcacccaacccctgggcagctcttgtgaccggtgccctggctggtacatgtttcagttccaccggatcctgcagtacgccctgccgagacaggagtcccagcggccattcttttggattttcatggacaacttgctgctgaccgaggatgaccaggaaactaccactcggttcctgcagaccgaagccgtgaccctgcaggacgtgagaggccgggactaccagaacgccatgcgggtgtggtccaacatccctggactgaaaagcaagcacgcacctctgacccctaaagaagaggagtacctgcaggcccaggtgcggagcagaagcaagctggacgcccctaaggtggatctgctggtgaagaattgcctcctgcccctgagagagtacttcaagtatttcagccagaatagtctgcccctgggaggcagcggcggcggcgccctggtgacatttgaggacgtcgccgtgcggttcacccaggaggaatgggctctgctggatccttctcagaaaatcctgtaccgggacgtgatgagagagacataccggaatctgacctccgtgggcatcaactgggaatgttgggaccttgaagcctgcttcagaagcctgggaagaaacctgagagtgcaggtggtgaagagaaagtgcgagctgaccaacagcggcccctgcgccgagggcggcccaagcagcggcgcccctcctcccagcggcggcagcccagccggctccccaacctctaccgaggagggcacctctgagtccgccacccccgagagcggccctggcacctccaccgagcccagcgagggcagcgcacccggcagccctgccggcagccccacctccacagaggagggaaccagcaccgagcccagcgaaggcagcgccccaggcaccagcaccgagcctagtgagcaggagattaaacggatcaacaagatcagaagaagacttgtgaaagacagcaacaccaagaaggccggcaagacaggccccatgaaaaccctgctggttagagtgatgacacccgatctgagagagcggctggaaaacctgagaaagaagcctgaaaatatcccccagcccatcagcaatacatctagagccaacctgaataagctgctgaccgattacaccgaaatgaagaaggcgatcctgcatgtgtactgggaagagttccagaaggaccctgtgggcctgatgagccgggtggcccagcctgccagcaagaagatcgatcagaacaagctgaaacctgagatggacgagaagggcaacctgaccaccgccggctttgcctgctctcagtgtggccagcccctgttcgtgtacaagctggagcaggtgtctgagaagggcaaggcttacaccaactacttcggacggtgcaatgtggccgagcacgaaaagctgatcctgctggcccagctgaagcccgagaaggatagcgacgaagccgtgacatatagcctgggaaagtttgggcagagggccctggatttctacagcattcatgtgaccaaggagtccacccaccccgtgaagcccctggcccagatcgccggaaacagatacgcctccggacctgtgggaaaggccctgagcgacgcatgtatgggcacaatcgcctccttcctgtctaagtaccaggacatcatcatcgaacaccagaaggtggtgaagggcaaccagaagagactggagagcctgcgggagctggccggcaaggaaaacctggaataccctagcgtgaccctgccacctcagcctcacaccaaggagggcgttgatgcctacaacgaagtgatcgcccgggtgcgaatgtgggtgaacctgaacctgtggcagaagctgaagctaagcagagatgatgccaagcctctgctgagactgaagggattcccttcctttcctctggtcgagagacaggccaacgaagtggactggtgggacatggtgtgtaacgtgaagaagctgatcaacgagaaaaaggaggatggcaaggtgttttggcagaatctggctggctacaagagacaggaagccctgagaccatacctgagcagcgaggaagatcggaagaagggaaagaaattcgctcggtaccagctgggcgacctgctgctgcacctggaaaagaagcacggcgaggactggggaaaggtgtacgacgaggcctgggagcggattgacaagaaagtggaaggcctgagcaagcacatcaagctggaagaggaacggagaagcgaggacgcccagagcaaggccgccctgaccgactggctgcgggctaaggccagcttcgtgatcgagggcctgaaggaggccgacaaggacgagttctgcagatgcgagctgaagctgcagaagtggtacggggacctgcggggaaagcccttcgccatcgaagccgagaacagcatcctggacatcagcggcttcagcaagcagtacaactgtgccttcatctggcagaaggacggcgtgaagaagctgaacctgtacctgatcatcaactacttcaagggcggcaagctgcggttcaagaagatcaaacctgaagccttcgaagccaacagattctacaccgtgatcaacaaaaagagcggcgagatcgtgcccatggaggtgaacttcaacttcgacgaccccaacctgatcatcctgcctctggcctttggcaagagacagggcagagaattcatctggaacgacctgctgtccctggaaaccggcagcctgaagctggccaacggaagagtgatcgagaagacactgtacaacagaagaacccggcaggatgagcctgccctgttcgtggccctgaccttcgagcggcgggaggtcctggactcctccaatatcaaaccaatgaacctgatcggcgtggcaagaggcgaaaacatccccgccgtgatcgccctgaccgaccccgagggctgcccactgagccggtttaaggatagcctgggaaacccaacccacatcctgagaatcggcgagagctataaggagaagcagcggaccatccaggccaagaaggaggtggagcagcggagagccggcggctacagccggaagtacgccagcaaagccaagaatctggcagacgatatggtgagaaacaccgctagagatctgctgtactacgccgtgacccaggatgccatgctgatcttcgccaacctgagccggggcttcggccggcagggcaagcggaccttcatggccgagagacagtacacacggatggaggactggctgaccgccaagctggcctacgagggcctgagcaagacctacctgtccaagacactggcccagtacacctccaagacatgcagcaactgtgggtttaccatcaccagcgccgactacgacagggtgctggagaagctgaagaagacagcaacaggctggatgaccacaattaacggcaaggagctgaaggtggagggccagattacctactacaacagatacaagagacagaacgtagtcaaggacctgtccgtcgagctggatagactgagcgaagaatctgtgaacaacgacatctcctcctggacaaagggcagaagcggagaagctctgagcctcctgaagaaaagattctcccatagacccgtgcaggagaagttcgtgtgcctgaactgcggcttcgagacacacgcagccgagcaagccgccctgaacatcgccagatcctggctgttcctgcggagccaggagtacaagaaataccagacaaacaagacaaccggcaacaccgataagagagccttcgtcgagacctggcagtccttttaccggaagaagcttaaggaggtgtggaaacctgccgtgcggtctggcggatctggcggaggctccgcccagaggtgggaggccttcgaggacgtggccctgtacttcacccagaaggagtgggagctgctgagggacggcgacaaggtgctgtaccaggagcagatgctgaggaactaccaggccctggtgagcctgggctaccagggccccacccccgacctgatctgcaggatccagaggggcgacatggagctgtgggtgtgcgacgacgaggaccccaaggagagcatgtggagcgagggcctgggcggcccaagcagcggcgcccctcctcccagcggcggcagcccagccggctccccaacctctaccgaggagggcacctctgagtccgccacccccgagagcggccctggcacctccaccgagcccagcgagggcagcgcacccggcagccctgccggcagccccacctccacagaggagggaaccagcaccgagcccagcgaaggcagcgccccaggcaccagcaccgagcctagtgagcaggagattaaacggatcaacaagatcagaagaagacttgtgaaagacagcaacaccaagaaggccggcaagacaggccccatgaaaaccctgctggttagagtgatgacacccgatctgagagagcggctggaaaacctgagaaagaagcctgaaaatatcccccagcccatcagcaatacatctagagccaacctgaataagctgctgaccgattacaccgaaatgaagaaggcgatcctgcatgtgtactgggaagagttccagaaggaccctgtgggcctgatgagccgggtggcccagcctgccagcaagaagatcgatcagaacaagctgaaacctgagatggacgagaagggcaacctgaccaccgccggctttgcctgctctcagtgtggccagcccctgttcgtgtacaagctggagcaggtgtctgagaagggcaaggcttacaccaactacttcggacggtgcaatgtggccgagcacgaaaagctgatcctgctggcccagctgaagcccgagaaggatagcgacgaagccgtgacatatagcctgggaaagtttgggcagagggccctggatttctacagcattcatgtgaccaaggagtccacccaccccgtgaagcccctggcccagatcgccggaaacagatacgcctccggacctgtgggaaaggccctgagcgacgcatgtatgggcacaatcgcctccttcctgtctaagtaccaggacatcatcatcgaacaccagaaggtggtgaagggcaaccagaagagactggagagcctgcgggagctggccggcaaggaaaacctggaataccctagcgtgaccctgccacctcagcctcacaccaaggagggcgttgatgcctacaacgaagtgatcgcccgggtgcgaatgtgggtgaacctgaacctgtggcagaagctgaagctaagcagagatgatgccaagcctctgctgagactgaagggattcccttcctttcctctggtcgagagacaggccaacgaagtggactggtgggacatggtgtgtaacgtgaagaagctgatcaacgagaaaaaggaggatggcaaggtgttttggcagaatctggctggctacaagagacaggaagccctgagaccatacctgagcagcgaggaagatcggaagaagggaaagaaattcgctcggtaccagctgggcgacctgctgctgcacctggaaaagaagcacggcgaggactggggaaaggtgtacgacgaggcctgggagcggattgacaagaaagtggaaggcctgagcaagcacatcaagctggaagaggaacggagaagcgaggacgcccagagcaaggccgccctgaccgactggctgcgggctaaggccagcttcgtgatcgagggcctgaaggaggccgacaaggacgagttctgcagatgcgagctgaagctgcagaagtggtacggggacctgcggggaaagcccttcgccatcgaagccgagaacagcatcctggacatcagcggcttcagcaagcagtacaactgtgccttcatctggcagaaggacggcgtgaagaagctgaacctgtacctgatcatcaactacttcaagggcggcaagctgcggttcaagaagatcaaacctgaagccttcgaagccaacagattctacaccgtgatcaacaaaaagagcggcgagatcgtgcccatggaggtgaacttcaacttcgacgaccccaacctgatcatcctgcctctggcctttggcaagagacagggcagagaattcatctggaacgacctgctgtccctggaaaccggcagcctgaagctggccaacggaagagtgatcgagaagacactgtacaacagaagaacccggcaggatgagcctgccctgttcgtggccctgaccttcgagcggcgggaggtcctggactcctccaatatcaaaccaatgaacctgatcggcgtggcaagaggcgaaaacatccccgccgtgatcgccctgaccgaccccgagggctgcccactgagccggtttaaggatagcctgggaaacccaacccacatcctgagaatcggcgagagctataaggagaagcagcggaccatccaggccaagaaggaggtggagcagcggagagccggcggctacagccggaagtacgccagcaaagccaagaatctggcagacgatatggtgagaaacaccgctagagatctgctgtactacgccgtgacccaggatgccatgctgatcttcgccaacctgagccggggcttcggccggcagggcaagcggaccttcatggccgagagacagtacacacggatggaggactggctgaccgccaagctggcctacgagggcctgagcaagacctacctgtccaagacactggcccagtacacctccaagacatgcagcaactgtgggtttaccatcaccagcgccgactacgacagggtgctggagaagctgaagaagacagcaacaggctggatgaccacaattaacggcaaggagctgaaggtggagggccagattacctactacaacagatacaagagacagaacgtagtcaaggacctgtccgtcgagctggatagactgagcgaagaatctgtgaacaacgacatctcctcctggacaaagggcagaagcggagaagctctgagcctcctgaagaaaagattctcccatagacccgtgcaggagaagttcgtgtgcctgaactgcggcttcgagacacacgcagccgagcaagccgccctgaacatcgccagatcctggctgttcctgcggagccaggagtacaagaaataccagacaaacaagacaaccggcaacaccgataagagagccttcgtcgagacctggcagtccttttaccggaagaagcttaaggaggtgtggaaacctgccgtgcggtctggcggatctggcggaggctcctgcccagaggtgggaggccttcgaggacgtggccctgtacttcacccagaaggagtgggagctgctgagggacggcgacaaggtgctgtaccaggagcagatgctgaggaactaccaggccctggtgagcctgggctaccagggccccacccccgacctgatctgcaggatccagaggggcgacatggagctgtgggtgtgcgacgacgaggaccccaaggagagcatgtggagcgagggcctgggatctggctccggcagcggccccaagaaaaagagaaaagtctaagctgccttctgcggggcttgccttctggccatgcccttcttctctcccttgcacctgtacctcttggtctttgaataaagcctgagtaggaaggctagcaaaaaaaaaaaaaaaaaaaaaaaaaaaaaaaaaaaaaaaaaaaaaaaaaaaaaaaaaaaaaaaaaaaaaaaaaaaaaaaa

SEQ ID NO: 16873 - RNA, 9485 nt, synthetic construct
  source 1..9485: mol_type = other RNA
aggaaataagagagaaaagaagagtaagaagaaatataagagccaccatggcccctaagaagaagcgtaaagtgagccggatggaacgcctcgtctacgaggtgcggcagaagtgcagaaacatcgaggacatctgcatctcctgcggatctctgaacgtgaccctggagcacccactgttcatcggcggcatgtgccagaactgtaaaaactgttttctggagtgtgcctatcaatacgacgatgacggctaccagagctactgcaccatctgttgcggcggaagagaggtgctgatgtgtggaaataacaactgctgccggtgcttctgcgtggaatgcgtggacctgctggtgggccccggcgccgcccaggccgctattaaggaagatccttggaactgctacatgtgcggccacaagggcacatacggcctgctgagacggagagaggactggcctagcagactgcagatgttcttcgccaataaccacgaccaggagttcgacccccctaaggtgtaccctcccgtccccgccgagaagagaaagcccatccgggtcctgagcctgttcgatggcatcgccaccggtctgctggtgctgaaggacctgggcatccaggtggataggtacattgcctccgaggtgtgcgaggactccatcaccgtgggaatggtgcgtcatcagggcaagatcatgtacgtgggcgacgtgcggagcgtgacacagaagcatatccaggagtggggccctttcgacctggtgatcggcggcagcccttgcaatgacctgagcatcgtgaacccagcccggaagggcctgtacgagggaaccggcagactgttcttcgagttttacagactgctgcacgacgcccggcctaaggaaggcgacgaccggcccttcttttggctgttcgagaatgtggtggccatgggagtcagcgacaagcgggatattagccggttcctggagagcaaccccgtgatgatcgatgccaaggaagtgagcgccgcccaccgggccagatacttctggggcaatctgcctggcatgaacagacccctggccagcaccgtgaacgacaagctggagctgcaggagtgcctggagcacggccggatcgccaagttcagcaaggtgagaaccatcaccacccgaagcaacagcatcaaacaaggcaaggaccagcactttcctgtgttcatgaacgagaaggaggacatcctgtggtgtaccgagatggagagagtgttcgggttcccagtccactacacagatgtcagcaacatgtctagactggccagacagagactgctgggaagaagctggtccgtccctgtgatcagacacctgttcgcccctctgaaggagtacttcgcctgcgtgagcagcggcaacagcaacgccaacagccggggccccagcttctctagcggcctggtgccactgtccctgagagggagccacatgggccccatggagatctacaaaaccgtgagcgcctggaagcggcagcctgtgcgcgtgctgagcctgtttcggaatatcgataaagtcctgaaaagcctgggattcctggagagcggctctggctccggcggtggcaccctgaagtacgtggaggatgtgacaaacgtggtcagacgggatgtggagaagtggggccccttcgatctggtgtacggcagcacccaacccctgggcagctcttgtgaccggtgccctggctggtacatgtttcagttccaccggatcctgcagtacgccctgccgagacaggagtcccagcggccattcttttggattttcatggacaacttgctgctgaccgaggatgaccaggaaactaccactcggttcctgcagaccgaagccgtgaccctgcaggacgtgagaggccgggactaccagaacgccatgcgggtgtggtccaacatccctggactgaaaagcaagcacgcacctctgacccctaaagaagaggagtacctgcaggcccaggtgcggagcagaagcaagctggacgcccctaaggtggatctgctggtgaagaattgcctcctgcccctgagagagtacttcaagtatttcagccagaatagtctgcccctgggaggcagcggcggcggcgccctggtgacatttgaggacgtcgccgtgcggttcacccaggaggaatgggctctgctggatccttctcagaaaatcctgtaccgggacgtgatgagagagacataccggaatctgacctccgtgggcatcaactgggaatgttgggaccttgaagcctgcttcagaagcctgggaagaaacctgagagtgcaggtggtgaagagaaagtgcgagctgaccaacagcggcccctgcgccgagggcggcccaagcagcggcgcccctcctcccagcggcggcagcccagccggctccccaacctctaccgaggagggcacctctgagtccgccacccccgagagcggccctggcacctccaccgagcccagcgagggcagcgcacccggcagccctgccggcagccccacctccacagaggagggaaccagcaccgagcccagcgaaggcagcgccccaggcaccagcaccgagcctagtgagcaggagattaaacggatcaacaagatcagaagaagacttgtgaaagacagcaacaccaagaaggccggcaagacaggccccatgaaaaccctgctggttagagtgatgacacccgatctgagagagcggctggaaaacctgagaaagaagcctgaaaatatcccccagcccatcagcaatacatctagagccaacctgaataagctgctgaccgattacaccgaaatgaagaaggcgatcctgcatgtgtactgggaagagttccagaaggaccctgtgggcctgatgagccgggtggcccagcctgccagcaagaagatcgatcagaacaagctgaaacctgagatggacgagaagggcaacctgaccaccgccggctttgcctgctctcagtgtggccagcccctgttcgtgtacaagctggagcaggtgtctgagaagggcaaggcttacaccaactacttcggacggtgcaatgtggccgagcacgaaaagctgatcctgctggcccagctgaagcccgagaaggatagcgacgaagccgtgacatatagcctgggaaagtttgggcagagggccctggatttctacagcattcatgtgaccaaggagtccacccaccccgtgaagcccctggcccagatcgccggaaacagatacgcctccggacctgtgggaaaggccctgagcgacgcatgtatgggcacaatcgcctccttcctgtctaagtaccaggacatcatcatcgaacaccagaaggtggtgaagggcaaccagaagagactggagagcctgcgggagctggccggcaaggaaaacctggaataccctagcgtgaccctgccacctcagcctcacaccaaggagggcgttgatgcctacaacgaagtgatcgcccgggtgcgaatgtgggtgaacctgaacctgtggcagaagctgaagctaagcagagatgatgccaagcctctgctgagactgaagggattcccttcctttcctctggtcgagagacaggccaacgaagtggactggtgggacatggtgtgtaacgtgaagaagctgatcaacgagaaaaaggaggatggcaaggtgttttggcagaatctggctggctacaagagacaggaagccctgagaccatacctgagcagcgaggaagatcggaagaagggaaagaaattcgctcggtaccagctgggcgacctgctgctgcacctggaaaagaagcacggcgaggactggggaaaggtgtacgacgaggcctgggagcggattgacaagaaagtggaaggcctgagcaagcacatcaagctggaagaggaacggagaagcgaggacgcccagagcaaggccgccctgaccgactggctgcgggctaaggccagcttcgtgatcgagggcctgaaggaggccgacaaggacgagttctgcagatgcgagctgaagctgcagaagtggtacggggacctgcggggaaagcccttcgccatcgaagccgagaacagcatcctggacatcagcggcttcagcaagcagtacaactgtgccttcatctggcagaaggacggcgtgaagaagctgaacctgtacctgatcatcaactacttcaagggcggcaagctgcggttcaagaagatcaaacctgaagccttcgaagccaacagattctacaccgtgatcaacaaaaagagcggcgagatcgtgcccatggaggtgaacttcaacttcgacgaccccaacctgatcatcctgcctctggcctttggcaagagacagggcagagaattcatctggaacgacctgctgtccctggaaaccggcagcctgaagctggccaacggaagagtgatcgagaagacactgtacaacagaagaacccggcaggatgagcctgccctgttcgtggccctgaccttcgagcggcgggaggtcctggactcctccaatatcaaaccaatgaacctgatcggcgtggcaagaggcgaaaacatccccgccgtgatcgccctgaccgaccccgagggctgcccactgagccggtttaaggatagcctgggaaacccaacccacatcctgagaatcggcgagagctataaggagaagcagcggaccatccaggccaagaaggaggtggagcagcggagagccggcggctacagccggaagtacgccagcaaagccaagaatctggcagacgatatggtgagaaacaccgctagagatctgctgtactacgccgtgacccaggatgccatgctgatcttcgccaacctgagccggggcttcggccggcagggcaagcggaccttcatggccgagagacagtacacacggatggaggactggctgaccgccaagctggcctacgagggcctgagcaagacctacctgtccaagacactggcccagtacacctccaagacatgcagcaactgtgggtttaccatcaccagcgccgactacgacagggtgctggagaagctgaagaagacagcaacaggctggatgaccacaattaacggcaaggagctgaaggtggagggccagattacctactacaacagatacaagagacagaacgtagtcaaggacctgtccgtcgagctggatagactgagcgaagaatctgtgaacaacgacatctcctcctggacaaagggcagaagcggagaagctctgagcctcctgaagaaaagattctcccatagacccgtgcaggagaagttcgtgtgcctgaactgcggcttcgagacacacgcagccgagcaagccgccctgaacatcgccagatcctggctgttcctgcggagccaggagtacaagaaataccagacaaacaagacaaccggcaacaccgataagagagccttcgtcgagacctggcagtccttttaccggaagaagcttaaggaggtgtggaaacctgccgtgcggtctggcggatctggcggaggctcccccaaggtgcccgtgagcttcgaggacgtggccatgtacttcaccaagaccgagtggaagctgctggacctgaagcagaggatcctgtacaagcaggtgatgctggagaactacggccacctggtgagcctgggcttcgccttcagcaagcccaggctggtgagccagctggagaggggcgagggcccctgggtggccgacagcctgaggggccaggccgaggccgagagccacgccggcgagggcggcccaagcagcggcgcccctcctcccagcggcggcagcccagccggctccccaacctctaccgaggagggcacctctgagtccgccacccccgagagcggccctggcacctccaccgagcccagcgagggcagcgcacccggcagccctgccggcagccccacctccacagaggagggaaccagcaccgagcccagcgaaggcagcgccccaggcaccagcaccgagcctagtgagcaggagattaaacggatcaacaagatcagaagaagacttgtgaaagacagcaacaccaagaaggccggcaagacaggccccatgaaaaccctgctggttagagtgatgacacccgatctgagagagcggctggaaaacctgagaaagaagcctgaaaatatcccccagcccatcagcaatacatctagagccaacctgaataagctgctgaccgattacaccgaaatgaagaaggcgatcctgcatgtgtactgggaagagttccagaaggaccctgtgggcctgatgagccgggtggcccagcctgccagcaagaagatcgatcagaacaagctgaaacctgagatggacgagaagggcaacctgaccaccgccggctttgcctgctctcagtgtggccagcccctgttcgtgtacaagctggagcaggtgtctgagaagggcaaggcttacaccaactacttcggacggtgcaatgtggccgagcacgaaaagctgatcctgctggcccagctgaagcccgagaaggatagcgacgaagccgtgacatatagcctgggaaagtttgggcagagggccctggatttctacagcattcatgtgaccaaggagtccacccaccccgtgaagcccctggcccagatcgccggaaacagatacgcctccggacctgtgggaaaggccctgagcgacgcatgtatgggcacaatcgcctccttcctgtctaagtaccaggacatcatcatcgaacaccagaaggtggtgaagggcaaccagaagagactggagagcctgcgggagctggccggcaaggaaaacctggaataccctagcgtgaccctgccacctcagcctcacaccaaggagggcgttgatgcctacaacgaagtgatcgcccgggtgcgaatgtgggtgaacctgaacctgtggcagaagctgaagctaagcagagatgatgccaagcctctgctgagactgaagggattcccttcctttcctctggtcgagagacaggccaacgaagtggactggtgggacatggtgtgtaacgtgaagaagctgatcaacgagaaaaaggaggatggcaaggtgttttggcagaatctggctggctacaagagacaggaagccctgagaccatacctgagcagcgaggaagatcggaagaagggaaagaaattcgctcggtaccagctgggcgacctgctgctgcacctggaaaagaagcacggcgaggactggggaaaggtgtacgacgaggcctgggagcggattgacaagaaagtggaaggcctgagcaagcacatcaagctggaagaggaacggagaagcgaggacgcccagagcaaggccgccctgaccgactggctgcgggctaaggccagcttcgtgatcgagggcctgaaggaggccgacaaggacgagttctgcagatgcgagctgaagctgcagaagtggtacggggacctgcggggaaagcccttcgccatcgaagccgagaacagcatcctggacatcagcggcttcagcaagcagtacaactgtgccttcatctggcagaaggacggcgtgaagaagctgaacctgtacctgatcatcaactacttcaagggcggcaagctgcggttcaagaagatcaaacctgaagccttcgaagccaacagattctacaccgtgatcaacaaaaagagcggcgagatcgtgcccatggaggtgaacttcaacttcgacgaccccaacctgatcatcctgcctctggcctttggcaagagacagggcagagaattcatctggaacgacctgctgtccctggaaaccggcagcctgaagctggccaacggaagagtgatcgagaagacactgtacaacagaagaacccggcaggatgagcctgccctgttcgtggccctgaccttcgagcggcgggaggtcctggactcctccaatatcaaaccaatgaacctgatcggcgtggcaagaggcgaaaacatccccgccgtgatcgccctgaccgaccccgagggctgcccactgagccggtttaaggatagcctgggaaacccaacccacatcctgagaatcggcgagagctataaggagaagcagcggaccatccaggccaagaaggaggtggagcagcggagagccggcggctacagccggaagtacgccagcaaagccaagaatctggcagacgatatggtgagaaacaccgctagagatctgctgtactacgccgtgacccaggatgccatgctgatcttcgccaacctgagccggggcttcggccggcagggcaagcggaccttcatggccgagagacagtacacacggatggaggactggctgaccgccaagctggcctacgagggcctgagcaagacctacctgtccaagacactggcccagtacacctccaagacatgcagcaactgtgggtttaccatcaccagcgccgactacgacagggtgctggagaagctgaagaagacagcaacaggctggatgaccacaattaacggcaaggagctgaaggtggagggccagattacctactacaacagatacaagagacagaacgtagtcaaggacctgtccgtcgagctggatagactgagcgaagaatctgtgaacaacgacatctcctcctggacaaagggcagaagcggagaagctctgagcctcctgaagaaaagattctcccatagacccgtgcaggagaagttcgtgtgcctgaactgcggcttcgagacacacgcagccgagcaagccgccctgaacatcgccagatcctggctgttcctgcggagccaggagtacaagaaataccagacaaacaagacaaccggcaacaccgataagagagccttcgtcgagacctggcagtccttttaccggaagaagcttaaggaggtgtggaaacctgccgtgcggtctggcggatctggcggaggctcctcccaaggtgcccgtgagcttcgaggacgtggccatgtacttcaccaagaccgagtggaagctgctggacctgaagcagaggatcctgtacaagcaggtgatgctggagaactacggccacctggtgagcctgggcttcgccttcagcaagcccaggctggtgagccagctggagaggggcgagggcccctgggtggccgacagcctgaggggccaggccgaggccgagagccacgccggcgagggatctggctccggcagcggccccaagaaaaagagaaaagtctaagctgccttctgcggggcttgccttctggccatgcccttcttctctcccttgcacctgtacctcttggtctttgaataaagcctgagtaggaaggctagcaaaaaaaaaaaaaaaaaaaaaaaaaaaaaaaaaaaaaaaaaaaaaaaaaaaaaaaaaaaaaaaaaaaaaaaaaaaaaaaa

SEQ ID NO: 16874 - RNA, 9485 nt, synthetic construct
  source 1..9485: mol_type = other RNA
aggaaataagagagaaaagaagagtaagaagaaatataagagccaccatggcccctaagaagaagcgtaaagtgagccggatggaacgcctcgtctacgaggtgcggcagaagtgcagaaacatcgaggacatctgcatctcctgcggatctctgaacgtgaccctggagcacccactgttcatcggcggcatgtgccagaactgtaaaaactgttttctggagtgtgcctatcaatacgacgatgacggctaccagagctactgcaccatctgttgcggcggaagagaggtgctgatgtgtggaaataacaactgctgccggtgcttctgcgtggaatgcgtggacctgctggtgggccccggcgccgcccaggccgctattaaggaagatccttggaactgctacatgtgcggccacaagggcacatacggcctgctgagacggagagaggactggcctagcagactgcagatgttcttcgccaataaccacgaccaggagttcgacccccctaaggtgtaccctcccgtccccgccgagaagagaaagcccatccgggtcctgagcctgttcgatggcatcgccaccggtctgctggtgctgaaggacctgggcatccaggtggataggtacattgcctccgaggtgtgcgaggactccatcaccgtgggaatggtgcgtcatcagggcaagatcatgtacgtgggcgacgtgcggagcgtgacacagaagcatatccaggagtggggccctttcgacctggtgatcggcggcagcccttgcaatgacctgagcatcgtgaacccagcccggaagggcctgtacgagggaaccggcagactgttcttcgagttttacagactgctgcacgacgcccggcctaaggaaggcgacgaccggcccttcttttggctgttcgagaatgtggtggccatgggagtcagcgacaagcgggatattagccggttcctggagagcaaccccgtgatgatcgatgccaaggaagtgagcgccgcccaccgggccagatacttctggggcaatctgcctggcatgaacagacccctggccagcaccgtgaacgacaagctggagctgcaggagtgcctggagcacggccggatcgccaagttcagcaaggtgagaaccatcaccacccgaagcaacagcatcaaacaaggcaaggaccagcactttcctgtgttcatgaacgagaaggaggacatcctgtggtgtaccgagatggagagagtgttcgggttcccagtccactacacagatgtcagcaacatgtctagactggccagacagagactgctgggaagaagctggtccgtccctgtgatcagacacctgttcgcccctctgaaggagtacttcgcctgcgtgagcagcggcaacagcaacgccaacagccggggccccagcttctctagcggcctggtgccactgtccctgagagggagccacatgggccccatggagatctacaaaaccgtgagcgcctggaagcggcagcctgtgcgcgtgctgagcctgtttcggaatatcgataaagtcctgaaaagcctgggattcctggagagcggctctggctccggcggtggcaccctgaagtacgtggaggatgtgacaaacgtggtcagacgggatgtggagaagtggggccccttcgatctggtgtacggcagcacccaacccctgggcagctcttgtgaccggtgccctggctggtacatgtttcagttccaccggatcctgcagtacgccctgccgagacaggagtcccagcggccattcttttggattttcatggacaacttgctgctgaccgaggatgaccaggaaactaccactcggttcctgcagaccgaagccgtgaccctgcaggacgtgagaggccgggactaccagaacgccatgcgggtgtggtccaacatccctggactgaaaagcaagcacgcacctctgacccctaaagaagaggagtacctgcaggcccaggtgcggagcagaagcaagctggacgcccctaaggtggatctgctggtgaagaattgcctcctgcccctgagagagtacttcaagtatttcagccagaatagtctgcccctgggaggcagcggcggcggcgccctggtgacatttgaggacgtcgccgtgcggttcacccaggaggaatgggctctgctggatccttctcagaaaatcctgtaccgggacgtgatgagagagacataccggaatctgacctccgtgggcatcaactgggaatgttgggaccttgaagcctgcttcagaagcctgggaagaaacctgagagtgcaggtggtgaagagaaagtgcgagctgaccaacagcggcccctgcgccgagggcggcccaagcagcggcgcccctcctcccagcggcggcagcccagccggctccccaacctctaccgaggagggcacctctgagtccgccacccccgagagcggccctggcacctccaccgagcccagcgagggcagcgcacccggcagccctgccggcagccccacctccacagaggagggaaccagcaccgagcccagcgaaggcagcgccccaggcaccagcaccgagcctagtgagcaggagattaaacggatcaacaagatcagaagaagacttgtgaaagacagcaacaccaagaaggccggcaagacaggccccatgaaaaccctgctggttagagtgatgacacccgatctgagagagcggctggaaaacctgagaaagaagcctgaaaatatcccccagcccatcagcaatacatctagagccaacctgaataagctgctgaccgattacaccgaaatgaagaaggcgatcctgcatgtgtactgggaagagttccagaaggaccctgtgggcctgatgagccgggtggcccagcctgccagcaagaagatcgatcagaacaagctgaaacctgagatggacgagaagggcaacctgaccaccgccggctttgcctgctctcagtgtggccagcccctgttcgtgtacaagctggagcaggtgtctgagaagggcaaggcttacaccaactacttcggacggtgcaatgtggccgagcacgaaaagctgatcctgctggcccagctgaagcccgagaaggatagcgacgaagccgtgacatatagcctgggaaagtttgggcagagggccctggatttctacagcattcatgtgaccaaggagtccacccaccccgtgaagcccctggcccagatcgccggaaacagatacgcctccggacctgtgggaaaggccctgagcgacgcatgtatgggcacaatcgcctccttcctgtctaagtaccaggacatcatcatcgaacaccagaaggtggtgaagggcaaccagaagagactggagagcctgcgggagctggccggcaaggaaaacctggaataccctagcgtgaccctgccacctcagcctcacaccaaggagggcgttgatgcctacaacgaagtgatcgcccgggtgcgaatgtgggtgaacctgaacctgtggcagaagctgaagctaagcagagatgatgccaagcctctgctgagactgaagggattcccttcctttcctctggtcgagagacaggccaacgaagtggactggtgggacatggtgtgtaacgtgaagaagctgatcaacgagaaaaaggaggatggcaaggtgttttggcagaatctggctggctacaagagacaggaagccctgagaccatacctgagcagcgaggaagatcggaagaagggaaagaaattcgctcggtaccagctgggcgacctgctgctgcacctggaaaagaagcacggcgaggactggggaaaggtgtacgacgaggcctgggagcggattgacaagaaagtggaaggcctgagcaagcacatcaagctggaagaggaacggagaagcgaggacgcccagagcaaggccgccctgaccgactggctgcgggctaaggccagcttcgtgatcgagggcctgaaggaggccgacaaggacgagttctgcagatgcgagctgaagctgcagaagtggtacggggacctgcggggaaagcccttcgccatcgaagccgagaacagcatcctggacatcagcggcttcagcaagcagtacaactgtgccttcatctggcagaaggacggcgtgaagaagctgaacctgtacctgatcatcaactacttcaagggcggcaagctgcggttcaagaagatcaaacctgaagccttcgaagccaacagattctacaccgtgatcaacaaaaagagcggcgagatcgtgcccatggaggtgaacttcaacttcgacgaccccaacctgatcatcctgcctctggcctttggcaagagacagggcagagaattcatctggaacgacctgctgtccctggaaaccggcagcctgaagctggccaacggaagagtgatcgagaagacactgtacaacagaagaacccggcaggatgagcctgccctgttcgtggccctgaccttcgagcggcgggaggtcctggactcctccaatatcaaaccaatgaacctgatcggcgtggcaagaggcgaaaacatccccgccgtgatcgccctgaccgaccccgagggctgcccactgagccggtttaaggatagcctgggaaacccaacccacatcctgagaatcggcgagagctataaggagaagcagcggaccatccaggccaagaaggaggtggagcagcggagagccggcggctacagccggaagtacgccagcaaagccaagaatctggcagacgatatggtgagaaacaccgctagagatctgctgtactacgccgtgacccaggatgccatgctgatcttcgccaacctgagccggggcttcggccggcagggcaagcggaccttcatggccgagagacagtacacacggatggaggactggctgaccgccaagctggcctacgagggcctgagcaagacctacctgtccaagacactggcccagtacacctccaagacatgcagcaactgtgggtttaccatcaccagcgccgactacgacagggtgctggagaagctgaagaagacagcaacaggctggatgaccacaattaacggcaaggagctgaaggtggagggccagattacctactacaacagatacaagagacagaacgtagtcaaggacctgtccgtcgagctggatagactgagcgaagaatctgtgaacaacgacatctcctcctggacaaagggcagaagcggagaagctctgagcctcctgaagaaaagattctcccatagacccgtgcaggagaagttcgtgtgcctgaactgcggcttcgagacacacgcagccgagcaagccgccctgaacatcgccagatcctggctgttcctgcggagccaggagtacaagaaataccagacaaacaagacaaccggcaacaccgataagagagccttcgtcgagacctggcagtccttttaccggaagaagcttaaggaggtgtggaaacctgccgtgcggtctggcggatctggcggaggctccagccagggcagcgtgagcttcaaggacgtgaccgtgggcttcacccaggaggagtggcagcacctggaccccagccagaagagcctgtacagggacgtgatgctggagaactacagccacctggtgagcgtgggctactgcgtgaccaagcccgagctgatcttcaggctggagcagggcgaggagccctgggtgctggaggaggagttccccaggcccggcttcctggagttctggaagaccggcggcccaagcagcggcgcccctcctcccagcggcggcagcccagccggctccccaacctctaccgaggagggcacctctgagtccgccacccccgagagcggccctggcacctccaccgagcccagcgagggcagcgcacccggcagccctgccggcagccccacctccacagaggagggaaccagcaccgagcccagcgaaggcagcgccccaggcaccagcaccgagcctagtgagcaggagattaaacggatcaacaagatcagaagaagacttgtgaaagacagcaacaccaagaaggccggcaagacaggccccatgaaaaccctgctggttagagtgatgacacccgatctgagagagcggctggaaaacctgagaaagaagcctgaaaatatcccccagcccatcagcaatacatctagagccaacctgaataagctgctgaccgattacaccgaaatgaagaaggcgatcctgcatgtgtactgggaagagttccagaaggaccctgtgggcctgatgagccgggtggcccagcctgccagcaagaagatcgatcagaacaagctgaaacctgagatggacgagaagggcaacctgaccaccgccggctttgcctgctctcagtgtggccagcccctgttcgtgtacaagctggagcaggtgtctgagaagggcaaggcttacaccaactacttcggacggtgcaatgtggccgagcacgaaaagctgatcctgctggcccagctgaagcccgagaaggatagcgacgaagccgtgacatatagcctgggaaagtttgggcagagggccctggatttctacagcattcatgtgaccaaggagtccacccaccccgtgaagcccctggcccagatcgccggaaacagatacgcctccggacctgtgggaaaggccctgagcgacgcatgtatgggcacaatcgcctccttcctgtctaagtaccaggacatcatcatcgaacaccagaaggtggtgaagggcaaccagaagagactggagagcctgcgggagctggccggcaaggaaaacctggaataccctagcgtgaccctgccacctcagcctcacaccaaggagggcgttgatgcctacaacgaagtgatcgcccgggtgcgaatgtgggtgaacctgaacctgtggcagaagctgaagctaagcagagatgatgccaagcctctgctgagactgaagggattcccttcctttcctctggtcgagagacaggccaacgaagtggactggtgggacatggtgtgtaacgtgaagaagctgatcaacgagaaaaaggaggatggcaaggtgttttggcagaatctggctggctacaagagacaggaagccctgagaccatacctgagcagcgaggaagatcggaagaagggaaagaaattcgctcggtaccagctgggcgacctgctgctgcacctggaaaagaagcacggcgaggactggggaaaggtgtacgacgaggcctgggagcggattgacaagaaagtggaaggcctgagcaagcacatcaagctggaagaggaacggagaagcgaggacgcccagagcaaggccgccctgaccgactggctgcgggctaaggccagcttcgtgatcgagggcctgaaggaggccgacaaggacgagttctgcagatgcgagctgaagctgcagaagtggtacggggacctgcggggaaagcccttcgccatcgaagccgagaacagcatcctggacatcagcggcttcagcaagcagtacaactgtgccttcatctggcagaaggacggcgtgaagaagctgaacctgtacctgatcatcaactacttcaagggcggcaagctgcggttcaagaagatcaaacctgaagccttcgaagccaacagattctacaccgtgatcaacaaaaagagcggcgagatcgtgcccatggaggtgaacttcaacttcgacgaccccaacctgatcatcctgcctctggcctttggcaagagacagggcagagaattcatctggaacgacctgctgtccctggaaaccggcagcctgaagctggccaacggaagagtgatcgagaagacactgtacaacagaagaacccggcaggatgagcctgccctgttcgtggccctgaccttcgagcggcgggaggtcctggactcctccaatatcaaaccaatgaacctgatcggcgtggcaagaggcgaaaacatccccgccgtgatcgccctgaccgaccccgagggctgcccactgagccggtttaaggatagcctgggaaacccaacccacatcctgagaatcggcgagagctataaggagaagcagcggaccatccaggccaagaaggaggtggagcagcggagagccggcggctacagccggaagtacgccagcaaagccaagaatctggcagacgatatggtgagaaacaccgctagagatctgctgtactacgccgtgacccaggatgccatgctgatcttcgccaacctgagccggggcttcggccggcagggcaagcggaccttcatggccgagagacagtacacacggatggaggactggctgaccgccaagctggcctacgagggcctgagcaagacctacctgtccaagacactggcccagtacacctccaagacatgcagcaactgtgggtttaccatcaccagcgccgactacgacagggtgctggagaagctgaagaagacagcaacaggctggatgaccacaattaacggcaaggagctgaaggtggagggccagattacctactacaacagatacaagagacagaacgtagtcaaggacctgtccgtcgagctggatagactgagcgaagaatctgtgaacaacgacatctcctcctggacaaagggcagaagcggagaagctctgagcctcctgaagaaaagattctcccatagacccgtgcaggagaagttcgtgtgcctgaactgcggcttcgagacacacgcagccgagcaagccgccctgaacatcgccagatcctggctgttcctgcggagccaggagtacaagaaataccagacaaacaagacaaccggcaacaccgataagagagccttcgtcgagacctggcagtccttttaccggaagaagcttaaggaggtgtggaaacctgccgtgcggtctggcggatctggcggaggctcctagccagggcagcgtgagcttcaaggacgtgaccgtgggcttcacccaggaggagtggcagcacctggaccccagccagaagagcctgtacagggacgtgatgctggagaactacagccacctggtgagcgtgggctactgcgtgaccaagcccgagctgatcttcaggctggagcagggcgaggagccctgggtgctggaggaggagttccccaggcccggcttcctggagttctggaagaccggatctggctccggcagcggccccaagaaaaagagaaaagtctaagctgccttctgcggggcttgccttctggccatgcccttcttctctcccttgcacctgtacctcttggtctttgaataaagcctgagtaggaaggctagcaaaaaaaaaaaaaaaaaaaaaaaaaaaaaaaaaaaaaaaaaaaaaaaaaaaaaaaaaaaaaaaaaaaaaaaaaaaaaaaa

SEQ ID NO: 16875 - RNA, 9485 nt, synthetic construct
  source 1..9485: mol_type = other RNA
aggaaataagagagaaaagaagagtaagaagaaatataagagccaccatggcccctaagaagaagcgtaaagtgagccggatggaacgcctcgtctacgaggtgcggcagaagtgcagaaacatcgaggacatctgcatctcctgcggatctctgaacgtgaccctggagcacccactgttcatcggcggcatgtgccagaactgtaaaaactgttttctggagtgtgcctatcaatacgacgatgacggctaccagagctactgcaccatctgttgcggcggaagagaggtgctgatgtgtggaaataacaactgctgccggtgcttctgcgtggaatgcgtggacctgctggtgggccccggcgccgcccaggccgctattaaggaagatccttggaactgctacatgtgcggccacaagggcacatacggcctgctgagacggagagaggactggcctagcagactgcagatgttcttcgccaataaccacgaccaggagttcgacccccctaaggtgtaccctcccgtccccgccgagaagagaaagcccatccgggtcctgagcctgttcgatggcatcgccaccggtctgctggtgctgaaggacctgggcatccaggtggataggtacattgcctccgaggtgtgcgaggactccatcaccgtgggaatggtgcgtcatcagggcaagatcatgtacgtgggcgacgtgcggagcgtgacacagaagcatatccaggagtggggccctttcgacctggtgatcggcggcagcccttgcaatgacctgagcatcgtgaacccagcccggaagggcctgtacgagggaaccggcagactgttcttcgagttttacagactgctgcacgacgcccggcctaaggaaggcgacgaccggcccttcttttggctgttcgagaatgtggtggccatgggagtcagcgacaagcgggatattagccggttcctggagagcaaccccgtgatgatcgatgccaaggaagtgagcgccgcccaccgggccagatacttctggggcaatctgcctggcatgaacagacccctggccagcaccgtgaacgacaagctggagctgcaggagtgcctggagcacggccggatcgccaagttcagcaaggtgagaaccatcaccacccgaagcaacagcatcaaacaaggcaaggaccagcactttcctgtgttcatgaacgagaaggaggacatcctgtggtgtaccgagatggagagagtgttcgggttcccagtccactacacagatgtcagcaacatgtctagactggccagacagagactgctgggaagaagctggtccgtccctgtgatcagacacctgttcgcccctctgaaggagtacttcgcctgcgtgagcagcggcaacagcaacgccaacagccggggccccagcttctctagcggcctggtgccactgtccctgagagggagccacatgggccccatggagatctacaaaaccgtgagcgcctggaagcggcagcctgtgcgcgtgctgagcctgtttcggaatatcgataaagtcctgaaaagcctgggattcctggagagcggctctggctccggcggtggcaccctgaagtacgtggaggatgtgacaaacgtggtcagacgggatgtggagaagtggggccccttcgatctggtgtacggcagcacccaacccctgggcagctcttgtgaccggtgccctggctggtacatgtttcagttccaccggatcctgcagtacgccctgccgagacaggagtcccagcggccattcttttggattttcatggacaacttgctgctgaccgaggatgaccaggaaactaccactcggttcctgcagaccgaagccgtgaccctgcaggacgtgagaggccgggactaccagaacgccatgcgggtgtggtccaacatccctggactgaaaagcaagcacgcacctctgacccctaaagaagaggagtacctgcaggcccaggtgcggagcagaagcaagctggacgcccctaaggtggatctgctggtgaagaattgcctcctgcccctgagagagtacttcaagtatttcagccagaatagtctgcccctgggaggcagcggcggcggcgccctggtgacatttgaggacgtcgccgtgcggttcacccaggaggaatgggctctgctggatccttctcagaaaatcctgtaccgggacgtgatgagagagacataccggaatctgacctccgtgggcatcaactgggaatgttgggaccttgaagcctgcttcagaagcctgggaagaaacctgagagtgcaggtggtgaagagaaagtgcgagctgaccaacagcggcccctgcgccgagggcggcccaagcagcggcgcccctcctcccagcggcggcagcccagccggctccccaacctctaccgaggagggcacctctgagtccgccacccccgagagcggccctggcacctccaccgagcccagcgagggcagcgcacccggcagccctgccggcagccccacctccacagaggagggaaccagcaccgagcccagcgaaggcagcgccccaggcaccagcaccgagcctagtgagcaggagattaaacggatcaacaagatcagaagaagacttgtgaaagacagcaacaccaagaaggccggcaagacaggccccatgaaaaccctgctggttagagtgatgacacccgatctgagagagcggctggaaaacctgagaaagaagcctgaaaatatcccccagcccatcagcaatacatctagagccaacctgaataagctgctgaccgattacaccgaaatgaagaaggcgatcctgcatgtgtactgggaagagttccagaaggaccctgtgggcctgatgagccgggtggcccagcctgccagcaagaagatcgatcagaacaagctgaaacctgagatggacgagaagggcaacctgaccaccgccggctttgcctgctctcagtgtggccagcccctgttcgtgtacaagctggagcaggtgtctgagaagggcaaggcttacaccaactacttcggacggtgcaatgtggccgagcacgaaaagctgatcctgctggcccagctgaagcccgagaaggatagcgacgaagccgtgacatatagcctgggaaagtttgggcagagggccctggatttctacagcattcatgtgaccaaggagtccacccaccccgtgaagcccctggcccagatcgccggaaacagatacgcctccggacctgtgggaaaggccctgagcgacgcatgtatgggcacaatcgcctccttcctgtctaagtaccaggacatcatcatcgaacaccagaaggtggtgaagggcaaccagaagagactggagagcctgcgggagctggccggcaaggaaaacctggaataccctagcgtgaccctgccacctcagcctcacaccaaggagggcgttgatgcctacaacgaagtgatcgcccgggtgcgaatgtgggtgaacctgaacctgtggcagaagctgaagctaagcagagatgatgccaagcctctgctgagactgaagggattcccttcctttcctctggtcgagagacaggccaacgaagtggactggtgggacatggtgtgtaacgtgaagaagctgatcaacgagaaaaaggaggatggcaaggtgttttggcagaatctggctggctacaagagacaggaagccctgagaccatacctgagcagcgaggaagatcggaagaagggaaagaaattcgctcggtaccagctgggcgacctgctgctgcacctggaaaagaagcacggcgaggactggggaaaggtgtacgacgaggcctgggagcggattgacaagaaagtggaaggcctgagcaagcacatcaagctggaagaggaacggagaagcgaggacgcccagagcaaggccgccctgaccgactggctgcgggctaaggccagcttcgtgatcgagggcctgaaggaggccgacaaggacgagttctgcagatgcgagctgaagctgcagaagtggtacggggacctgcggggaaagcccttcgccatcgaagccgagaacagcatcctggacatcagcggcttcagcaagcagtacaactgtgccttcatctggcagaaggacggcgtgaagaagctgaacctgtacctgatcatcaactacttcaagggcggcaagctgcggttcaagaagatcaaacctgaagccttcgaagccaacagattctacaccgtgatcaacaaaaagagcggcgagatcgtgcccatggaggtgaacttcaacttcgacgaccccaacctgatcatcctgcctctggcctttggcaagagacagggcagagaattcatctggaacgacctgctgtccctggaaaccggcagcctgaagctggccaacggaagagtgatcgagaagacactgtacaacagaagaacccggcaggatgagcctgccctgttcgtggccctgaccttcgagcggcgggaggtcctggactcctccaatatcaaaccaatgaacctgatcggcgtggcaagaggcgaaaacatccccgccgtgatcgccctgaccgaccccgagggctgcccactgagccggtttaaggatagcctgggaaacccaacccacatcctgagaatcggcgagagctataaggagaagcagcggaccatccaggccaagaaggaggtggagcagcggagagccggcggctacagccggaagtacgccagcaaagccaagaatctggcagacgatatggtgagaaacaccgctagagatctgctgtactacgccgtgacccaggatgccatgctgatcttcgccaacctgagccggggcttcggccggcagggcaagcggaccttcatggccgagagacagtacacacggatggaggactggctgaccgccaagctggcctacgagggcctgagcaagacctacctgtccaagacactggcccagtacacctccaagacatgcagcaactgtgggtttaccatcaccagcgccgactacgacagggtgctggagaagctgaagaagacagcaacaggctggatgaccacaattaacggcaaggagctgaaggtggagggccagattacctactacaacagatacaagagacagaacgtagtcaaggacctgtccgtcgagctggatagactgagcgaagaatctgtgaacaacgacatctcctcctggacaaagggcagaagcggagaagctctgagcctcctgaagaaaagattctcccatagacccgtgcaggagaagttcgtgtgcctgaactgcggcttcgagacacacgcagccgagcaagccgccctgaacatcgccagatcctggctgttcctgcggagccaggagtacaagaaataccagacaaacaagacaaccggcaacaccgataagagagccttcgtcgagacctggcagtccttttaccggaagaagcttaaggaggtgtggaaacctgccgtgcggtctggcggatctggcggaggctccatgggcctgctgaccttcagggacgtggccatcgagttcagcctggaggagtggcagtgcctggacaccgcccagcagaacctgtacaggaacgtgatgctggagaactacaggaacctggccttcctgggcatcgccgtgagcaagcccgacctgatcacctgcctggagcagggcaaggagccctggaacatgaagaggcacgagatggtggacgagccccccggcgtgtgcccccacttcggcggcccaagcagcggcgcccctcctcccagcggcggcagcccagccggctccccaacctctaccgaggagggcacctctgagtccgccacccccgagagcggccctggcacctccaccgagcccagcgagggcagcgcacccggcagccctgccggcagccccacctccacagaggagggaaccagcaccgagcccagcgaaggcagcgccccaggcaccagcaccgagcctagtgagcaggagattaaacggatcaacaagatcagaagaagacttgtgaaagacagcaacaccaagaaggccggcaagacaggccccatgaaaaccctgctggttagagtgatgacacccgatctgagagagcggctggaaaacctgagaaagaagcctgaaaatatcccccagcccatcagcaatacatctagagccaacctgaataagctgctgaccgattacaccgaaatgaagaaggcgatcctgcatgtgtactgggaagagttccagaaggaccctgtgggcctgatgagccgggtggcccagcctgccagcaagaagatcgatcagaacaagctgaaacctgagatggacgagaagggcaacctgaccaccgccggctttgcctgctctcagtgtggccagcccctgttcgtgtacaagctggagcaggtgtctgagaagggcaaggcttacaccaactacttcggacggtgcaatgtggccgagcacgaaaagctgatcctgctggcccagctgaagcccgagaaggatagcgacgaagccgtgacatatagcctgggaaagtttgggcagagggccctggatttctacagcattcatgtgaccaaggagtccacccaccccgtgaagcccctggcccagatcgccggaaacagatacgcctccggacctgtgggaaaggccctgagcgacgcatgtatgggcacaatcgcctccttcctgtctaagtaccaggacatcatcatcgaacaccagaaggtggtgaagggcaaccagaagagactggagagcctgcgggagctggccggcaaggaaaacctggaataccctagcgtgaccctgccacctcagcctcacaccaaggagggcgttgatgcctacaacgaagtgatcgcccgggtgcgaatgtgggtgaacctgaacctgtggcagaagctgaagctaagcagagatgatgccaagcctctgctgagactgaagggattcccttcctttcctctggtcgagagacaggccaacgaagtggactggtgggacatggtgtgtaacgtgaagaagctgatcaacgagaaaaaggaggatggcaaggtgttttggcagaatctggctggctacaagagacaggaagccctgagaccatacctgagcagcgaggaagatcggaagaagggaaagaaattcgctcggtaccagctgggcgacctgctgctgcacctggaaaagaagcacggcgaggactggggaaaggtgtacgacgaggcctgggagcggattgacaagaaagtggaaggcctgagcaagcacatcaagctggaagaggaacggagaagcgaggacgcccagagcaaggccgccctgaccgactggctgcgggctaaggccagcttcgtgatcgagggcctgaaggaggccgacaaggacgagttctgcagatgcgagctgaagctgcagaagtggtacggggacctgcggggaaagcccttcgccatcgaagccgagaacagcatcctggacatcagcggcttcagcaagcagtacaactgtgccttcatctggcagaaggacggcgtgaagaagctgaacctgtacctgatcatcaactacttcaagggcggcaagctgcggttcaagaagatcaaacctgaagccttcgaagccaacagattctacaccgtgatcaacaaaaagagcggcgagatcgtgcccatggaggtgaacttcaacttcgacgaccccaacctgatcatcctgcctctggcctttggcaagagacagggcagagaattcatctggaacgacctgctgtccctggaaaccggcagcctgaagctggccaacggaagagtgatcgagaagacactgtacaacagaagaacccggcaggatgagcctgccctgttcgtggccctgaccttcgagcggcgggaggtcctggactcctccaatatcaaaccaatgaacctgatcggcgtggcaagaggcgaaaacatccccgccgtgatcgccctgaccgaccccgagggctgcccactgagccggtttaaggatagcctgggaaacccaacccacatcctgagaatcggcgagagctataaggagaagcagcggaccatccaggccaagaaggaggtggagcagcggagagccggcggctacagccggaagtacgccagcaaagccaagaatctggcagacgatatggtgagaaacaccgctagagatctgctgtactacgccgtgacccaggatgccatgctgatcttcgccaacctgagccggggcttcggccggcagggcaagcggaccttcatggccgagagacagtacacacggatggaggactggctgaccgccaagctggcctacgagggcctgagcaagacctacctgtccaagacactggcccagtacacctccaagacatgcagcaactgtgggtttaccatcaccagcgccgactacgacagggtgctggagaagctgaagaagacagcaacaggctggatgaccacaattaacggcaaggagctgaaggtggagggccagattacctactacaacagatacaagagacagaacgtagtcaaggacctgtccgtcgagctggatagactgagcgaagaatctgtgaacaacgacatctcctcctggacaaagggcagaagcggagaagctctgagcctcctgaagaaaagattctcccatagacccgtgcaggagaagttcgtgtgcctgaactgcggcttcgagacacacgcagccgagcaagccgccctgaacatcgccagatcctggctgttcctgcggagccaggagtacaagaaataccagacaaacaagacaaccggcaacaccgataagagagccttcgtcgagacctggcagtccttttaccggaagaagcttaaggaggtgtggaaacctgccgtgcggtctggcggatctggcggaggctcctatgggcctgctgaccttcagggacgtggccatcgagttcagcctggaggagtggcagtgcctggacaccgcccagcagaacctgtacaggaacgtgatgctggagaactacaggaacctggccttcctgggcatcgccgtgagcaagcccgacctgatcacctgcctggagcagggcaaggagccctggaacatgaagaggcacgagatggtggacgagccccccggcgtgtgcccccacttcggatctggctccggcagcggccccaagaaaaagagaaaagtctaagctgccttctgcggggcttgccttctggccatgcccttcttctctcccttgcacctgtacctcttggtctttgaataaagcctgagtaggaaggctagcaaaaaaaaaaaaaaaaaaaaaaaaaaaaaaaaaaaaaaaaaaaaaaaaaaaaaaaaaaaaaaaaaaaaaaaaaaaaaaaa

SEQ ID NO: 16876 - RNA, 9485 nt, synthetic construct
  source 1..9485: mol_type = other RNA
aggaaataagagagaaaagaagagtaagaagaaatataagagccaccatggcccctaagaagaagcgtaaagtgagccggatggaacgcctcgtctacgaggtgcggcagaagtgcagaaacatcgaggacatctgcatctcctgcggatctctgaacgtgaccctggagcacccactgttcatcggcggcatgtgccagaactgtaaaaactgttttctggagtgtgcctatcaatacgacgatgacggctaccagagctactgcaccatctgttgcggcggaagagaggtgctgatgtgtggaaataacaactgctgccggtgcttctgcgtggaatgcgtggacctgctggtgggccccggcgccgcccaggccgctattaaggaagatccttggaactgctacatgtgcggccacaagggcacatacggcctgctgagacggagagaggactggcctagcagactgcagatgttcttcgccaataaccacgaccaggagttcgacccccctaaggtgtaccctcccgtccccgccgagaagagaaagcccatccgggtcctgagcctgttcgatggcatcgccaccggtctgctggtgctgaaggacctgggcatccaggtggataggtacattgcctccgaggtgtgcgaggactccatcaccgtgggaatggtgcgtcatcagggcaagatcatgtacgtgggcgacgtgcggagcgtgacacagaagcatatccaggagtggggccctttcgacctggtgatcggcggcagcccttgcaatgacctgagcatcgtgaacccagcccggaagggcctgtacgagggaaccggcagactgttcttcgagttttacagactgctgcacgacgcccggcctaaggaaggcgacgaccggcccttcttttggctgttcgagaatgtggtggccatgggagtcagcgacaagcgggatattagccggttcctggagagcaaccccgtgatgatcgatgccaaggaagtgagcgccgcccaccgggccagatacttctggggcaatctgcctggcatgaacagacccctggccagcaccgtgaacgacaagctggagctgcaggagtgcctggagcacggccggatcgccaagttcagcaaggtgagaaccatcaccacccgaagcaacagcatcaaacaaggcaaggaccagcactttcctgtgttcatgaacgagaaggaggacatcctgtggtgtaccgagatggagagagtgttcgggttcccagtccactacacagatgtcagcaacatgtctagactggccagacagagactgctgggaagaagctggtccgtccctgtgatcagacacctgttcgcccctctgaaggagtacttcgcctgcgtgagcagcggcaacagcaacgccaacagccggggccccagcttctctagcggcctggtgccactgtccctgagagggagccacatgggccccatggagatctacaaaaccgtgagcgcctggaagcggcagcctgtgcgcgtgctgagcctgtttcggaatatcgataaagtcctgaaaagcctgggattcctggagagcggctctggctccggcggtggcaccctgaagtacgtggaggatgtgacaaacgtggtcagacgggatgtggagaagtggggccccttcgatctggtgtacggcagcacccaacccctgggcagctcttgtgaccggtgccctggctggtacatgtttcagttccaccggatcctgcagtacgccctgccgagacaggagtcccagcggccattcttttggattttcatggacaacttgctgctgaccgaggatgaccaggaaactaccactcggttcctgcagaccgaagccgtgaccctgcaggacgtgagaggccgggactaccagaacgccatgcgggtgtggtccaacatccctggactgaaaagcaagcacgcacctctgacccctaaagaagaggagtacctgcaggcccaggtgcggagcagaagcaagctggacgcccctaaggtggatctgctggtgaagaattgcctcctgcccctgagagagtacttcaagtatttcagccagaatagtctgcccctgggaggcagcggcggcggcgccctggtgacatttgaggacgtcgccgtgcggttcacccaggaggaatgggctctgctggatccttctcagaaaatcctgtaccgggacgtgatgagagagacataccggaatctgacctccgtgggcatcaactgggaatgttgggaccttgaagcctgcttcagaagcctgggaagaaacctgagagtgcaggtggtgaagagaaagtgcgagctgaccaacagcggcccctgcgccgagggcggcccaagcagcggcgcccctcctcccagcggcggcagcccagccggctccccaacctctaccgaggagggcacctctgagtccgccacccccgagagcggccctggcacctccaccgagcccagcgagggcagcgcacccggcagccctgccggcagccccacctccacagaggagggaaccagcaccgagcccagcgaaggcagcgccccaggcaccagcaccgagcctagtgagcaggagattaaacggatcaacaagatcagaagaagacttgtgaaagacagcaacaccaagaaggccggcaagacaggccccatgaaaaccctgctggttagagtgatgacacccgatctgagagagcggctggaaaacctgagaaagaagcctgaaaatatcccccagcccatcagcaatacatctagagccaacctgaataagctgctgaccgattacaccgaaatgaagaaggcgatcctgcatgtgtactgggaagagttccagaaggaccctgtgggcctgatgagccgggtggcccagcctgccagcaagaagatcgatcagaacaagctgaaacctgagatggacgagaagggcaacctgaccaccgccggctttgcctgctctcagtgtggccagcccctgttcgtgtacaagctggagcaggtgtctgagaagggcaaggcttacaccaactacttcggacggtgcaatgtggccgagcacgaaaagctgatcctgctggcccagctgaagcccgagaaggatagcgacgaagccgtgacatatagcctgggaaagtttgggcagagggccctggatttctacagcattcatgtgaccaaggagtccacccaccccgtgaagcccctggcccagatcgccggaaacagatacgcctccggacctgtgggaaaggccctgagcgacgcatgtatgggcacaatcgcctccttcctgtctaagtaccaggacatcatcatcgaacaccagaaggtggtgaagggcaaccagaagagactggagagcctgcgggagctggccggcaaggaaaacctggaataccctagcgtgaccctgccacctcagcctcacaccaaggagggcgttgatgcctacaacgaagtgatcgcccgggtgcgaatgtgggtgaacctgaacctgtggcagaagctgaagctaagcagagatgatgccaagcctctgctgagactgaagggattcccttcctttcctctggtcgagagacaggccaacgaagtggactggtgggacatggtgtgtaacgtgaagaagctgatcaacgagaaaaaggaggatggcaaggtgttttggcagaatctggctggctacaagagacaggaagccctgagaccatacctgagcagcgaggaagatcggaagaagggaaagaaattcgctcggtaccagctgggcgacctgctgctgcacctggaaaagaagcacggcgaggactggggaaaggtgtacgacgaggcctgggagcggattgacaagaaagtggaaggcctgagcaagcacatcaagctggaagaggaacggagaagcgaggacgcccagagcaaggccgccctgaccgactggctgcgggctaaggccagcttcgtgatcgagggcctgaaggaggccgacaaggacgagttctgcagatgcgagctgaagctgcagaagtggtacggggacctgcggggaaagcccttcgccatcgaagccgagaacagcatcctggacatcagcggcttcagcaagcagtacaactgtgccttcatctggcagaaggacggcgtgaagaagctgaacctgtacctgatcatcaactacttcaagggcggcaagctgcggttcaagaagatcaaacctgaagccttcgaagccaacagattctacaccgtgatcaacaaaaagagcggcgagatcgtgcccatggaggtgaacttcaacttcgacgaccccaacctgatcatcctgcctctggcctttggcaagagacagggcagagaattcatctggaacgacctgctgtccctggaaaccggcagcctgaagctggccaacggaagagtgatcgagaagacactgtacaacagaagaacccggcaggatgagcctgccctgttcgtggccctgaccttcgagcggcgggaggtcctggactcctccaatatcaaaccaatgaacctgatcggcgtggcaagaggcgaaaacatccccgccgtgatcgccctgaccgaccccgagggctgcccactgagccggtttaaggatagcctgggaaacccaacccacatcctgagaatcggcgagagctataaggagaagcagcggaccatccaggccaagaaggaggtggagcagcggagagccggcggctacagccggaagtacgccagcaaagccaagaatctggcagacgatatggtgagaaacaccgctagagatctgctgtactacgccgtgacccaggatgccatgctgatcttcgccaacctgagccggggcttcggccggcagggcaagcggaccttcatggccgagagacagtacacacggatggaggactggctgaccgccaagctggcctacgagggcctgagcaagacctacctgtccaagacactggcccagtacacctccaagacatgcagcaactgtgggtttaccatcaccagcgccgactacgacagggtgctggagaagctgaagaagacagcaacaggctggatgaccacaattaacggcaaggagctgaaggtggagggccagattacctactacaacagatacaagagacagaacgtagtcaaggacctgtccgtcgagctggatagactgagcgaagaatctgtgaacaacgacatctcctcctggacaaagggcagaagcggagaagctctgagcctcctgaagaaaagattctcccatagacccgtgcaggagaagttcgtgtgcctgaactgcggcttcgagacacacgcagccgagcaagccgccctgaacatcgccagatcctggctgttcctgcggagccaggagtacaagaaataccagacaaacaagacaaccggcaacaccgataagagagccttcgtcgagacctggcagtccttttaccggaagaagcttaaggaggtgtggaaacctgccgtgcggtctggcggatctggcggaggctccagcaaggtgcccgtgaccttcggcgacctggccatctacttcagccaggaggagtgggagtggctgagccccatccagaaggacctgtacgaggacgtgatgctggagaactaccagaacctggtgagcctgggcctgagcttcaggaggcccaacgtgatcaccctgctggagaagggcagggccccctggatggtggagcccgtgaggaagaggagggtgctggacagcaggagcaagtacggcggcccaagcagcggcgcccctcctcccagcggcggcagcccagccggctccccaacctctaccgaggagggcacctctgagtccgccacccccgagagcggccctggcacctccaccgagcccagcgagggcagcgcacccggcagccctgccggcagccccacctccacagaggagggaaccagcaccgagcccagcgaaggcagcgccccaggcaccagcaccgagcctagtgagcaggagattaaacggatcaacaagatcagaagaagacttgtgaaagacagcaacaccaagaaggccggcaagacaggccccatgaaaaccctgctggttagagtgatgacacccgatctgagagagcggctggaaaacctgagaaagaagcctgaaaatatcccccagcccatcagcaatacatctagagccaacctgaataagctgctgaccgattacaccgaaatgaagaaggcgatcctgcatgtgtactgggaagagttccagaaggaccctgtgggcctgatgagccgggtggcccagcctgccagcaagaagatcgatcagaacaagctgaaacctgagatggacgagaagggcaacctgaccaccgccggctttgcctgctctcagtgtggccagcccctgttcgtgtacaagctggagcaggtgtctgagaagggcaaggcttacaccaactacttcggacggtgcaatgtggccgagcacgaaaagctgatcctgctggcccagctgaagcccgagaaggatagcgacgaagccgtgacatatagcctgggaaagtttgggcagagggccctggatttctacagcattcatgtgaccaaggagtccacccaccccgtgaagcccctggcccagatcgccggaaacagatacgcctccggacctgtgggaaaggccctgagcgacgcatgtatgggcacaatcgcctccttcctgtctaagtaccaggacatcatcatcgaacaccagaaggtggtgaagggcaaccagaagagactggagagcctgcgggagctggccggcaaggaaaacctggaataccctagcgtgaccctgccacctcagcctcacaccaaggagggcgttgatgcctacaacgaagtgatcgcccgggtgcgaatgtgggtgaacctgaacctgtggcagaagctgaagctaagcagagatgatgccaagcctctgctgagactgaagggattcccttcctttcctctggtcgagagacaggccaacgaagtggactggtgggacatggtgtgtaacgtgaagaagctgatcaacgagaaaaaggaggatggcaaggtgttttggcagaatctggctggctacaagagacaggaagccctgagaccatacctgagcagcgaggaagatcggaagaagggaaagaaattcgctcggtaccagctgggcgacctgctgctgcacctggaaaagaagcacggcgaggactggggaaaggtgtacgacgaggcctgggagcggattgacaagaaagtggaaggcctgagcaagcacatcaagctggaagaggaacggagaagcgaggacgcccagagcaaggccgccctgaccgactggctgcgggctaaggccagcttcgtgatcgagggcctgaaggaggccgacaaggacgagttctgcagatgcgagctgaagctgcagaagtggtacggggacctgcggggaaagcccttcgccatcgaagccgagaacagcatcctggacatcagcggcttcagcaagcagtacaactgtgccttcatctggcagaaggacggcgtgaagaagctgaacctgtacctgatcatcaactacttcaagggcggcaagctgcggttcaagaagatcaaacctgaagccttcgaagccaacagattctacaccgtgatcaacaaaaagagcggcgagatcgtgcccatggaggtgaacttcaacttcgacgaccccaacctgatcatcctgcctctggcctttggcaagagacagggcagagaattcatctggaacgacctgctgtccctggaaaccggcagcctgaagctggccaacggaagagtgatcgagaagacactgtacaacagaagaacccggcaggatgagcctgccctgttcgtggccctgaccttcgagcggcgggaggtcctggactcctccaatatcaaaccaatgaacctgatcggcgtggcaagaggcgaaaacatccccgccgtgatcgccctgaccgaccccgagggctgcccactgagccggtttaaggatagcctgggaaacccaacccacatcctgagaatcggcgagagctataaggagaagcagcggaccatccaggccaagaaggaggtggagcagcggagagccggcggctacagccggaagtacgccagcaaagccaagaatctggcagacgatatggtgagaaacaccgctagagatctgctgtactacgccgtgacccaggatgccatgctgatcttcgccaacctgagccggggcttcggccggcagggcaagcggaccttcatggccgagagacagtacacacggatggaggactggctgaccgccaagctggcctacgagggcctgagcaagacctacctgtccaagacactggcccagtacacctccaagacatgcagcaactgtgggtttaccatcaccagcgccgactacgacagggtgctggagaagctgaagaagacagcaacaggctggatgaccacaattaacggcaaggagctgaaggtggagggccagattacctactacaacagatacaagagacagaacgtagtcaaggacctgtccgtcgagctggatagactgagcgaagaatctgtgaacaacgacatctcctcctggacaaagggcagaagcggagaagctctgagcctcctgaagaaaagattctcccatagacccgtgcaggagaagttcgtgtgcctgaactgcggcttcgagacacacgcagccgagcaagccgccctgaacatcgccagatcctggctgttcctgcggagccaggagtacaagaaataccagacaaacaagacaaccggcaacaccgataagagagccttcgtcgagacctggcagtccttttaccggaagaagcttaaggaggtgtggaaacctgccgtgcggtctggcggatctggcggaggctcctagcaaggtgcccgtgaccttcggcgacctggccatctacttcagccaggaggagtgggagtggctgagccccatccagaaggacctgtacgaggacgtgatgctggagaactaccagaacctggtgagcctgggcctgagcttcaggaggcccaacgtgatcaccctgctggagaagggcagggccccctggatggtggagcccgtgaggaagaggagggtgctggacagcaggagcaagtacggatctggctccggcagcggccccaagaaaaagagaaaagtctaagctgccttctgcggggcttgccttctggccatgcccttcttctctcccttgcacctgtacctcttggtctttgaataaagcctgagtaggaaggctagcaaaaaaaaaaaaaaaaaaaaaaaaaaaaaaaaaaaaaaaaaaaaaaaaaaaaaaaaaaaaaaaaaaaaaaaaaaaaaaaa

SEQ ID NO: 16877 - RNA, 9485 nt, synthetic construct
  source 1..9485: mol_type = other RNA
aggaaataagagagaaaagaagagtaagaagaaatataagagccaccatggcccctaagaagaagcgtaaagtgagccggatggaacgcctcgtctacgaggtgcggcagaagtgcagaaacatcgaggacatctgcatctcctgcggatctctgaacgtgaccctggagcacccactgttcatcggcggcatgtgccagaactgtaaaaactgttttctggagtgtgcctatcaatacgacgatgacggctaccagagctactgcaccatctgttgcggcggaagagaggtgctgatgtgtggaaataacaactgctgccggtgcttctgcgtggaatgcgtggacctgctggtgggccccggcgccgcccaggccgctattaaggaagatccttggaactgctacatgtgcggccacaagggcacatacggcctgctgagacggagagaggactggcctagcagactgcagatgttcttcgccaataaccacgaccaggagttcgacccccctaaggtgtaccctcccgtccccgccgagaagagaaagcccatccgggtcctgagcctgttcgatggcatcgccaccggtctgctggtgctgaaggacctgggcatccaggtggataggtacattgcctccgaggtgtgcgaggactccatcaccgtgggaatggtgcgtcatcagggcaagatcatgtacgtgggcgacgtgcggagcgtgacacagaagcatatccaggagtggggccctttcgacctggtgatcggcggcagcccttgcaatgacctgagcatcgtgaacccagcccggaagggcctgtacgagggaaccggcagactgttcttcgagttttacagactgctgcacgacgcccggcctaaggaaggcgacgaccggcccttcttttggctgttcgagaatgtggtggccatgggagtcagcgacaagcgggatattagccggttcctggagagcaaccccgtgatgatcgatgccaaggaagtgagcgccgcccaccgggccagatacttctggggcaatctgcctggcatgaacagacccctggccagcaccgtgaacgacaagctggagctgcaggagtgcctggagcacggccggatcgccaagttcagcaaggtgagaaccatcaccacccgaagcaacagcatcaaacaaggcaaggaccagcactttcctgtgttcatgaacgagaaggaggacatcctgtggtgtaccgagatggagagagtgttcgggttcccagtccactacacagatgtcagcaacatgtctagactggccagacagagactgctgggaagaagctggtccgtccctgtgatcagacacctgttcgcccctctgaaggagtacttcgcctgcgtgagcagcggcaacagcaacgccaacagccggggccccagcttctctagcggcctggtgccactgtccctgagagggagccacatgggccccatggagatctacaaaaccgtgagcgcctggaagcggcagcctgtgcgcgtgctgagcctgtttcggaatatcgataaagtcctgaaaagcctgggattcctggagagcggctctggctccggcggtggcaccctgaagtacgtggaggatgtgacaaacgtggtcagacgggatgtggagaagtggggccccttcgatctggtgtacggcagcacccaacccctgggcagctcttgtgaccggtgccctggctggtacatgtttcagttccaccggatcctgcagtacgccctgccgagacaggagtcccagcggccattcttttggattttcatggacaacttgctgctgaccgaggatgaccaggaaactaccactcggttcctgcagaccgaagccgtgaccctgcaggacgtgagaggccgggactaccagaacgccatgcgggtgtggtccaacatccctggactgaaaagcaagcacgcacctctgacccctaaagaagaggagtacctgcaggcccaggtgcggagcagaagcaagctggacgcccctaaggtggatctgctggtgaagaattgcctcctgcccctgagagagtacttcaagtatttcagccagaatagtctgcccctgggaggcagcggcggcggcgccctggtgacatttgaggacgtcgccgtgcggttcacccaggaggaatgggctctgctggatccttctcagaaaatcctgtaccgggacgtgatgagagagacataccggaatctgacctccgtgggcatcaactgggaatgttgggaccttgaagcctgcttcagaagcctgggaagaaacctgagagtgcaggtggtgaagagaaagtgcgagctgaccaacagcggcccctgcgccgagggcggcccaagcagcggcgcccctcctcccagcggcggcagcccagccggctccccaacctctaccgaggagggcacctctgagtccgccacccccgagagcggccctggcacctccaccgagcccagcgagggcagcgcacccggcagccctgccggcagccccacctccacagaggagggaaccagcaccgagcccagcgaaggcagcgccccaggcaccagcaccgagcctagtgagcaggagattaaacggatcaacaagatcagaagaagacttgtgaaagacagcaacaccaagaaggccggcaagacaggccccatgaaaaccctgctggttagagtgatgacacccgatctgagagagcggctggaaaacctgagaaagaagcctgaaaatatcccccagcccatcagcaatacatctagagccaacctgaataagctgctgaccgattacaccgaaatgaagaaggcgatcctgcatgtgtactgggaagagttccagaaggaccctgtgggcctgatgagccgggtggcccagcctgccagcaagaagatcgatcagaacaagctgaaacctgagatggacgagaagggcaacctgaccaccgccggctttgcctgctctcagtgtggccagcccctgttcgtgtacaagctggagcaggtgtctgagaagggcaaggcttacaccaactacttcggacggtgcaatgtggccgagcacgaaaagctgatcctgctggcccagctgaagcccgagaaggatagcgacgaagccgtgacatatagcctgggaaagtttgggcagagggccctggatttctacagcattcatgtgaccaaggagtccacccaccccgtgaagcccctggcccagatcgccggaaacagatacgcctccggacctgtgggaaaggccctgagcgacgcatgtatgggcacaatcgcctccttcctgtctaagtaccaggacatcatcatcgaacaccagaaggtggtgaagggcaaccagaagagactggagagcctgcgggagctggccggcaaggaaaacctggaataccctagcgtgaccctgccacctcagcctcacaccaaggagggcgttgatgcctacaacgaagtgatcgcccgggtgcgaatgtgggtgaacctgaacctgtggcagaagctgaagctaagcagagatgatgccaagcctctgctgagactgaagggattcccttcctttcctctggtcgagagacaggccaacgaagtggactggtgggacatggtgtgtaacgtgaagaagctgatcaacgagaaaaaggaggatggcaaggtgttttggcagaatctggctggctacaagagacaggaagccctgagaccatacctgagcagcgaggaagatcggaagaagggaaagaaattcgctcggtaccagctgggcgacctgctgctgcacctggaaaagaagcacggcgaggactggggaaaggtgtacgacgaggcctgggagcggattgacaagaaagtggaaggcctgagcaagcacatcaagctggaagaggaacggagaagcgaggacgcccagagcaaggccgccctgaccgactggctgcgggctaaggccagcttcgtgatcgagggcctgaaggaggccgacaaggacgagttctgcagatgcgagctgaagctgcagaagtggtacggggacctgcggggaaagcccttcgccatcgaagccgagaacagcatcctggacatcagcggcttcagcaagcagtacaactgtgccttcatctggcagaaggacggcgtgaagaagctgaacctgtacctgatcatcaactacttcaagggcggcaagctgcggttcaagaagatcaaacctgaagccttcgaagccaacagattctacaccgtgatcaacaaaaagagcggcgagatcgtgcccatggaggtgaacttcaacttcgacgaccccaacctgatcatcctgcctctggcctttggcaagagacagggcagagaattcatctggaacgacctgctgtccctggaaaccggcagcctgaagctggccaacggaagagtgatcgagaagacactgtacaacagaagaacccggcaggatgagcctgccctgttcgtggccctgaccttcgagcggcgggaggtcctggactcctccaatatcaaaccaatgaacctgatcggcgtggcaagaggcgaaaacatccccgccgtgatcgccctgaccgaccccgagggctgcccactgagccggtttaaggatagcctgggaaacccaacccacatcctgagaatcggcgagagctataaggagaagcagcggaccatccaggccaagaaggaggtggagcagcggagagccggcggctacagccggaagtacgccagcaaagccaagaatctggcagacgatatggtgagaaacaccgctagagatctgctgtactacgccgtgacccaggatgccatgctgatcttcgccaacctgagccggggcttcggccggcagggcaagcggaccttcatggccgagagacagtacacacggatggaggactggctgaccgccaagctggcctacgagggcctgagcaagacctacctgtccaagacactggcccagtacacctccaagacatgcagcaactgtgggtttaccatcaccagcgccgactacgacagggtgctggagaagctgaagaagacagcaacaggctggatgaccacaattaacggcaaggagctgaaggtggagggccagattacctactacaacagatacaagagacagaacgtagtcaaggacctgtccgtcgagctggatagactgagcgaagaatctgtgaacaacgacatctcctcctggacaaagggcagaagcggagaagctctgagcctcctgaagaaaagattctcccatagacccgtgcaggagaagttcgtgtgcctgaactgcggcttcgagacacacgcagccgagcaagccgccctgaacatcgccagatcctggctgttcctgcggagccaggagtacaagaaataccagacaaacaagacaaccggcaacaccgataagagagccttcgtcgagacctggcagtccttttaccggaagaagcttaaggaggtgtggaaacctgccgtgcggtctggcggatctggcggaggctccgcccccctgcccctgaccttcgaggacgtggccgtgtacttcagcgagcaggagtggaggaacctggaggcctggcagaaggagctgtacaagcaggtgatgaggaccaactacgagatcctggtgagcctggacgacggcctgcccaagcccgagctgatcagctggctggagcagggcagggagctgttcaagaactggggcgagagccagaagagcggcaacatcatctgcttcagcgccggcggcccaagcagcggcgcccctcctcccagcggcggcagcccagccggctccccaacctctaccgaggagggcacctctgagtccgccacccccgagagcggccctggcacctccaccgagcccagcgagggcagcgcacccggcagccctgccggcagccccacctccacagaggagggaaccagcaccgagcccagcgaaggcagcgccccaggcaccagcaccgagcctagtgagcaggagattaaacggatcaacaagatcagaagaagacttgtgaaagacagcaacaccaagaaggccggcaagacaggccccatgaaaaccctgctggttagagtgatgacacccgatctgagagagcggctggaaaacctgagaaagaagcctgaaaatatcccccagcccatcagcaatacatctagagccaacctgaataagctgctgaccgattacaccgaaatgaagaaggcgatcctgcatgtgtactgggaagagttccagaaggaccctgtgggcctgatgagccgggtggcccagcctgccagcaagaagatcgatcagaacaagctgaaacctgagatggacgagaagggcaacctgaccaccgccggctttgcctgctctcagtgtggccagcccctgttcgtgtacaagctggagcaggtgtctgagaagggcaaggcttacaccaactacttcggacggtgcaatgtggccgagcacgaaaagctgatcctgctggcccagctgaagcccgagaaggatagcgacgaagccgtgacatatagcctgggaaagtttgggcagagggccctggatttctacagcattcatgtgaccaaggagtccacccaccccgtgaagcccctggcccagatcgccggaaacagatacgcctccggacctgtgggaaaggccctgagcgacgcatgtatgggcacaatcgcctccttcctgtctaagtaccaggacatcatcatcgaacaccagaaggtggtgaagggcaaccagaagagactggagagcctgcgggagctggccggcaaggaaaacctggaataccctagcgtgaccctgccacctcagcctcacaccaaggagggcgttgatgcctacaacgaagtgatcgcccgggtgcgaatgtgggtgaacctgaacctgtggcagaagctgaagctaagcagagatgatgccaagcctctgctgagactgaagggattcccttcctttcctctggtcgagagacaggccaacgaagtggactggtgggacatggtgtgtaacgtgaagaagctgatcaacgagaaaaaggaggatggcaaggtgttttggcagaatctggctggctacaagagacaggaagccctgagaccatacctgagcagcgaggaagatcggaagaagggaaagaaattcgctcggtaccagctgggcgacctgctgctgcacctggaaaagaagcacggcgaggactggggaaaggtgtacgacgaggcctgggagcggattgacaagaaagtggaaggcctgagcaagcacatcaagctggaagaggaacggagaagcgaggacgcccagagcaaggccgccctgaccgactggctgcgggctaaggccagcttcgtgatcgagggcctgaaggaggccgacaaggacgagttctgcagatgcgagctgaagctgcagaagtggtacggggacctgcggggaaagcccttcgccatcgaagccgagaacagcatcctggacatcagcggcttcagcaagcagtacaactgtgccttcatctggcagaaggacggcgtgaagaagctgaacctgtacctgatcatcaactacttcaagggcggcaagctgcggttcaagaagatcaaacctgaagccttcgaagccaacagattctacaccgtgatcaacaaaaagagcggcgagatcgtgcccatggaggtgaacttcaacttcgacgaccccaacctgatcatcctgcctctggcctttggcaagagacagggcagagaattcatctggaacgacctgctgtccctggaaaccggcagcctgaagctggccaacggaagagtgatcgagaagacactgtacaacagaagaacccggcaggatgagcctgccctgttcgtggccctgaccttcgagcggcgggaggtcctggactcctccaatatcaaaccaatgaacctgatcggcgtggcaagaggcgaaaacatccccgccgtgatcgccctgaccgaccccgagggctgcccactgagccggtttaaggatagcctgggaaacccaacccacatcctgagaatcggcgagagctataaggagaagcagcggaccatccaggccaagaaggaggtggagcagcggagagccggcggctacagccggaagtacgccagcaaagccaagaatctggcagacgatatggtgagaaacaccgctagagatctgctgtactacgccgtgacccaggatgccatgctgatcttcgccaacctgagccggggcttcggccggcagggcaagcggaccttcatggccgagagacagtacacacggatggaggactggctgaccgccaagctggcctacgagggcctgagcaagacctacctgtccaagacactggcccagtacacctccaagacatgcagcaactgtgggtttaccatcaccagcgccgactacgacagggtgctggagaagctgaagaagacagcaacaggctggatgaccacaattaacggcaaggagctgaaggtggagggccagattacctactacaacagatacaagagacagaacgtagtcaaggacctgtccgtcgagctggatagactgagcgaagaatctgtgaacaacgacatctcctcctggacaaagggcagaagcggagaagctctgagcctcctgaagaaaagattctcccatagacccgtgcaggagaagttcgtgtgcctgaactgcggcttcgagacacacgcagccgagcaagccgccctgaacatcgccagatcctggctgttcctgcggagccaggagtacaagaaataccagacaaacaagacaaccggcaacaccgataagagagccttcgtcgagacctggcagtccttttaccggaagaagcttaaggaggtgtggaaacctgccgtgcggtctggcggatctggcggaggctcctgcccccctgcccctgaccttcgaggacgtggccgtgtacttcagcgagcaggagtggaggaacctggaggcctggcagaaggagctgtacaagcaggtgatgaggaccaactacgagatcctggtgagcctggacgacggcctgcccaagcccgagctgatcagctggctggagcagggcagggagctgttcaagaactggggcgagagccagaagagcggcaacatcatctgcttcagcgccggatctggctccggcagcggccccaagaaaaagagaaaagtctaagctgccttctgcggggcttgccttctggccatgcccttcttctctcccttgcacctgtacctcttggtctttgaataaagcctgagtaggaaggctagcaaaaaaaaaaaaaaaaaaaaaaaaaaaaaaaaaaaaaaaaaaaaaaaaaaaaaaaaaaaaaaaaaaaaaaaaaaaaaaaa

SEQ ID NO: 16878 - RNA, 9485 nt, synthetic construct
  source 1..9485: mol_type = other RNA
aggaaataagagagaaaagaagagtaagaagaaatataagagccaccatggcccctaagaagaagcgtaaagtgagccggatggaacgcctcgtctacgaggtgcggcagaagtgcagaaacatcgaggacatctgcatctcctgcggatctctgaacgtgaccctggagcacccactgttcatcggcggcatgtgccagaactgtaaaaactgttttctggagtgtgcctatcaatacgacgatgacggctaccagagctactgcaccatctgttgcggcggaagagaggtgctgatgtgtggaaataacaactgctgccggtgcttctgcgtggaatgcgtggacctgctggtgggccccggcgccgcccaggccgctattaaggaagatccttggaactgctacatgtgcggccacaagggcacatacggcctgctgagacggagagaggactggcctagcagactgcagatgttcttcgccaataaccacgaccaggagttcgacccccctaaggtgtaccctcccgtccccgccgagaagagaaagcccatccgggtcctgagcctgttcgatggcatcgccaccggtctgctggtgctgaaggacctgggcatccaggtggataggtacattgcctccgaggtgtgcgaggactccatcaccgtgggaatggtgcgtcatcagggcaagatcatgtacgtgggcgacgtgcggagcgtgacacagaagcatatccaggagtggggccctttcgacctggtgatcggcggcagcccttgcaatgacctgagcatcgtgaacccagcccggaagggcctgtacgagggaaccggcagactgttcttcgagttttacagactgctgcacgacgcccggcctaaggaaggcgacgaccggcccttcttttggctgttcgagaatgtggtggccatgggagtcagcgacaagcgggatattagccggttcctggagagcaaccccgtgatgatcgatgccaaggaagtgagcgccgcccaccgggccagatacttctggggcaatctgcctggcatgaacagacccctggccagcaccgtgaacgacaagctggagctgcaggagtgcctggagcacggccggatcgccaagttcagcaaggtgagaaccatcaccacccgaagcaacagcatcaaacaaggcaaggaccagcactttcctgtgttcatgaacgagaaggaggacatcctgtggtgtaccgagatggagagagtgttcgggttcccagtccactacacagatgtcagcaacatgtctagactggccagacagagactgctgggaagaagctggtccgtccctgtgatcagacacctgttcgcccctctgaaggagtacttcgcctgcgtgagcagcggcaacagcaacgccaacagccggggccccagcttctctagcggcctggtgccactgtccctgagagggagccacatgggccccatggagatctacaaaaccgtgagcgcctggaagcggcagcctgtgcgcgtgctgagcctgtttcggaatatcgataaagtcctgaaaagcctgggattcctggagagcggctctggctccggcggtggcaccctgaagtacgtggaggatgtgacaaacgtggtcagacgggatgtggagaagtggggccccttcgatctggtgtacggcagcacccaacccctgggcagctcttgtgaccggtgccctggctggtacatgtttcagttccaccggatcctgcagtacgccctgccgagacaggagtcccagcggccattcttttggattttcatggacaacttgctgctgaccgaggatgaccaggaaactaccactcggttcctgcagaccgaagccgtgaccctgcaggacgtgagaggccgggactaccagaacgccatgcgggtgtggtccaacatccctggactgaaaagcaagcacgcacctctgacccctaaagaagaggagtacctgcaggcccaggtgcggagcagaagcaagctggacgcccctaaggtggatctgctggtgaagaattgcctcctgcccctgagagagtacttcaagtatttcagccagaatagtctgcccctgggaggcagcggcggcggcgccctggtgacatttgaggacgtcgccgtgcggttcacccaggaggaatgggctctgctggatccttctcagaaaatcctgtaccgggacgtgatgagagagacataccggaatctgacctccgtgggcatcaactgggaatgttgggaccttgaagcctgcttcagaagcctgggaagaaacctgagagtgcaggtggtgaagagaaagtgcgagctgaccaacagcggcccctgcgccgagggcggcccaagcagcggcgcccctcctcccagcggcggcagcccagccggctccccaacctctaccgaggagggcacctctgagtccgccacccccgagagcggccctggcacctccaccgagcccagcgagggcagcgcacccggcagccctgccggcagccccacctccacagaggagggaaccagcaccgagcccagcgaaggcagcgccccaggcaccagcaccgagcctagtgagcaggagattaaacggatcaacaagatcagaagaagacttgtgaaagacagcaacaccaagaaggccggcaagacaggccccatgaaaaccctgctggttagagtgatgacacccgatctgagagagcggctggaaaacctgagaaagaagcctgaaaatatcccccagcccatcagcaatacatctagagccaacctgaataagctgctgaccgattacaccgaaatgaagaaggcgatcctgcatgtgtactgggaagagttccagaaggaccctgtgggcctgatgagccgggtggcccagcctgccagcaagaagatcgatcagaacaagctgaaacctgagatggacgagaagggcaacctgaccaccgccggctttgcctgctctcagtgtggccagcccctgttcgtgtacaagctggagcaggtgtctgagaagggcaaggcttacaccaactacttcggacggtgcaatgtggccgagcacgaaaagctgatcctgctggcccagctgaagcccgagaaggatagcgacgaagccgtgacatatagcctgggaaagtttgggcagagggccctggatttctacagcattcatgtgaccaaggagtccacccaccccgtgaagcccctggcccagatcgccggaaacagatacgcctccggacctgtgggaaaggccctgagcgacgcatgtatgggcacaatcgcctccttcctgtctaagtaccaggacatcatcatcgaacaccagaaggtggtgaagggcaaccagaagagactggagagcctgcgggagctggccggcaaggaaaacctggaataccctagcgtgaccctgccacctcagcctcacaccaaggagggcgttgatgcctacaacgaagtgatcgcccgggtgcgaatgtgggtgaacctgaacctgtggcagaagctgaagctaagcagagatgatgccaagcctctgctgagactgaagggattcccttcctttcctctggtcgagagacaggccaacgaagtggactggtgggacatggtgtgtaacgtgaagaagctgatcaacgagaaaaaggaggatggcaaggtgttttggcagaatctggctggctacaagagacaggaagccctgagaccatacctgagcagcgaggaagatcggaagaagggaaagaaattcgctcggtaccagctgggcgacctgctgctgcacctggaaaagaagcacggcgaggactggggaaaggtgtacgacgaggcctgggagcggattgacaagaaagtggaaggcctgagcaagcacatcaagctggaagaggaacggagaagcgaggacgcccagagcaaggccgccctgaccgactggctgcgggctaaggccagcttcgtgatcgagggcctgaaggaggccgacaaggacgagttctgcagatgcgagctgaagctgcagaagtggtacggggacctgcggggaaagcccttcgccatcgaagccgagaacagcatcctggacatcagcggcttcagcaagcagtacaactgtgccttcatctggcagaaggacggcgtgaagaagctgaacctgtacctgatcatcaactacttcaagggcggcaagctgcggttcaagaagatcaaacctgaagccttcgaagccaacagattctacaccgtgatcaacaaaaagagcggcgagatcgtgcccatggaggtgaacttcaacttcgacgaccccaacctgatcatcctgcctctggcctttggcaagagacagggcagagaattcatctggaacgacctgctgtccctggaaaccggcagcctgaagctggccaacggaagagtgatcgagaagacactgtacaacagaagaacccggcaggatgagcctgccctgttcgtggccctgaccttcgagcggcgggaggtcctggactcctccaatatcaaaccaatgaacctgatcggcgtggcaagaggcgaaaacatccccgccgtgatcgccctgaccgaccccgagggctgcccactgagccggtttaaggatagcctgggaaacccaacccacatcctgagaatcggcgagagctataaggagaagcagcggaccatccaggccaagaaggaggtggagcagcggagagccggcggctacagccggaagtacgccagcaaagccaagaatctggcagacgatatggtgagaaacaccgctagagatctgctgtactacgccgtgacccaggatgccatgctgatcttcgccaacctgagccggggcttcggccggcagggcaagcggaccttcatggccgagagacagtacacacggatggaggactggctgaccgccaagctggcctacgagggcctgagcaagacctacctgtccaagacactggcccagtacacctccaagacatgcagcaactgtgggtttaccatcaccagcgccgactacgacagggtgctggagaagctgaagaagacagcaacaggctggatgaccacaattaacggcaaggagctgaaggtggagggccagattacctactacaacagatacaagagacagaacgtagtcaaggacctgtccgtcgagctggatagactgagcgaagaatctgtgaacaacgacatctcctcctggacaaagggcagaagcggagaagctctgagcctcctgaagaaaagattctcccatagacccgtgcaggagaagttcgtgtgcctgaactgcggcttcgagacacacgcagccgagcaagccgccctgaacatcgccagatcctggctgttcctgcggagccaggagtacaagaaataccagacaaacaagacaaccggcaacaccgataagagagccttcgtcgagacctggcagtccttttaccggaagaagcttaaggaggtgtggaaacctgccgtgcggtctggcggatctggcggaggctccagctacggcagcttcagcttcgaggacgtgaccgtgggcttcacccaggaggagtggcagcacctgggccccgcccagaggatcctgtacagggacgtgatgctggagaactacagccacctggtgagcgtgggctgctgcatccccaagcccgaggtgatcctgaagctggagcagggcgagcagccctggatcctggaggaggagagccccagccagagctaccccggcctgcccaccgacggcggcccaagcagcggcgcccctcctcccagcggcggcagcccagccggctccccaacctctaccgaggagggcacctctgagtccgccacccccgagagcggccctggcacctccaccgagcccagcgagggcagcgcacccggcagccctgccggcagccccacctccacagaggagggaaccagcaccgagcccagcgaaggcagcgccccaggcaccagcaccgagcctagtgagcaggagattaaacggatcaacaagatcagaagaagacttgtgaaagacagcaacaccaagaaggccggcaagacaggccccatgaaaaccctgctggttagagtgatgacacccgatctgagagagcggctggaaaacctgagaaagaagcctgaaaatatcccccagcccatcagcaatacatctagagccaacctgaataagctgctgaccgattacaccgaaatgaagaaggcgatcctgcatgtgtactgggaagagttccagaaggaccctgtgggcctgatgagccgggtggcccagcctgccagcaagaagatcgatcagaacaagctgaaacctgagatggacgagaagggcaacctgaccaccgccggctttgcctgctctcagtgtggccagcccctgttcgtgtacaagctggagcaggtgtctgagaagggcaaggcttacaccaactacttcggacggtgcaatgtggccgagcacgaaaagctgatcctgctggcccagctgaagcccgagaaggatagcgacgaagccgtgacatatagcctgggaaagtttgggcagagggccctggatttctacagcattcatgtgaccaaggagtccacccaccccgtgaagcccctggcccagatcgccggaaacagatacgcctccggacctgtgggaaaggccctgagcgacgcatgtatgggcacaatcgcctccttcctgtctaagtaccaggacatcatcatcgaacaccagaaggtggtgaagggcaaccagaagagactggagagcctgcgggagctggccggcaaggaaaacctggaataccctagcgtgaccctgccacctcagcctcacaccaaggagggcgttgatgcctacaacgaagtgatcgcccgggtgcgaatgtgggtgaacctgaacctgtggcagaagctgaagctaagcagagatgatgccaagcctctgctgagactgaagggattcccttcctttcctctggtcgagagacaggccaacgaagtggactggtgggacatggtgtgtaacgtgaagaagctgatcaacgagaaaaaggaggatggcaaggtgttttggcagaatctggctggctacaagagacaggaagccctgagaccatacctgagcagcgaggaagatcggaagaagggaaagaaattcgctcggtaccagctgggcgacctgctgctgcacctggaaaagaagcacggcgaggactggggaaaggtgtacgacgaggcctgggagcggattgacaagaaagtggaaggcctgagcaagcacatcaagctggaagaggaacggagaagcgaggacgcccagagcaaggccgccctgaccgactggctgcgggctaaggccagcttcgtgatcgagggcctgaaggaggccgacaaggacgagttctgcagatgcgagctgaagctgcagaagtggtacggggacctgcggggaaagcccttcgccatcgaagccgagaacagcatcctggacatcagcggcttcagcaagcagtacaactgtgccttcatctggcagaaggacggcgtgaagaagctgaacctgtacctgatcatcaactacttcaagggcggcaagctgcggttcaagaagatcaaacctgaagccttcgaagccaacagattctacaccgtgatcaacaaaaagagcggcgagatcgtgcccatggaggtgaacttcaacttcgacgaccccaacctgatcatcctgcctctggcctttggcaagagacagggcagagaattcatctggaacgacctgctgtccctggaaaccggcagcctgaagctggccaacggaagagtgatcgagaagacactgtacaacagaagaacccggcaggatgagcctgccctgttcgtggccctgaccttcgagcggcgggaggtcctggactcctccaatatcaaaccaatgaacctgatcggcgtggcaagaggcgaaaacatccccgccgtgatcgccctgaccgaccccgagggctgcccactgagccggtttaaggatagcctgggaaacccaacccacatcctgagaatcggcgagagctataaggagaagcagcggaccatccaggccaagaaggaggtggagcagcggagagccggcggctacagccggaagtacgccagcaaagccaagaatctggcagacgatatggtgagaaacaccgctagagatctgctgtactacgccgtgacccaggatgccatgctgatcttcgccaacctgagccggggcttcggccggcagggcaagcggaccttcatggccgagagacagtacacacggatggaggactggctgaccgccaagctggcctacgagggcctgagcaagacctacctgtccaagacactggcccagtacacctccaagacatgcagcaactgtgggtttaccatcaccagcgccgactacgacagggtgctggagaagctgaagaagacagcaacaggctggatgaccacaattaacggcaaggagctgaaggtggagggccagattacctactacaacagatacaagagacagaacgtagtcaaggacctgtccgtcgagctggatagactgagcgaagaatctgtgaacaacgacatctcctcctggacaaagggcagaagcggagaagctctgagcctcctgaagaaaagattctcccatagacccgtgcaggagaagttcgtgtgcctgaactgcggcttcgagacacacgcagccgagcaagccgccctgaacatcgccagatcctggctgttcctgcggagccaggagtacaagaaataccagacaaacaagacaaccggcaacaccgataagagagccttcgtcgagacctggcagtccttttaccggaagaagcttaaggaggtgtggaaacctgccgtgcggtctggcggatctggcggaggctcctagctacggcagcttcagcttcgaggacgtgaccgtgggcttcacccaggaggagtggcagcacctgggccccgcccagaggatcctgtacagggacgtgatgctggagaactacagccacctggtgagcgtgggctgctgcatccccaagcccgaggtgatcctgaagctggagcagggcgagcagccctggatcctggaggaggagagccccagccagagctaccccggcctgcccaccgacggatctggctccggcagcggccccaagaaaaagagaaaagtctaagctgccttctgcggggcttgccttctggccatgcccttcttctctcccttgcacctgtacctcttggtctttgaataaagcctgagtaggaaggctagcaaaaaaaaaaaaaaaaaaaaaaaaaaaaaaaaaaaaaaaaaaaaaaaaaaaaaaaaaaaaaaaaaaaaaaaaaaaaaaaa

SEQ ID NO: 16879 - RNA, 9485 nt, synthetic construct
  source 1..9485: mol_type = other RNA
aggaaataagagagaaaagaagagtaagaagaaatataagagccaccatggcccctaagaagaagcgtaaagtgagccggatggaacgcctcgtctacgaggtgcggcagaagtgcagaaacatcgaggacatctgcatctcctgcggatctctgaacgtgaccctggagcacccactgttcatcggcggcatgtgccagaactgtaaaaactgttttctggagtgtgcctatcaatacgacgatgacggctaccagagctactgcaccatctgttgcggcggaagagaggtgctgatgtgtggaaataacaactgctgccggtgcttctgcgtggaatgcgtggacctgctggtgggccccggcgccgcccaggccgctattaaggaagatccttggaactgctacatgtgcggccacaagggcacatacggcctgctgagacggagagaggactggcctagcagactgcagatgttcttcgccaataaccacgaccaggagttcgacccccctaaggtgtaccctcccgtccccgccgagaagagaaagcccatccgggtcctgagcctgttcgatggcatcgccaccggtctgctggtgctgaaggacctgggcatccaggtggataggtacattgcctccgaggtgtgcgaggactccatcaccgtgggaatggtgcgtcatcagggcaagatcatgtacgtgggcgacgtgcggagcgtgacacagaagcatatccaggagtggggccctttcgacctggtgatcggcggcagcccttgcaatgacctgagcatcgtgaacccagcccggaagggcctgtacgagggaaccggcagactgttcttcgagttttacagactgctgcacgacgcccggcctaaggaaggcgacgaccggcccttcttttggctgttcgagaatgtggtggccatgggagtcagcgacaagcgggatattagccggttcctggagagcaaccccgtgatgatcgatgccaaggaagtgagcgccgcccaccgggccagatacttctggggcaatctgcctggcatgaacagacccctggccagcaccgtgaacgacaagctggagctgcaggagtgcctggagcacggccggatcgccaagttcagcaaggtgagaaccatcaccacccgaagcaacagcatcaaacaaggcaaggaccagcactttcctgtgttcatgaacgagaaggaggacatcctgtggtgtaccgagatggagagagtgttcgggttcccagtccactacacagatgtcagcaacatgtctagactggccagacagagactgctgggaagaagctggtccgtccctgtgatcagacacctgttcgcccctctgaaggagtacttcgcctgcgtgagcagcggcaacagcaacgccaacagccggggccccagcttctctagcggcctggtgccactgtccctgagagggagccacatgggccccatggagatctacaaaaccgtgagcgcctggaagcggcagcctgtgcgcgtgctgagcctgtttcggaatatcgataaagtcctgaaaagcctgggattcctggagagcggctctggctccggcggtggcaccctgaagtacgtggaggatgtgacaaacgtggtcagacgggatgtggagaagtggggccccttcgatctggtgtacggcagcacccaacccctgggcagctcttgtgaccggtgccctggctggtacatgtttcagttccaccggatcctgcagtacgccctgccgagacaggagtcccagcggccattcttttggattttcatggacaacttgctgctgaccgaggatgaccaggaaactaccactcggttcctgcagaccgaagccgtgaccctgcaggacgtgagaggccgggactaccagaacgccatgcgggtgtggtccaacatccctggactgaaaagcaagcacgcacctctgacccctaaagaagaggagtacctgcaggcccaggtgcggagcagaagcaagctggacgcccctaaggtggatctgctggtgaagaattgcctcctgcccctgagagagtacttcaagtatttcagccagaatagtctgcccctgggaggcagcggcggcggcgccctggtgacatttgaggacgtcgccgtgcggttcacccaggaggaatgggctctgctggatccttctcagaaaatcctgtaccgggacgtgatgagagagacataccggaatctgacctccgtgggcatcaactgggaatgttgggaccttgaagcctgcttcagaagcctgggaagaaacctgagagtgcaggtggtgaagagaaagtgcgagctgaccaacagcggcccctgcgccgagggcggcccaagcagcggcgcccctcctcccagcggcggcagcccagccggctccccaacctctaccgaggagggcacctctgagtccgccacccccgagagcggccctggcacctccaccgagcccagcgagggcagcgcacccggcagccctgccggcagccccacctccacagaggagggaaccagcaccgagcccagcgaaggcagcgccccaggcaccagcaccgagcctagtgagcaggagattaaacggatcaacaagatcagaagaagacttgtgaaagacagcaacaccaagaaggccggcaagacaggccccatgaaaaccctgctggttagagtgatgacacccgatctgagagagcggctggaaaacctgagaaagaagcctgaaaatatcccccagcccatcagcaatacatctagagccaacctgaataagctgctgaccgattacaccgaaatgaagaaggcgatcctgcatgtgtactgggaagagttccagaaggaccctgtgggcctgatgagccgggtggcccagcctgccagcaagaagatcgatcagaacaagctgaaacctgagatggacgagaagggcaacctgaccaccgccggctttgcctgctctcagtgtggccagcccctgttcgtgtacaagctggagcaggtgtctgagaagggcaaggcttacaccaactacttcggacggtgcaatgtggccgagcacgaaaagctgatcctgctggcccagctgaagcccgagaaggatagcgacgaagccgtgacatatagcctgggaaagtttgggcagagggccctggatttctacagcattcatgtgaccaaggagtccacccaccccgtgaagcccctggcccagatcgccggaaacagatacgcctccggacctgtgggaaaggccctgagcgacgcatgtatgggcacaatcgcctccttcctgtctaagtaccaggacatcatcatcgaacaccagaaggtggtgaagggcaaccagaagagactggagagcctgcgggagctggccggcaaggaaaacctggaataccctagcgtgaccctgccacctcagcctcacaccaaggagggcgttgatgcctacaacgaagtgatcgcccgggtgcgaatgtgggtgaacctgaacctgtggcagaagctgaagctaagcagagatgatgccaagcctctgctgagactgaagggattcccttcctttcctctggtcgagagacaggccaacgaagtggactggtgggacatggtgtgtaacgtgaagaagctgatcaacgagaaaaaggaggatggcaaggtgttttggcagaatctggctggctacaagagacaggaagccctgagaccatacctgagcagcgaggaagatcggaagaagggaaagaaattcgctcggtaccagctgggcgacctgctgctgcacctggaaaagaagcacggcgaggactggggaaaggtgtacgacgaggcctgggagcggattgacaagaaagtggaaggcctgagcaagcacatcaagctggaagaggaacggagaagcgaggacgcccagagcaaggccgccctgaccgactggctgcgggctaaggccagcttcgtgatcgagggcctgaaggaggccgacaaggacgagttctgcagatgcgagctgaagctgcagaagtggtacggggacctgcggggaaagcccttcgccatcgaagccgagaacagcatcctggacatcagcggcttcagcaagcagtacaactgtgccttcatctggcagaaggacggcgtgaagaagctgaacctgtacctgatcatcaactacttcaagggcggcaagctgcggttcaagaagatcaaacctgaagccttcgaagccaacagattctacaccgtgatcaacaaaaagagcggcgagatcgtgcccatggaggtgaacttcaacttcgacgaccccaacctgatcatcctgcctctggcctttggcaagagacagggcagagaattcatctggaacgacctgctgtccctggaaaccggcagcctgaagctggccaacggaagagtgatcgagaagacactgtacaacagaagaacccggcaggatgagcctgccctgttcgtggccctgaccttcgagcggcgggaggtcctggactcctccaatatcaaaccaatgaacctgatcggcgtggcaagaggcgaaaacatccccgccgtgatcgccctgaccgaccccgagggctgcccactgagccggtttaaggatagcctgggaaacccaacccacatcctgagaatcggcgagagctataaggagaagcagcggaccatccaggccaagaaggaggtggagcagcggagagccggcggctacagccggaagtacgccagcaaagccaagaatctggcagacgatatggtgagaaacaccgctagagatctgctgtactacgccgtgacccaggatgccatgctgatcttcgccaacctgagccggggcttcggccggcagggcaagcggaccttcatggccgagagacagtacacacggatggaggactggctgaccgccaagctggcctacgagggcctgagcaagacctacctgtccaagacactggcccagtacacctccaagacatgcagcaactgtgggtttaccatcaccagcgccgactacgacagggtgctggagaagctgaagaagacagcaacaggctggatgaccacaattaacggcaaggagctgaaggtggagggccagattacctactacaacagatacaagagacagaacgtagtcaaggacctgtccgtcgagctggatagactgagcgaagaatctgtgaacaacgacatctcctcctggacaaagggcagaagcggagaagctctgagcctcctgaagaaaagattctcccatagacccgtgcaggagaagttcgtgtgcctgaactgcggcttcgagacacacgcagccgagcaagccgccctgaacatcgccagatcctggctgttcctgcggagccaggagtacaagaaataccagacaaacaagacaaccggcaacaccgataagagagccttcgtcgagacctggcagtccttttaccggaagaagcttaaggaggtgtggaaacctgccgtgcggtctggcggatctggcggaggctcccccagcggcctggtgaccttcgaggaggtggccgtgtacttcaccagggaggagggcgccctgctggaccccacccagagggccctgtacagggacgtgatgcaggagaactacgagaccgtggtgctgctgggcttccccgtgagcaagcccgacgtgatcagccagctggagaggggcgaggagccctgggtgcccgacctgcagggcagcgagaaggaggtgctgcccagggccgcctgcggcggcccaagcagcggcgcccctcctcccagcggcggcagcccagccggctccccaacctctaccgaggagggcacctctgagtccgccacccccgagagcggccctggcacctccaccgagcccagcgagggcagcgcacccggcagccctgccggcagccccacctccacagaggagggaaccagcaccgagcccagcgaaggcagcgccccaggcaccagcaccgagcctagtgagcaggagattaaacggatcaacaagatcagaagaagacttgtgaaagacagcaacaccaagaaggccggcaagacaggccccatgaaaaccctgctggttagagtgatgacacccgatctgagagagcggctggaaaacctgagaaagaagcctgaaaatatcccccagcccatcagcaatacatctagagccaacctgaataagctgctgaccgattacaccgaaatgaagaaggcgatcctgcatgtgtactgggaagagttccagaaggaccctgtgggcctgatgagccgggtggcccagcctgccagcaagaagatcgatcagaacaagctgaaacctgagatggacgagaagggcaacctgaccaccgccggctttgcctgctctcagtgtggccagcccctgttcgtgtacaagctggagcaggtgtctgagaagggcaaggcttacaccaactacttcggacggtgcaatgtggccgagcacgaaaagctgatcctgctggcccagctgaagcccgagaaggatagcgacgaagccgtgacatatagcctgggaaagtttgggcagagggccctggatttctacagcattcatgtgaccaaggagtccacccaccccgtgaagcccctggcccagatcgccggaaacagatacgcctccggacctgtgggaaaggccctgagcgacgcatgtatgggcacaatcgcctccttcctgtctaagtaccaggacatcatcatcgaacaccagaaggtggtgaagggcaaccagaagagactggagagcctgcgggagctggccggcaaggaaaacctggaataccctagcgtgaccctgccacctcagcctcacaccaaggagggcgttgatgcctacaacgaagtgatcgcccgggtgcgaatgtgggtgaacctgaacctgtggcagaagctgaagctaagcagagatgatgccaagcctctgctgagactgaagggattcccttcctttcctctggtcgagagacaggccaacgaagtggactggtgggacatggtgtgtaacgtgaagaagctgatcaacgagaaaaaggaggatggcaaggtgttttggcagaatctggctggctacaagagacaggaagccctgagaccatacctgagcagcgaggaagatcggaagaagggaaagaaattcgctcggtaccagctgggcgacctgctgctgcacctggaaaagaagcacggcgaggactggggaaaggtgtacgacgaggcctgggagcggattgacaagaaagtggaaggcctgagcaagcacatcaagctggaagaggaacggagaagcgaggacgcccagagcaaggccgccctgaccgactggctgcgggctaaggccagcttcgtgatcgagggcctgaaggaggccgacaaggacgagttctgcagatgcgagctgaagctgcagaagtggtacggggacctgcggggaaagcccttcgccatcgaagccgagaacagcatcctggacatcagcggcttcagcaagcagtacaactgtgccttcatctggcagaaggacggcgtgaagaagctgaacctgtacctgatcatcaactacttcaagggcggcaagctgcggttcaagaagatcaaacctgaagccttcgaagccaacagattctacaccgtgatcaacaaaaagagcggcgagatcgtgcccatggaggtgaacttcaacttcgacgaccccaacctgatcatcctgcctctggcctttggcaagagacagggcagagaattcatctggaacgacctgctgtccctggaaaccggcagcctgaagctggccaacggaagagtgatcgagaagacactgtacaacagaagaacccggcaggatgagcctgccctgttcgtggccctgaccttcgagcggcgggaggtcctggactcctccaatatcaaaccaatgaacctgatcggcgtggcaagaggcgaaaacatccccgccgtgatcgccctgaccgaccccgagggctgcccactgagccggtttaaggatagcctgggaaacccaacccacatcctgagaatcggcgagagctataaggagaagcagcggaccatccaggccaagaaggaggtggagcagcggagagccggcggctacagccggaagtacgccagcaaagccaagaatctggcagacgatatggtgagaaacaccgctagagatctgctgtactacgccgtgacccaggatgccatgctgatcttcgccaacctgagccggggcttcggccggcagggcaagcggaccttcatggccgagagacagtacacacggatggaggactggctgaccgccaagctggcctacgagggcctgagcaagacctacctgtccaagacactggcccagtacacctccaagacatgcagcaactgtgggtttaccatcaccagcgccgactacgacagggtgctggagaagctgaagaagacagcaacaggctggatgaccacaattaacggcaaggagctgaaggtggagggccagattacctactacaacagatacaagagacagaacgtagtcaaggacctgtccgtcgagctggatagactgagcgaagaatctgtgaacaacgacatctcctcctggacaaagggcagaagcggagaagctctgagcctcctgaagaaaagattctcccatagacccgtgcaggagaagttcgtgtgcctgaactgcggcttcgagacacacgcagccgagcaagccgccctgaacatcgccagatcctggctgttcctgcggagccaggagtacaagaaataccagacaaacaagacaaccggcaacaccgataagagagccttcgtcgagacctggcagtccttttaccggaagaagcttaaggaggtgtggaaacctgccgtgcggtctggcggatctggcggaggctcctcccagcggcctggtgaccttcgaggaggtggccgtgtacttcaccagggaggagggcgccctgctggaccccacccagagggccctgtacagggacgtgatgcaggagaactacgagaccgtggtgctgctgggcttccccgtgagcaagcccgacgtgatcagccagctggagaggggcgaggagccctgggtgcccgacctgcagggcagcgagaaggaggtgctgcccagggccgcctgcggatctggctccggcagcggccccaagaaaaagagaaaagtctaagctgccttctgcggggcttgccttctggccatgcccttcttctctcccttgcacctgtacctcttggtctttgaataaagcctgagtaggaaggctagcaaaaaaaaaaaaaaaaaaaaaaaaaaaaaaaaaaaaaaaaaaaaaaaaaaaaaaaaaaaaaaaaaaaaaaaaaaaaaaaa

SEQ ID NO: 16880 - RNA, 9485 nt, synthetic construct
  source 1..9485: mol_type = other RNA
aggaaataagagagaaaagaagagtaagaagaaatataagagccaccatggcccctaagaagaagcgtaaagtgagccggatggaacgcctcgtctacgaggtgcggcagaagtgcagaaacatcgaggacatctgcatctcctgcggatctctgaacgtgaccctggagcacccactgttcatcggcggcatgtgccagaactgtaaaaactgttttctggagtgtgcctatcaatacgacgatgacggctaccagagctactgcaccatctgttgcggcggaagagaggtgctgatgtgtggaaataacaactgctgccggtgcttctgcgtggaatgcgtggacctgctggtgggccccggcgccgcccaggccgctattaaggaagatccttggaactgctacatgtgcggccacaagggcacatacggcctgctgagacggagagaggactggcctagcagactgcagatgttcttcgccaataaccacgaccaggagttcgacccccctaaggtgtaccctcccgtccccgccgagaagagaaagcccatccgggtcctgagcctgttcgatggcatcgccaccggtctgctggtgctgaaggacctgggcatccaggtggataggtacattgcctccgaggtgtgcgaggactccatcaccgtgggaatggtgcgtcatcagggcaagatcatgtacgtgggcgacgtgcggagcgtgacacagaagcatatccaggagtggggccctttcgacctggtgatcggcggcagcccttgcaatgacctgagcatcgtgaacccagcccggaagggcctgtacgagggaaccggcagactgttcttcgagttttacagactgctgcacgacgcccggcctaaggaaggcgacgaccggcccttcttttggctgttcgagaatgtggtggccatgggagtcagcgacaagcgggatattagccggttcctggagagcaaccccgtgatgatcgatgccaaggaagtgagcgccgcccaccgggccagatacttctggggcaatctgcctggcatgaacagacccctggccagcaccgtgaacgacaagctggagctgcaggagtgcctggagcacggccggatcgccaagttcagcaaggtgagaaccatcaccacccgaagcaacagcatcaaacaaggcaaggaccagcactttcctgtgttcatgaacgagaaggaggacatcctgtggtgtaccgagatggagagagtgttcgggttcccagtccactacacagatgtcagcaacatgtctagactggccagacagagactgctgggaagaagctggtccgtccctgtgatcagacacctgttcgcccctctgaaggagtacttcgcctgcgtgagcagcggcaacagcaacgccaacagccggggccccagcttctctagcggcctggtgccactgtccctgagagggagccacatgggccccatggagatctacaaaaccgtgagcgcctggaagcggcagcctgtgcgcgtgctgagcctgtttcggaatatcgataaagtcctgaaaagcctgggattcctggagagcggctctggctccggcggtggcaccctgaagtacgtggaggatgtgacaaacgtggtcagacgggatgtggagaagtggggccccttcgatctggtgtacggcagcacccaacccctgggcagctcttgtgaccggtgccctggctggtacatgtttcagttccaccggatcctgcagtacgccctgccgagacaggagtcccagcggccattcttttggattttcatggacaacttgctgctgaccgaggatgaccaggaaactaccactcggttcctgcagaccgaagccgtgaccctgcaggacgtgagaggccgggactaccagaacgccatgcgggtgtggtccaacatccctggactgaaaagcaagcacgcacctctgacccctaaagaagaggagtacctgcaggcccaggtgcggagcagaagcaagctggacgcccctaaggtggatctgctggtgaagaattgcctcctgcccctgagagagtacttcaagtatttcagccagaatagtctgcccctgggaggcagcggcggcggcgccctggtgacatttgaggacgtcgccgtgcggttcacccaggaggaatgggctctgctggatccttctcagaaaatcctgtaccgggacgtgatgagagagacataccggaatctgacctccgtgggcatcaactgggaatgttgggaccttgaagcctgcttcagaagcctgggaagaaacctgagagtgcaggtggtgaagagaaagtgcgagctgaccaacagcggcccctgcgccgagggcggcccaagcagcggcgcccctcctcccagcggcggcagcccagccggctccccaacctctaccgaggagggcacctctgagtccgccacccccgagagcggccctggcacctccaccgagcccagcgagggcagcgcacccggcagccctgccggcagccccacctccacagaggagggaaccagcaccgagcccagcgaaggcagcgccccaggcaccagcaccgagcctagtgagcaggagattaaacggatcaacaagatcagaagaagacttgtgaaagacagcaacaccaagaaggccggcaagacaggccccatgaaaaccctgctggttagagtgatgacacccgatctgagagagcggctggaaaacctgagaaagaagcctgaaaatatcccccagcccatcagcaatacatctagagccaacctgaataagctgctgaccgattacaccgaaatgaagaaggcgatcctgcatgtgtactgggaagagttccagaaggaccctgtgggcctgatgagccgggtggcccagcctgccagcaagaagatcgatcagaacaagctgaaacctgagatggacgagaagggcaacctgaccaccgccggctttgcctgctctcagtgtggccagcccctgttcgtgtacaagctggagcaggtgtctgagaagggcaaggcttacaccaactacttcggacggtgcaatgtggccgagcacgaaaagctgatcctgctggcccagctgaagcccgagaaggatagcgacgaagccgtgacatatagcctgggaaagtttgggcagagggccctggatttctacagcattcatgtgaccaaggagtccacccaccccgtgaagcccctggcccagatcgccggaaacagatacgcctccggacctgtgggaaaggccctgagcgacgcatgtatgggcacaatcgcctccttcctgtctaagtaccaggacatcatcatcgaacaccagaaggtggtgaagggcaaccagaagagactggagagcctgcgggagctggccggcaaggaaaacctggaataccctagcgtgaccctgccacctcagcctcacaccaaggagggcgttgatgcctacaacgaagtgatcgcccgggtgcgaatgtgggtgaacctgaacctgtggcagaagctgaagctaagcagagatgatgccaagcctctgctgagactgaagggattcccttcctttcctctggtcgagagacaggccaacgaagtggactggtgggacatggtgtgtaacgtgaagaagctgatcaacgagaaaaaggaggatggcaaggtgttttggcagaatctggctggctacaagagacaggaagccctgagaccatacctgagcagcgaggaagatcggaagaagggaaagaaattcgctcggtaccagctgggcgacctgctgctgcacctggaaaagaagcacggcgaggactggggaaaggtgtacgacgaggcctgggagcggattgacaagaaagtggaaggcctgagcaagcacatcaagctggaagaggaacggagaagcgaggacgcccagagcaaggccgccctgaccgactggctgcgggctaaggccagcttcgtgatcgagggcctgaaggaggccgacaaggacgagttctgcagatgcgagctgaagctgcagaagtggtacggggacctgcggggaaagcccttcgccatcgaagccgagaacagcatcctggacatcagcggcttcagcaagcagtacaactgtgccttcatctggcagaaggacggcgtgaagaagctgaacctgtacctgatcatcaactacttcaagggcggcaagctgcggttcaagaagatcaaacctgaagccttcgaagccaacagattctacaccgtgatcaacaaaaagagcggcgagatcgtgcccatggaggtgaacttcaacttcgacgaccccaacctgatcatcctgcctctggcctttggcaagagacagggcagagaattcatctggaacgacctgctgtccctggaaaccggcagcctgaagctggccaacggaagagtgatcgagaagacactgtacaacagaagaacccggcaggatgagcctgccctgttcgtggccctgaccttcgagcggcgggaggtcctggactcctccaatatcaaaccaatgaacctgatcggcgtggcaagaggcgaaaacatccccgccgtgatcgccctgaccgaccccgagggctgcccactgagccggtttaaggatagcctgggaaacccaacccacatcctgagaatcggcgagagctataaggagaagcagcggaccatccaggccaagaaggaggtggagcagcggagagccggcggctacagccggaagtacgccagcaaagccaagaatctggcagacgatatggtgagaaacaccgctagagatctgctgtactacgccgtgacccaggatgccatgctgatcttcgccaacctgagccggggcttcggccggcagggcaagcggaccttcatggccgagagacagtacacacggatggaggactggctgaccgccaagctggcctacgagggcctgagcaagacctacctgtccaagacactggcccagtacacctccaagacatgcagcaactgtgggtttaccatcaccagcgccgactacgacagggtgctggagaagctgaagaagacagcaacaggctggatgaccacaattaacggcaaggagctgaaggtggagggccagattacctactacaacagatacaagagacagaacgtagtcaaggacctgtccgtcgagctggatagactgagcgaagaatctgtgaacaacgacatctcctcctggacaaagggcagaagcggagaagctctgagcctcctgaagaaaagattctcccatagacccgtgcaggagaagttcgtgtgcctgaactgcggcttcgagacacacgcagccgagcaagccgccctgaacatcgccagatcctggctgttcctgcggagccaggagtacaagaaataccagacaaacaagacaaccggcaacaccgataagagagccttcgtcgagacctggcagtccttttaccggaagaagcttaaggaggtgtggaaacctgccgtgcggtctggcggatctggcggaggctccatggccttcagggacgtggccgtggacttcacccaggaggagtggatgctgctgagccccgcccagaggagcctgtacagggaggtgatgctggagaactacagcaacctggtgagcctgggcatccccttcagcaagcccaagctgatcacccagctggagcagggcaaggagacctggagggaggagaggaagtgcccccccgccaacggcccccccgagcccaagcccgagctgcacctgggcggcccaagcagcggcgcccctcctcccagcggcggcagcccagccggctccccaacctctaccgaggagggcacctctgagtccgccacccccgagagcggccctggcacctccaccgagcccagcgagggcagcgcacccggcagccctgccggcagccccacctccacagaggagggaaccagcaccgagcccagcgaaggcagcgccccaggcaccagcaccgagcctagtgagcaggagattaaacggatcaacaagatcagaagaagacttgtgaaagacagcaacaccaagaaggccggcaagacaggccccatgaaaaccctgctggttagagtgatgacacccgatctgagagagcggctggaaaacctgagaaagaagcctgaaaatatcccccagcccatcagcaatacatctagagccaacctgaataagctgctgaccgattacaccgaaatgaagaaggcgatcctgcatgtgtactgggaagagttccagaaggaccctgtgggcctgatgagccgggtggcccagcctgccagcaagaagatcgatcagaacaagctgaaacctgagatggacgagaagggcaacctgaccaccgccggctttgcctgctctcagtgtggccagcccctgttcgtgtacaagctggagcaggtgtctgagaagggcaaggcttacaccaactacttcggacggtgcaatgtggccgagcacgaaaagctgatcctgctggcccagctgaagcccgagaaggatagcgacgaagccgtgacatatagcctgggaaagtttgggcagagggccctggatttctacagcattcatgtgaccaaggagtccacccaccccgtgaagcccctggcccagatcgccggaaacagatacgcctccggacctgtgggaaaggccctgagcgacgcatgtatgggcacaatcgcctccttcctgtctaagtaccaggacatcatcatcgaacaccagaaggtggtgaagggcaaccagaagagactggagagcctgcgggagctggccggcaaggaaaacctggaataccctagcgtgaccctgccacctcagcctcacaccaaggagggcgttgatgcctacaacgaagtgatcgcccgggtgcgaatgtgggtgaacctgaacctgtggcagaagctgaagctaagcagagatgatgccaagcctctgctgagactgaagggattcccttcctttcctctggtcgagagacaggccaacgaagtggactggtgggacatggtgtgtaacgtgaagaagctgatcaacgagaaaaaggaggatggcaaggtgttttggcagaatctggctggctacaagagacaggaagccctgagaccatacctgagcagcgaggaagatcggaagaagggaaagaaattcgctcggtaccagctgggcgacctgctgctgcacctggaaaagaagcacggcgaggactggggaaaggtgtacgacgaggcctgggagcggattgacaagaaagtggaaggcctgagcaagcacatcaagctggaagaggaacggagaagcgaggacgcccagagcaaggccgccctgaccgactggctgcgggctaaggccagcttcgtgatcgagggcctgaaggaggccgacaaggacgagttctgcagatgcgagctgaagctgcagaagtggtacggggacctgcggggaaagcccttcgccatcgaagccgagaacagcatcctggacatcagcggcttcagcaagcagtacaactgtgccttcatctggcagaaggacggcgtgaagaagctgaacctgtacctgatcatcaactacttcaagggcggcaagctgcggttcaagaagatcaaacctgaagccttcgaagccaacagattctacaccgtgatcaacaaaaagagcggcgagatcgtgcccatggaggtgaacttcaacttcgacgaccccaacctgatcatcctgcctctggcctttggcaagagacagggcagagaattcatctggaacgacctgctgtccctggaaaccggcagcctgaagctggccaacggaagagtgatcgagaagacactgtacaacagaagaacccggcaggatgagcctgccctgttcgtggccctgaccttcgagcggcgggaggtcctggactcctccaatatcaaaccaatgaacctgatcggcgtggcaagaggcgaaaacatccccgccgtgatcgccctgaccgaccccgagggctgcccactgagccggtttaaggatagcctgggaaacccaacccacatcctgagaatcggcgagagctataaggagaagcagcggaccatccaggccaagaaggaggtggagcagcggagagccggcggctacagccggaagtacgccagcaaagccaagaatctggcagacgatatggtgagaaacaccgctagagatctgctgtactacgccgtgacccaggatgccatgctgatcttcgccaacctgagccggggcttcggccggcagggcaagcggaccttcatggccgagagacagtacacacggatggaggactggctgaccgccaagctggcctacgagggcctgagcaagacctacctgtccaagacactggcccagtacacctccaagacatgcagcaactgtgggtttaccatcaccagcgccgactacgacagggtgctggagaagctgaagaagacagcaacaggctggatgaccacaattaacggcaaggagctgaaggtggagggccagattacctactacaacagatacaagagacagaacgtagtcaaggacctgtccgtcgagctggatagactgagcgaagaatctgtgaacaacgacatctcctcctggacaaagggcagaagcggagaagctctgagcctcctgaagaaaagattctcccatagacccgtgcaggagaagttcgtgtgcctgaactgcggcttcgagacacacgcagccgagcaagccgccctgaacatcgccagatcctggctgttcctgcggagccaggagtacaagaaataccagacaaacaagacaaccggcaacaccgataagagagccttcgtcgagacctggcagtccttttaccggaagaagcttaaggaggtgtggaaacctgccgtgcggtctggcggatctggcggaggctcctatggccttcagggacgtggccgtggacttcacccaggaggagtggatgctgctgagccccgcccagaggagcctgtacagggaggtgatgctggagaactacagcaacctggtgagcctgggcatccccttcagcaagcccaagctgatcacccagctggagcagggcaaggagacctggagggaggagaggaagtgcccccccgccaacggcccccccgagcccaagcccgagctgcacctgggatctggctccggcagcggccccaagaaaaagagaaaagtctaagctgccttctgcggggcttgccttctggccatgcccttcttctctcccttgcacctgtacctcttggtctttgaataaagcctgagtaggaaggctagcaaaaaaaaaaaaaaaaaaaaaaaaaaaaaaaaaaaaaaaaaaaaaaaaaaaaaaaaaaaaaaaaaaaaaaaaaaaaaaaa

SEQ ID NO: 16881 - RNA, 9485 nt, synthetic construct
  source 1..9485: mol_type = other RNA
aggaaataagagagaaaagaagagtaagaagaaatataagagccaccatggcccctaagaagaagcgtaaagtgagccggatggaacgcctcgtctacgaggtgcggcagaagtgcagaaacatcgaggacatctgcatctcctgcggatctctgaacgtgaccctggagcacccactgttcatcggcggcatgtgccagaactgtaaaaactgttttctggagtgtgcctatcaatacgacgatgacggctaccagagctactgcaccatctgttgcggcggaagagaggtgctgatgtgtggaaataacaactgctgccggtgcttctgcgtggaatgcgtggacctgctggtgggccccggcgccgcccaggccgctattaaggaagatccttggaactgctacatgtgcggccacaagggcacatacggcctgctgagacggagagaggactggcctagcagactgcagatgttcttcgccaataaccacgaccaggagttcgacccccctaaggtgtaccctcccgtccccgccgagaagagaaagcccatccgggtcctgagcctgttcgatggcatcgccaccggtctgctggtgctgaaggacctgggcatccaggtggataggtacattgcctccgaggtgtgcgaggactccatcaccgtgggaatggtgcgtcatcagggcaagatcatgtacgtgggcgacgtgcggagcgtgacacagaagcatatccaggagtggggccctttcgacctggtgatcggcggcagcccttgcaatgacctgagcatcgtgaacccagcccggaagggcctgtacgagggaaccggcagactgttcttcgagttttacagactgctgcacgacgcccggcctaaggaaggcgacgaccggcccttcttttggctgttcgagaatgtggtggccatgggagtcagcgacaagcgggatattagccggttcctggagagcaaccccgtgatgatcgatgccaaggaagtgagcgccgcccaccgggccagatacttctggggcaatctgcctggcatgaacagacccctggccagcaccgtgaacgacaagctggagctgcaggagtgcctggagcacggccggatcgccaagttcagcaaggtgagaaccatcaccacccgaagcaacagcatcaaacaaggcaaggaccagcactttcctgtgttcatgaacgagaaggaggacatcctgtggtgtaccgagatggagagagtgttcgggttcccagtccactacacagatgtcagcaacatgtctagactggccagacagagactgctgggaagaagctggtccgtccctgtgatcagacacctgttcgcccctctgaaggagtacttcgcctgcgtgagcagcggcaacagcaacgccaacagccggggccccagcttctctagcggcctggtgccactgtccctgagagggagccacatgggccccatggagatctacaaaaccgtgagcgcctggaagcggcagcctgtgcgcgtgctgagcctgtttcggaatatcgataaagtcctgaaaagcctgggattcctggagagcggctctggctccggcggtggcaccctgaagtacgtggaggatgtgacaaacgtggtcagacgggatgtggagaagtggggccccttcgatctggtgtacggcagcacccaacccctgggcagctcttgtgaccggtgccctggctggtacatgtttcagttccaccggatcctgcagtacgccctgccgagacaggagtcccagcggccattcttttggattttcatggacaacttgctgctgaccgaggatgaccaggaaactaccactcggttcctgcagaccgaagccgtgaccctgcaggacgtgagaggccgggactaccagaacgccatgcgggtgtggtccaacatccctggactgaaaagcaagcacgcacctctgacccctaaagaagaggagtacctgcaggcccaggtgcggagcagaagcaagctggacgcccctaaggtggatctgctggtgaagaattgcctcctgcccctgagagagtacttcaagtatttcagccagaatagtctgcccctgggaggcagcggcggcggcgccctggtgacatttgaggacgtcgccgtgcggttcacccaggaggaatgggctctgctggatccttctcagaaaatcctgtaccgggacgtgatgagagagacataccggaatctgacctccgtgggcatcaactgggaatgttgggaccttgaagcctgcttcagaagcctgggaagaaacctgagagtgcaggtggtgaagagaaagtgcgagctgaccaacagcggcccctgcgccgagggcggcccaagcagcggcgcccctcctcccagcggcggcagcccagccggctccccaacctctaccgaggagggcacctctgagtccgccacccccgagagcggccctggcacctccaccgagcccagcgagggcagcgcacccggcagccctgccggcagccccacctccacagaggagggaaccagcaccgagcccagcgaaggcagcgccccaggcaccagcaccgagcctagtgagcaggagattaaacggatcaacaagatcagaagaagacttgtgaaagacagcaacaccaagaaggccggcaagacaggccccatgaaaaccctgctggttagagtgatgacacccgatctgagagagcggctggaaaacctgagaaagaagcctgaaaatatcccccagcccatcagcaatacatctagagccaacctgaataagctgctgaccgattacaccgaaatgaagaaggcgatcctgcatgtgtactgggaagagttccagaaggaccctgtgggcctgatgagccgggtggcccagcctgccagcaagaagatcgatcagaacaagctgaaacctgagatggacgagaagggcaacctgaccaccgccggctttgcctgctctcagtgtggccagcccctgttcgtgtacaagctggagcaggtgtctgagaagggcaaggcttacaccaactacttcggacggtgcaatgtggccgagcacgaaaagctgatcctgctggcccagctgaagcccgagaaggatagcgacgaagccgtgacatatagcctgggaaagtttgggcagagggccctggatttctacagcattcatgtgaccaaggagtccacccaccccgtgaagcccctggcccagatcgccggaaacagatacgcctccggacctgtgggaaaggccctgagcgacgcatgtatgggcacaatcgcctccttcctgtctaagtaccaggacatcatcatcgaacaccagaaggtggtgaagggcaaccagaagagactggagagcctgcgggagctggccggcaaggaaaacctggaataccctagcgtgaccctgccacctcagcctcacaccaaggagggcgttgatgcctacaacgaagtgatcgcccgggtgcgaatgtgggtgaacctgaacctgtggcagaagctgaagctaagcagagatgatgccaagcctctgctgagactgaagggattcccttcctttcctctggtcgagagacaggccaacgaagtggactggtgggacatggtgtgtaacgtgaagaagctgatcaacgagaaaaaggaggatggcaaggtgttttggcagaatctggctggctacaagagacaggaagccctgagaccatacctgagcagcgaggaagatcggaagaagggaaagaaattcgctcggtaccagctgggcgacctgctgctgcacctggaaaagaagcacggcgaggactggggaaaggtgtacgacgaggcctgggagcggattgacaagaaagtggaaggcctgagcaagcacatcaagctggaagaggaacggagaagcgaggacgcccagagcaaggccgccctgaccgactggctgcgggctaaggccagcttcgtgatcgagggcctgaaggaggccgacaaggacgagttctgcagatgcgagctgaagctgcagaagtggtacggggacctgcggggaaagcccttcgccatcgaagccgagaacagcatcctggacatcagcggcttcagcaagcagtacaactgtgccttcatctggcagaaggacggcgtgaagaagctgaacctgtacctgatcatcaactacttcaagggcggcaagctgcggttcaagaagatcaaacctgaagccttcgaagccaacagattctacaccgtgatcaacaaaaagagcggcgagatcgtgcccatggaggtgaacttcaacttcgacgaccccaacctgatcatcctgcctctggcctttggcaagagacagggcagagaattcatctggaacgacctgctgtccctggaaaccggcagcctgaagctggccaacggaagagtgatcgagaagacactgtacaacagaagaacccggcaggatgagcctgccctgttcgtggccctgaccttcgagcggcgggaggtcctggactcctccaatatcaaaccaatgaacctgatcggcgtggcaagaggcgaaaacatccccgccgtgatcgccctgaccgaccccgagggctgcccactgagccggtttaaggatagcctgggaaacccaacccacatcctgagaatcggcgagagctataaggagaagcagcggaccatccaggccaagaaggaggtggagcagcggagagccggcggctacagccggaagtacgccagcaaagccaagaatctggcagacgatatggtgagaaacaccgctagagatctgctgtactacgccgtgacccaggatgccatgctgatcttcgccaacctgagccggggcttcggccggcagggcaagcggaccttcatggccgagagacagtacacacggatggaggactggctgaccgccaagctggcctacgagggcctgagcaagacctacctgtccaagacactggcccagtacacctccaagacatgcagcaactgtgggtttaccatcaccagcgccgactacgacagggtgctggagaagctgaagaagacagcaacaggctggatgaccacaattaacggcaaggagctgaaggtggagggccagattacctactacaacagatacaagagacagaacgtagtcaaggacctgtccgtcgagctggatagactgagcgaagaatctgtgaacaacgacatctcctcctggacaaagggcagaagcggagaagctctgagcctcctgaagaaaagattctcccatagacccgtgcaggagaagttcgtgtgcctgaactgcggcttcgagacacacgcagccgagcaagccgccctgaacatcgccagatcctggctgttcctgcggagccaggagtacaagaaataccagacaaacaagacaaccggcaacaccgataagagagccttcgtcgagacctggcagtccttttaccggaagaagcttaaggaggtgtggaaacctgccgtgcggtctggcggatctggcggaggctccatgggcctgctgaccttccaggacgtgaccgtggacttcacccaggaggagtgggagtgcctggacctgggccagaggggcctgtacagggacgtgatgctggagaactacggcaacctggcctgcctgggcctggtggtgagcaagcccgacctggtgaccttcctggagcagatgaaggacccctggaacgtgaggaggatcgagaccgccatctaccccggcatgtgcctgctgaacatcggcggcccaagcagcggcgcccctcctcccagcggcggcagcccagccggctccccaacctctaccgaggagggcacctctgagtccgccacccccgagagcggccctggcacctccaccgagcccagcgagggcagcgcacccggcagccctgccggcagccccacctccacagaggagggaaccagcaccgagcccagcgaaggcagcgccccaggcaccagcaccgagcctagtgagcaggagattaaacggatcaacaagatcagaagaagacttgtgaaagacagcaacaccaagaaggccggcaagacaggccccatgaaaaccctgctggttagagtgatgacacccgatctgagagagcggctggaaaacctgagaaagaagcctgaaaatatcccccagcccatcagcaatacatctagagccaacctgaataagctgctgaccgattacaccgaaatgaagaaggcgatcctgcatgtgtactgggaagagttccagaaggaccctgtgggcctgatgagccgggtggcccagcctgccagcaagaagatcgatcagaacaagctgaaacctgagatggacgagaagggcaacctgaccaccgccggctttgcctgctctcagtgtggccagcccctgttcgtgtacaagctggagcaggtgtctgagaagggcaaggcttacaccaactacttcggacggtgcaatgtggccgagcacgaaaagctgatcctgctggcccagctgaagcccgagaaggatagcgacgaagccgtgacatatagcctgggaaagtttgggcagagggccctggatttctacagcattcatgtgaccaaggagtccacccaccccgtgaagcccctggcccagatcgccggaaacagatacgcctccggacctgtgggaaaggccctgagcgacgcatgtatgggcacaatcgcctccttcctgtctaagtaccaggacatcatcatcgaacaccagaaggtggtgaagggcaaccagaagagactggagagcctgcgggagctggccggcaaggaaaacctggaataccctagcgtgaccctgccacctcagcctcacaccaaggagggcgttgatgcctacaacgaagtgatcgcccgggtgcgaatgtgggtgaacctgaacctgtggcagaagctgaagctaagcagagatgatgccaagcctctgctgagactgaagggattcccttcctttcctctggtcgagagacaggccaacgaagtggactggtgggacatggtgtgtaacgtgaagaagctgatcaacgagaaaaaggaggatggcaaggtgttttggcagaatctggctggctacaagagacaggaagccctgagaccatacctgagcagcgaggaagatcggaagaagggaaagaaattcgctcggtaccagctgggcgacctgctgctgcacctggaaaagaagcacggcgaggactggggaaaggtgtacgacgaggcctgggagcggattgacaagaaagtggaaggcctgagcaagcacatcaagctggaagaggaacggagaagcgaggacgcccagagcaaggccgccctgaccgactggctgcgggctaaggccagcttcgtgatcgagggcctgaaggaggccgacaaggacgagttctgcagatgcgagctgaagctgcagaagtggtacggggacctgcggggaaagcccttcgccatcgaagccgagaacagcatcctggacatcagcggcttcagcaagcagtacaactgtgccttcatctggcagaaggacggcgtgaagaagctgaacctgtacctgatcatcaactacttcaagggcggcaagctgcggttcaagaagatcaaacctgaagccttcgaagccaacagattctacaccgtgatcaacaaaaagagcggcgagatcgtgcccatggaggtgaacttcaacttcgacgaccccaacctgatcatcctgcctctggcctttggcaagagacagggcagagaattcatctggaacgacctgctgtccctggaaaccggcagcctgaagctggccaacggaagagtgatcgagaagacactgtacaacagaagaacccggcaggatgagcctgccctgttcgtggccctgaccttcgagcggcgggaggtcctggactcctccaatatcaaaccaatgaacctgatcggcgtggcaagaggcgaaaacatccccgccgtgatcgccctgaccgaccccgagggctgcccactgagccggtttaaggatagcctgggaaacccaacccacatcctgagaatcggcgagagctataaggagaagcagcggaccatccaggccaagaaggaggtggagcagcggagagccggcggctacagccggaagtacgccagcaaagccaagaatctggcagacgatatggtgagaaacaccgctagagatctgctgtactacgccgtgacccaggatgccatgctgatcttcgccaacctgagccggggcttcggccggcagggcaagcggaccttcatggccgagagacagtacacacggatggaggactggctgaccgccaagctggcctacgagggcctgagcaagacctacctgtccaagacactggcccagtacacctccaagacatgcagcaactgtgggtttaccatcaccagcgccgactacgacagggtgctggagaagctgaagaagacagcaacaggctggatgaccacaattaacggcaaggagctgaaggtggagggccagattacctactacaacagatacaagagacagaacgtagtcaaggacctgtccgtcgagctggatagactgagcgaagaatctgtgaacaacgacatctcctcctggacaaagggcagaagcggagaagctctgagcctcctgaagaaaagattctcccatagacccgtgcaggagaagttcgtgtgcctgaactgcggcttcgagacacacgcagccgagcaagccgccctgaacatcgccagatcctggctgttcctgcggagccaggagtacaagaaataccagacaaacaagacaaccggcaacaccgataagagagccttcgtcgagacctggcagtccttttaccggaagaagcttaaggaggtgtggaaacctgccgtgcggtctggcggatctggcggaggctcctatgggcctgctgaccttccaggacgtgaccgtggacttcacccaggaggagtgggagtgcctggacctgggccagaggggcctgtacagggacgtgatgctggagaactacggcaacctggcctgcctgggcctggtggtgagcaagcccgacctggtgaccttcctggagcagatgaaggacccctggaacgtgaggaggatcgagaccgccatctaccccggcatgtgcctgctgaacatcggatctggctccggcagcggccccaagaaaaagagaaaagtctaagctgccttctgcggggcttgccttctggccatgcccttcttctctcccttgcacctgtacctcttggtctttgaataaagcctgagtaggaaggctagcaaaaaaaaaaaaaaaaaaaaaaaaaaaaaaaaaaaaaaaaaaaaaaaaaaaaaaaaaaaaaaaaaaaaaaaaaaaaaaaa

SEQ ID NO: 16882 - RNA, 9485 nt, synthetic construct
  source 1..9485: mol_type = other RNA
aggaaataagagagaaaagaagagtaagaagaaatataagagccaccatggcccctaagaagaagcgtaaagtgagccggatggaacgcctcgtctacgaggtgcggcagaagtgcagaaacatcgaggacatctgcatctcctgcggatctctgaacgtgaccctggagcacccactgttcatcggcggcatgtgccagaactgtaaaaactgttttctggagtgtgcctatcaatacgacgatgacggctaccagagctactgcaccatctgttgcggcggaagagaggtgctgatgtgtggaaataacaactgctgccggtgcttctgcgtggaatgcgtggacctgctggtgggccccggcgccgcccaggccgctattaaggaagatccttggaactgctacatgtgcggccacaagggcacatacggcctgctgagacggagagaggactggcctagcagactgcagatgttcttcgccaataaccacgaccaggagttcgacccccctaaggtgtaccctcccgtccccgccgagaagagaaagcccatccgggtcctgagcctgttcgatggcatcgccaccggtctgctggtgctgaaggacctgggcatccaggtggataggtacattgcctccgaggtgtgcgaggactccatcaccgtgggaatggtgcgtcatcagggcaagatcatgtacgtgggcgacgtgcggagcgtgacacagaagcatatccaggagtggggccctttcgacctggtgatcggcggcagcccttgcaatgacctgagcatcgtgaacccagcccggaagggcctgtacgagggaaccggcagactgttcttcgagttttacagactgctgcacgacgcccggcctaaggaaggcgacgaccggcccttcttttggctgttcgagaatgtggtggccatgggagtcagcgacaagcgggatattagccggttcctggagagcaaccccgtgatgatcgatgccaaggaagtgagcgccgcccaccgggccagatacttctggggcaatctgcctggcatgaacagacccctggccagcaccgtgaacgacaagctggagctgcaggagtgcctggagcacggccggatcgccaagttcagcaaggtgagaaccatcaccacccgaagcaacagcatcaaacaaggcaaggaccagcactttcctgtgttcatgaacgagaaggaggacatcctgtggtgtaccgagatggagagagtgttcgggttcccagtccactacacagatgtcagcaacatgtctagactggccagacagagactgctgggaagaagctggtccgtccctgtgatcagacacctgttcgcccctctgaaggagtacttcgcctgcgtgagcagcggcaacagcaacgccaacagccggggccccagcttctctagcggcctggtgccactgtccctgagagggagccacatgggccccatggagatctacaaaaccgtgagcgcctggaagcggcagcctgtgcgcgtgctgagcctgtttcggaatatcgataaagtcctgaaaagcctgggattcctggagagcggctctggctccggcggtggcaccctgaagtacgtggaggatgtgacaaacgtggtcagacgggatgtggagaagtggggccccttcgatctggtgtacggcagcacccaacccctgggcagctcttgtgaccggtgccctggctggtacatgtttcagttccaccggatcctgcagtacgccctgccgagacaggagtcccagcggccattcttttggattttcatggacaacttgctgctgaccgaggatgaccaggaaactaccactcggttcctgcagaccgaagccgtgaccctgcaggacgtgagaggccgggactaccagaacgccatgcgggtgtggtccaacatccctggactgaaaagcaagcacgcacctctgacccctaaagaagaggagtacctgcaggcccaggtgcggagcagaagcaagctggacgcccctaaggtggatctgctggtgaagaattgcctcctgcccctgagagagtacttcaagtatttcagccagaatagtctgcccctgggaggcagcggcggcggcgccctggtgacatttgaggacgtcgccgtgcggttcacccaggaggaatgggctctgctggatccttctcagaaaatcctgtaccgggacgtgatgagagagacataccggaatctgacctccgtgggcatcaactgggaatgttgggaccttgaagcctgcttcagaagcctgggaagaaacctgagagtgcaggtggtgaagagaaagtgcgagctgaccaacagcggcccctgcgccgagggcggcccaagcagcggcgcccctcctcccagcggcggcagcccagccggctccccaacctctaccgaggagggcacctctgagtccgccacccccgagagcggccctggcacctccaccgagcccagcgagggcagcgcacccggcagccctgccggcagccccacctccacagaggagggaaccagcaccgagcccagcgaaggcagcgccccaggcaccagcaccgagcctagtgagcaggagattaaacggatcaacaagatcagaagaagacttgtgaaagacagcaacaccaagaaggccggcaagacaggccccatgaaaaccctgctggttagagtgatgacacccgatctgagagagcggctggaaaacctgagaaagaagcctgaaaatatcccccagcccatcagcaatacatctagagccaacctgaataagctgctgaccgattacaccgaaatgaagaaggcgatcctgcatgtgtactgggaagagttccagaaggaccctgtgggcctgatgagccgggtggcccagcctgccagcaagaagatcgatcagaacaagctgaaacctgagatggacgagaagggcaacctgaccaccgccggctttgcctgctctcagtgtggccagcccctgttcgtgtacaagctggagcaggtgtctgagaagggcaaggcttacaccaactacttcggacggtgcaatgtggccgagcacgaaaagctgatcctgctggcccagctgaagcccgagaaggatagcgacgaagccgtgacatatagcctgggaaagtttgggcagagggccctggatttctacagcattcatgtgaccaaggagtccacccaccccgtgaagcccctggcccagatcgccggaaacagatacgcctccggacctgtgggaaaggccctgagcgacgcatgtatgggcacaatcgcctccttcctgtctaagtaccaggacatcatcatcgaacaccagaaggtggtgaagggcaaccagaagagactggagagcctgcgggagctggccggcaaggaaaacctggaataccctagcgtgaccctgccacctcagcctcacaccaaggagggcgttgatgcctacaacgaagtgatcgcccgggtgcgaatgtgggtgaacctgaacctgtggcagaagctgaagctaagcagagatgatgccaagcctctgctgagactgaagggattcccttcctttcctctggtcgagagacaggccaacgaagtggactggtgggacatggtgtgtaacgtgaagaagctgatcaacgagaaaaaggaggatggcaaggtgttttggcagaatctggctggctacaagagacaggaagccctgagaccatacctgagcagcgaggaagatcggaagaagggaaagaaattcgctcggtaccagctgggcgacctgctgctgcacctggaaaagaagcacggcgaggactggggaaaggtgtacgacgaggcctgggagcggattgacaagaaagtggaaggcctgagcaagcacatcaagctggaagaggaacggagaagcgaggacgcccagagcaaggccgccctgaccgactggctgcgggctaaggccagcttcgtgatcgagggcctgaaggaggccgacaaggacgagttctgcagatgcgagctgaagctgcagaagtggtacggggacctgcggggaaagcccttcgccatcgaagccgagaacagcatcctggacatcagcggcttcagcaagcagtacaactgtgccttcatctggcagaaggacggcgtgaagaagctgaacctgtacctgatcatcaactacttcaagggcggcaagctgcggttcaagaagatcaaacctgaagccttcgaagccaacagattctacaccgtgatcaacaaaaagagcggcgagatcgtgcccatggaggtgaacttcaacttcgacgaccccaacctgatcatcctgcctctggcctttggcaagagacagggcagagaattcatctggaacgacctgctgtccctggaaaccggcagcctgaagctggccaacggaagagtgatcgagaagacactgtacaacagaagaacccggcaggatgagcctgccctgttcgtggccctgaccttcgagcggcgggaggtcctggactcctccaatatcaaaccaatgaacctgatcggcgtggcaagaggcgaaaacatccccgccgtgatcgccctgaccgaccccgagggctgcccactgagccggtttaaggatagcctgggaaacccaacccacatcctgagaatcggcgagagctataaggagaagcagcggaccatccaggccaagaaggaggtggagcagcggagagccggcggctacagccggaagtacgccagcaaagccaagaatctggcagacgatatggtgagaaacaccgctagagatctgctgtactacgccgtgacccaggatgccatgctgatcttcgccaacctgagccggggcttcggccggcagggcaagcggaccttcatggccgagagacagtacacacggatggaggactggctgaccgccaagctggcctacgagggcctgagcaagacctacctgtccaagacactggcccagtacacctccaagacatgcagcaactgtgggtttaccatcaccagcgccgactacgacagggtgctggagaagctgaagaagacagcaacaggctggatgaccacaattaacggcaaggagctgaaggtggagggccagattacctactacaacagatacaagagacagaacgtagtcaaggacctgtccgtcgagctggatagactgagcgaagaatctgtgaacaacgacatctcctcctggacaaagggcagaagcggagaagctctgagcctcctgaagaaaagattctcccatagacccgtgcaggagaagttcgtgtgcctgaactgcggcttcgagacacacgcagccgagcaagccgccctgaacatcgccagatcctggctgttcctgcggagccaggagtacaagaaataccagacaaacaagacaaccggcaacaccgataagagagccttcgtcgagacctggcagtccttttaccggaagaagcttaaggaggtgtggaaacctgccgtgcggtctggcggatctggcggaggctccatccagggcctgctgaccttcggcgacgtggccgtggccttcaccaggatcgagtggaggcacctggacgccgcccagagggccctgtacagggacgtgatgctggagaactacggcaacctggtgagcgtgggcctgctgagcagcaagcccaagctgatcgcccagctggagcagggcgccgagccctggatggaggtgagggaggcccccagcggcaccagggccgtgcccgactactggggcggcccaagcagcggcgcccctcctcccagcggcggcagcccagccggctccccaacctctaccgaggagggcacctctgagtccgccacccccgagagcggccctggcacctccaccgagcccagcgagggcagcgcacccggcagccctgccggcagccccacctccacagaggagggaaccagcaccgagcccagcgaaggcagcgccccaggcaccagcaccgagcctagtgagcaggagattaaacggatcaacaagatcagaagaagacttgtgaaagacagcaacaccaagaaggccggcaagacaggccccatgaaaaccctgctggttagagtgatgacacccgatctgagagagcggctggaaaacctgagaaagaagcctgaaaatatcccccagcccatcagcaatacatctagagccaacctgaataagctgctgaccgattacaccgaaatgaagaaggcgatcctgcatgtgtactgggaagagttccagaaggaccctgtgggcctgatgagccgggtggcccagcctgccagcaagaagatcgatcagaacaagctgaaacctgagatggacgagaagggcaacctgaccaccgccggctttgcctgctctcagtgtggccagcccctgttcgtgtacaagctggagcaggtgtctgagaagggcaaggcttacaccaactacttcggacggtgcaatgtggccgagcacgaaaagctgatcctgctggcccagctgaagcccgagaaggatagcgacgaagccgtgacatatagcctgggaaagtttgggcagagggccctggatttctacagcattcatgtgaccaaggagtccacccaccccgtgaagcccctggcccagatcgccggaaacagatacgcctccggacctgtgggaaaggccctgagcgacgcatgtatgggcacaatcgcctccttcctgtctaagtaccaggacatcatcatcgaacaccagaaggtggtgaagggcaaccagaagagactggagagcctgcgggagctggccggcaaggaaaacctggaataccctagcgtgaccctgccacctcagcctcacaccaaggagggcgttgatgcctacaacgaagtgatcgcccgggtgcgaatgtgggtgaacctgaacctgtggcagaagctgaagctaagcagagatgatgccaagcctctgctgagactgaagggattcccttcctttcctctggtcgagagacaggccaacgaagtggactggtgggacatggtgtgtaacgtgaagaagctgatcaacgagaaaaaggaggatggcaaggtgttttggcagaatctggctggctacaagagacaggaagccctgagaccatacctgagcagcgaggaagatcggaagaagggaaagaaattcgctcggtaccagctgggcgacctgctgctgcacctggaaaagaagcacggcgaggactggggaaaggtgtacgacgaggcctgggagcggattgacaagaaagtggaaggcctgagcaagcacatcaagctggaagaggaacggagaagcgaggacgcccagagcaaggccgccctgaccgactggctgcgggctaaggccagcttcgtgatcgagggcctgaaggaggccgacaaggacgagttctgcagatgcgagctgaagctgcagaagtggtacggggacctgcggggaaagcccttcgccatcgaagccgagaacagcatcctggacatcagcggcttcagcaagcagtacaactgtgccttcatctggcagaaggacggcgtgaagaagctgaacctgtacctgatcatcaactacttcaagggcggcaagctgcggttcaagaagatcaaacctgaagccttcgaagccaacagattctacaccgtgatcaacaaaaagagcggcgagatcgtgcccatggaggtgaacttcaacttcgacgaccccaacctgatcatcctgcctctggcctttggcaagagacagggcagagaattcatctggaacgacctgctgtccctggaaaccggcagcctgaagctggccaacggaagagtgatcgagaagacactgtacaacagaagaacccggcaggatgagcctgccctgttcgtggccctgaccttcgagcggcgggaggtcctggactcctccaatatcaaaccaatgaacctgatcggcgtggcaagaggcgaaaacatccccgccgtgatcgccctgaccgaccccgagggctgcccactgagccggtttaaggatagcctgggaaacccaacccacatcctgagaatcggcgagagctataaggagaagcagcggaccatccaggccaagaaggaggtggagcagcggagagccggcggctacagccggaagtacgccagcaaagccaagaatctggcagacgatatggtgagaaacaccgctagagatctgctgtactacgccgtgacccaggatgccatgctgatcttcgccaacctgagccggggcttcggccggcagggcaagcggaccttcatggccgagagacagtacacacggatggaggactggctgaccgccaagctggcctacgagggcctgagcaagacctacctgtccaagacactggcccagtacacctccaagacatgcagcaactgtgggtttaccatcaccagcgccgactacgacagggtgctggagaagctgaagaagacagcaacaggctggatgaccacaattaacggcaaggagctgaaggtggagggccagattacctactacaacagatacaagagacagaacgtagtcaaggacctgtccgtcgagctggatagactgagcgaagaatctgtgaacaacgacatctcctcctggacaaagggcagaagcggagaagctctgagcctcctgaagaaaagattctcccatagacccgtgcaggagaagttcgtgtgcctgaactgcggcttcgagacacacgcagccgagcaagccgccctgaacatcgccagatcctggctgttcctgcggagccaggagtacaagaaataccagacaaacaagacaaccggcaacaccgataagagagccttcgtcgagacctggcagtccttttaccggaagaagcttaaggaggtgtggaaacctgccgtgcggtctggcggatctggcggaggctcctatccagggcctgctgaccttcggcgacgtggccgtggccttcaccaggatcgagtggaggcacctggacgccgcccagagggccctgtacagggacgtgatgctggagaactacggcaacctggtgagcgtgggcctgctgagcagcaagcccaagctgatcgcccagctggagcagggcgccgagccctggatggaggtgagggaggcccccagcggcaccagggccgtgcccgactactggggatctggctccggcagcggccccaagaaaaagagaaaagtctaagctgccttctgcggggcttgccttctggccatgcccttcttctctcccttgcacctgtacctcttggtctttgaataaagcctgagtaggaaggctagcaaaaaaaaaaaaaaaaaaaaaaaaaaaaaaaaaaaaaaaaaaaaaaaaaaaaaaaaaaaaaaaaaaaaaaaaaaaaaaaa

SEQ ID NO: 16883 - RNA, 9485 nt, synthetic construct
  source 1..9485: mol_type = other RNA
aggaaataagagagaaaagaagagtaagaagaaatataagagccaccatggcccctaagaagaagcgtaaagtgagccggatggaacgcctcgtctacgaggtgcggcagaagtgcagaaacatcgaggacatctgcatctcctgcggatctctgaacgtgaccctggagcacccactgttcatcggcggcatgtgccagaactgtaaaaactgttttctggagtgtgcctatcaatacgacgatgacggctaccagagctactgcaccatctgttgcggcggaagagaggtgctgatgtgtggaaataacaactgctgccggtgcttctgcgtggaatgcgtggacctgctggtgggccccggcgccgcccaggccgctattaaggaagatccttggaactgctacatgtgcggccacaagggcacatacggcctgctgagacggagagaggactggcctagcagactgcagatgttcttcgccaataaccacgaccaggagttcgacccccctaaggtgtaccctcccgtccccgccgagaagagaaagcccatccgggtcctgagcctgttcgatggcatcgccaccggtctgctggtgctgaaggacctgggcatccaggtggataggtacattgcctccgaggtgtgcgaggactccatcaccgtgggaatggtgcgtcatcagggcaagatcatgtacgtgggcgacgtgcggagcgtgacacagaagcatatccaggagtggggccctttcgacctggtgatcggcggcagcccttgcaatgacctgagcatcgtgaacccagcccggaagggcctgtacgagggaaccggcagactgttcttcgagttttacagactgctgcacgacgcccggcctaaggaaggcgacgaccggcccttcttttggctgttcgagaatgtggtggccatgggagtcagcgacaagcgggatattagccggttcctggagagcaaccccgtgatgatcgatgccaaggaagtgagcgccgcccaccgggccagatacttctggggcaatctgcctggcatgaacagacccctggccagcaccgtgaacgacaagctggagctgcaggagtgcctggagcacggccggatcgccaagttcagcaaggtgagaaccatcaccacccgaagcaacagcatcaaacaaggcaaggaccagcactttcctgtgttcatgaacgagaaggaggacatcctgtggtgtaccgagatggagagagtgttcgggttcccagtccactacacagatgtcagcaacatgtctagactggccagacagagactgctgggaagaagctggtccgtccctgtgatcagacacctgttcgcccctctgaaggagtacttcgcctgcgtgagcagcggcaacagcaacgccaacagccggggccccagcttctctagcggcctggtgccactgtccctgagagggagccacatgggccccatggagatctacaaaaccgtgagcgcctggaagcggcagcctgtgcgcgtgctgagcctgtttcggaatatcgataaagtcctgaaaagcctgggattcctggagagcggctctggctccggcggtggcaccctgaagtacgtggaggatgtgacaaacgtggtcagacgggatgtggagaagtggggccccttcgatctggtgtacggcagcacccaacccctgggcagctcttgtgaccggtgccctggctggtacatgtttcagttccaccggatcctgcagtacgccctgccgagacaggagtcccagcggccattcttttggattttcatggacaacttgctgctgaccgaggatgaccaggaaactaccactcggttcctgcagaccgaagccgtgaccctgcaggacgtgagaggccgggactaccagaacgccatgcgggtgtggtccaacatccctggactgaaaagcaagcacgcacctctgacccctaaagaagaggagtacctgcaggcccaggtgcggagcagaagcaagctggacgcccctaaggtggatctgctggtgaagaattgcctcctgcccctgagagagtacttcaagtatttcagccagaatagtctgcccctgggaggcagcggcggcggcgccctggtgacatttgaggacgtcgccgtgcggttcacccaggaggaatgggctctgctggatccttctcagaaaatcctgtaccgggacgtgatgagagagacataccggaatctgacctccgtgggcatcaactgggaatgttgggaccttgaagcctgcttcagaagcctgggaagaaacctgagagtgcaggtggtgaagagaaagtgcgagctgaccaacagcggcccctgcgccgagggcggcccaagcagcggcgcccctcctcccagcggcggcagcccagccggctccccaacctctaccgaggagggcacctctgagtccgccacccccgagagcggccctggcacctccaccgagcccagcgagggcagcgcacccggcagccctgccggcagccccacctccacagaggagggaaccagcaccgagcccagcgaaggcagcgccccaggcaccagcaccgagcctagtgagcaggagattaaacggatcaacaagatcagaagaagacttgtgaaagacagcaacaccaagaaggccggcaagacaggccccatgaaaaccctgctggttagagtgatgacacccgatctgagagagcggctggaaaacctgagaaagaagcctgaaaatatcccccagcccatcagcaatacatctagagccaacctgaataagctgctgaccgattacaccgaaatgaagaaggcgatcctgcatgtgtactgggaagagttccagaaggaccctgtgggcctgatgagccgggtggcccagcctgccagcaagaagatcgatcagaacaagctgaaacctgagatggacgagaagggcaacctgaccaccgccggctttgcctgctctcagtgtggccagcccctgttcgtgtacaagctggagcaggtgtctgagaagggcaaggcttacaccaactacttcggacggtgcaatgtggccgagcacgaaaagctgatcctgctggcccagctgaagcccgagaaggatagcgacgaagccgtgacatatagcctgggaaagtttgggcagagggccctggatttctacagcattcatgtgaccaaggagtccacccaccccgtgaagcccctggcccagatcgccggaaacagatacgcctccggacctgtgggaaaggccctgagcgacgcatgtatgggcacaatcgcctccttcctgtctaagtaccaggacatcatcatcgaacaccagaaggtggtgaagggcaaccagaagagactggagagcctgcgggagctggccggcaaggaaaacctggaataccctagcgtgaccctgccacctcagcctcacaccaaggagggcgttgatgcctacaacgaagtgatcgcccgggtgcgaatgtgggtgaacctgaacctgtggcagaagctgaagctaagcagagatgatgccaagcctctgctgagactgaagggattcccttcctttcctctggtcgagagacaggccaacgaagtggactggtgggacatggtgtgtaacgtgaagaagctgatcaacgagaaaaaggaggatggcaaggtgttttggcagaatctggctggctacaagagacaggaagccctgagaccatacctgagcagcgaggaagatcggaagaagggaaagaaattcgctcggtaccagctgggcgacctgctgctgcacctggaaaagaagcacggcgaggactggggaaaggtgtacgacgaggcctgggagcggattgacaagaaagtggaaggcctgagcaagcacatcaagctggaagaggaacggagaagcgaggacgcccagagcaaggccgccctgaccgactggctgcgggctaaggccagcttcgtgatcgagggcctgaaggaggccgacaaggacgagttctgcagatgcgagctgaagctgcagaagtggtacggggacctgcggggaaagcccttcgccatcgaagccgagaacagcatcctggacatcagcggcttcagcaagcagtacaactgtgccttcatctggcagaaggacggcgtgaagaagctgaacctgtacctgatcatcaactacttcaagggcggcaagctgcggttcaagaagatcaaacctgaagccttcgaagccaacagattctacaccgtgatcaacaaaaagagcggcgagatcgtgcccatggaggtgaacttcaacttcgacgaccccaacctgatcatcctgcctctggcctttggcaagagacagggcagagaattcatctggaacgacctgctgtccctggaaaccggcagcctgaagctggccaacggaagagtgatcgagaagacactgtacaacagaagaacccggcaggatgagcctgccctgttcgtggccctgaccttcgagcggcgggaggtcctggactcctccaatatcaaaccaatgaacctgatcggcgtggcaagaggcgaaaacatccccgccgtgatcgccctgaccgaccccgagggctgcccactgagccggtttaaggatagcctgggaaacccaacccacatcctgagaatcggcgagagctataaggagaagcagcggaccatccaggccaagaaggaggtggagcagcggagagccggcggctacagccggaagtacgccagcaaagccaagaatctggcagacgatatggtgagaaacaccgctagagatctgctgtactacgccgtgacccaggatgccatgctgatcttcgccaacctgagccggggcttcggccggcagggcaagcggaccttcatggccgagagacagtacacacggatggaggactggctgaccgccaagctggcctacgagggcctgagcaagacctacctgtccaagacactggcccagtacacctccaagacatgcagcaactgtgggtttaccatcaccagcgccgactacgacagggtgctggagaagctgaagaagacagcaacaggctggatgaccacaattaacggcaaggagctgaaggtggagggccagattacctactacaacagatacaagagacagaacgtagtcaaggacctgtccgtcgagctggatagactgagcgaagaatctgtgaacaacgacatctcctcctggacaaagggcagaagcggagaagctctgagcctcctgaagaaaagattctcccatagacccgtgcaggagaagttcgtgtgcctgaactgcggcttcgagacacacgcagccgagcaagccgccctgaacatcgccagatcctggctgttcctgcggagccaggagtacaagaaataccagacaaacaagacaaccggcaacaccgataagagagccttcgtcgagacctggcagtccttttaccggaagaagcttaaggaggtgtggaaacctgccgtgcggtctggcggatctggcggaggctccctgctgaccttcgaggacgtggccctgttcttcaccgaggaggagtggcagctgctggaccccgcccagaagatcctgtactacaacgtgatgcaggagaactacgagaccgtgaccagcctgggcctgaagctgaagaacgacaccggcaacgaccagcccatcagcctgagcaccctggagatccaggccagcggctgcaaggtgctgaggaaggccaggatgaaggtggcccagaagaccggcggcccaagcagcggcgcccctcctcccagcggcggcagcccagccggctccccaacctctaccgaggagggcacctctgagtccgccacccccgagagcggccctggcacctccaccgagcccagcgagggcagcgcacccggcagccctgccggcagccccacctccacagaggagggaaccagcaccgagcccagcgaaggcagcgccccaggcaccagcaccgagcctagtgagcaggagattaaacggatcaacaagatcagaagaagacttgtgaaagacagcaacaccaagaaggccggcaagacaggccccatgaaaaccctgctggttagagtgatgacacccgatctgagagagcggctggaaaacctgagaaagaagcctgaaaatatcccccagcccatcagcaatacatctagagccaacctgaataagctgctgaccgattacaccgaaatgaagaaggcgatcctgcatgtgtactgggaagagttccagaaggaccctgtgggcctgatgagccgggtggcccagcctgccagcaagaagatcgatcagaacaagctgaaacctgagatggacgagaagggcaacctgaccaccgccggctttgcctgctctcagtgtggccagcccctgttcgtgtacaagctggagcaggtgtctgagaagggcaaggcttacaccaactacttcggacggtgcaatgtggccgagcacgaaaagctgatcctgctggcccagctgaagcccgagaaggatagcgacgaagccgtgacatatagcctgggaaagtttgggcagagggccctggatttctacagcattcatgtgaccaaggagtccacccaccccgtgaagcccctggcccagatcgccggaaacagatacgcctccggacctgtgggaaaggccctgagcgacgcatgtatgggcacaatcgcctccttcctgtctaagtaccaggacatcatcatcgaacaccagaaggtggtgaagggcaaccagaagagactggagagcctgcgggagctggccggcaaggaaaacctggaataccctagcgtgaccctgccacctcagcctcacaccaaggagggcgttgatgcctacaacgaagtgatcgcccgggtgcgaatgtgggtgaacctgaacctgtggcagaagctgaagctaagcagagatgatgccaagcctctgctgagactgaagggattcccttcctttcctctggtcgagagacaggccaacgaagtggactggtgggacatggtgtgtaacgtgaagaagctgatcaacgagaaaaaggaggatggcaaggtgttttggcagaatctggctggctacaagagacaggaagccctgagaccatacctgagcagcgaggaagatcggaagaagggaaagaaattcgctcggtaccagctgggcgacctgctgctgcacctggaaaagaagcacggcgaggactggggaaaggtgtacgacgaggcctgggagcggattgacaagaaagtggaaggcctgagcaagcacatcaagctggaagaggaacggagaagcgaggacgcccagagcaaggccgccctgaccgactggctgcgggctaaggccagcttcgtgatcgagggcctgaaggaggccgacaaggacgagttctgcagatgcgagctgaagctgcagaagtggtacggggacctgcggggaaagcccttcgccatcgaagccgagaacagcatcctggacatcagcggcttcagcaagcagtacaactgtgccttcatctggcagaaggacggcgtgaagaagctgaacctgtacctgatcatcaactacttcaagggcggcaagctgcggttcaagaagatcaaacctgaagccttcgaagccaacagattctacaccgtgatcaacaaaaagagcggcgagatcgtgcccatggaggtgaacttcaacttcgacgaccccaacctgatcatcctgcctctggcctttggcaagagacagggcagagaattcatctggaacgacctgctgtccctggaaaccggcagcctgaagctggccaacggaagagtgatcgagaagacactgtacaacagaagaacccggcaggatgagcctgccctgttcgtggccctgaccttcgagcggcgggaggtcctggactcctccaatatcaaaccaatgaacctgatcggcgtggcaagaggcgaaaacatccccgccgtgatcgccctgaccgaccccgagggctgcccactgagccggtttaaggatagcctgggaaacccaacccacatcctgagaatcggcgagagctataaggagaagcagcggaccatccaggccaagaaggaggtggagcagcggagagccggcggctacagccggaagtacgccagcaaagccaagaatctggcagacgatatggtgagaaacaccgctagagatctgctgtactacgccgtgacccaggatgccatgctgatcttcgccaacctgagccggggcttcggccggcagggcaagcggaccttcatggccgagagacagtacacacggatggaggactggctgaccgccaagctggcctacgagggcctgagcaagacctacctgtccaagacactggcccagtacacctccaagacatgcagcaactgtgggtttaccatcaccagcgccgactacgacagggtgctggagaagctgaagaagacagcaacaggctggatgaccacaattaacggcaaggagctgaaggtggagggccagattacctactacaacagatacaagagacagaacgtagtcaaggacctgtccgtcgagctggatagactgagcgaagaatctgtgaacaacgacatctcctcctggacaaagggcagaagcggagaagctctgagcctcctgaagaaaagattctcccatagacccgtgcaggagaagttcgtgtgcctgaactgcggcttcgagacacacgcagccgagcaagccgccctgaacatcgccagatcctggctgttcctgcggagccaggagtacaagaaataccagacaaacaagacaaccggcaacaccgataagagagccttcgtcgagacctggcagtccttttaccggaagaagcttaaggaggtgtggaaacctgccgtgcggtctggcggatctggcggaggctcctctgctgaccttcgaggacgtggccctgttcttcaccgaggaggagtggcagctgctggaccccgcccagaagatcctgtactacaacgtgatgcaggagaactacgagaccgtgaccagcctgggcctgaagctgaagaacgacaccggcaacgaccagcccatcagcctgagcaccctggagatccaggccagcggctgcaaggtgctgaggaaggccaggatgaaggtggcccagaagaccggatctggctccggcagcggccccaagaaaaagagaaaagtctaagctgccttctgcggggcttgccttctggccatgcccttcttctctcccttgcacctgtacctcttggtctttgaataaagcctgagtaggaaggctagcaaaaaaaaaaaaaaaaaaaaaaaaaaaaaaaaaaaaaaaaaaaaaaaaaaaaaaaaaaaaaaaaaaaaaaaaaaaaaaaa

SEQ ID NO: 16884 - RNA, 9485 nt, synthetic construct
  source 1..9485: mol_type = other RNA
aggaaataagagagaaaagaagagtaagaagaaatataagagccaccatggcccctaagaagaagcgtaaagtgagccggatggaacgcctcgtctacgaggtgcggcagaagtgcagaaacatcgaggacatctgcatctcctgcggatctctgaacgtgaccctggagcacccactgttcatcggcggcatgtgccagaactgtaaaaactgttttctggagtgtgcctatcaatacgacgatgacggctaccagagctactgcaccatctgttgcggcggaagagaggtgctgatgtgtggaaataacaactgctgccggtgcttctgcgtggaatgcgtggacctgctggtgggccccggcgccgcccaggccgctattaaggaagatccttggaactgctacatgtgcggccacaagggcacatacggcctgctgagacggagagaggactggcctagcagactgcagatgttcttcgccaataaccacgaccaggagttcgacccccctaaggtgtaccctcccgtccccgccgagaagagaaagcccatccgggtcctgagcctgttcgatggcatcgccaccggtctgctggtgctgaaggacctgggcatccaggtggataggtacattgcctccgaggtgtgcgaggactccatcaccgtgggaatggtgcgtcatcagggcaagatcatgtacgtgggcgacgtgcggagcgtgacacagaagcatatccaggagtggggccctttcgacctggtgatcggcggcagcccttgcaatgacctgagcatcgtgaacccagcccggaagggcctgtacgagggaaccggcagactgttcttcgagttttacagactgctgcacgacgcccggcctaaggaaggcgacgaccggcccttcttttggctgttcgagaatgtggtggccatgggagtcagcgacaagcgggatattagccggttcctggagagcaaccccgtgatgatcgatgccaaggaagtgagcgccgcccaccgggccagatacttctggggcaatctgcctggcatgaacagacccctggccagcaccgtgaacgacaagctggagctgcaggagtgcctggagcacggccggatcgccaagttcagcaaggtgagaaccatcaccacccgaagcaacagcatcaaacaaggcaaggaccagcactttcctgtgttcatgaacgagaaggaggacatcctgtggtgtaccgagatggagagagtgttcgggttcccagtccactacacagatgtcagcaacatgtctagactggccagacagagactgctgggaagaagctggtccgtccctgtgatcagacacctgttcgcccctctgaaggagtacttcgcctgcgtgagcagcggcaacagcaacgccaacagccggggccccagcttctctagcggcctggtgccactgtccctgagagggagccacatgggccccatggagatctacaaaaccgtgagcgcctggaagcggcagcctgtgcgcgtgctgagcctgtttcggaatatcgataaagtcctgaaaagcctgggattcctggagagcggctctggctccggcggtggcaccctgaagtacgtggaggatgtgacaaacgtggtcagacgggatgtggagaagtggggccccttcgatctggtgtacggcagcacccaacccctgggcagctcttgtgaccggtgccctggctggtacatgtttcagttccaccggatcctgcagtacgccctgccgagacaggagtcccagcggccattcttttggattttcatggacaacttgctgctgaccgaggatgaccaggaaactaccactcggttcctgcagaccgaagccgtgaccctgcaggacgtgagaggccgggactaccagaacgccatgcgggtgtggtccaacatccctggactgaaaagcaagcacgcacctctgacccctaaagaagaggagtacctgcaggcccaggtgcggagcagaagcaagctggacgcccctaaggtggatctgctggtgaagaattgcctcctgcccctgagagagtacttcaagtatttcagccagaatagtctgcccctgggaggcagcggcggcggcgccctggtgacatttgaggacgtcgccgtgcggttcacccaggaggaatgggctctgctggatccttctcagaaaatcctgtaccgggacgtgatgagagagacataccggaatctgacctccgtgggcatcaactgggaatgttgggaccttgaagcctgcttcagaagcctgggaagaaacctgagagtgcaggtggtgaagagaaagtgcgagctgaccaacagcggcccctgcgccgagggcggcccaagcagcggcgcccctcctcccagcggcggcagcccagccggctccccaacctctaccgaggagggcacctctgagtccgccacccccgagagcggccctggcacctccaccgagcccagcgagggcagcgcacccggcagccctgccggcagccccacctccacagaggagggaaccagcaccgagcccagcgaaggcagcgccccaggcaccagcaccgagcctagtgagcaggagattaaacggatcaacaagatcagaagaagacttgtgaaagacagcaacaccaagaaggccggcaagacaggccccatgaaaaccctgctggttagagtgatgacacccgatctgagagagcggctggaaaacctgagaaagaagcctgaaaatatcccccagcccatcagcaatacatctagagccaacctgaataagctgctgaccgattacaccgaaatgaagaaggcgatcctgcatgtgtactgggaagagttccagaaggaccctgtgggcctgatgagccgggtggcccagcctgccagcaagaagatcgatcagaacaagctgaaacctgagatggacgagaagggcaacctgaccaccgccggctttgcctgctctcagtgtggccagcccctgttcgtgtacaagctggagcaggtgtctgagaagggcaaggcttacaccaactacttcggacggtgcaatgtggccgagcacgaaaagctgatcctgctggcccagctgaagcccgagaaggatagcgacgaagccgtgacatatagcctgggaaagtttgggcagagggccctggatttctacagcattcatgtgaccaaggagtccacccaccccgtgaagcccctggcccagatcgccggaaacagatacgcctccggacctgtgggaaaggccctgagcgacgcatgtatgggcacaatcgcctccttcctgtctaagtaccaggacatcatcatcgaacaccagaaggtggtgaagggcaaccagaagagactggagagcctgcgggagctggccggcaaggaaaacctggaataccctagcgtgaccctgccacctcagcctcacaccaaggagggcgttgatgcctacaacgaagtgatcgcccgggtgcgaatgtgggtgaacctgaacctgtggcagaagctgaagctaagcagagatgatgccaagcctctgctgagactgaagggattcccttcctttcctctggtcgagagacaggccaacgaagtggactggtgggacatggtgtgtaacgtgaagaagctgatcaacgagaaaaaggaggatggcaaggtgttttggcagaatctggctggctacaagagacaggaagccctgagaccatacctgagcagcgaggaagatcggaagaagggaaagaaattcgctcggtaccagctgggcgacctgctgctgcacctggaaaagaagcacggcgaggactggggaaaggtgtacgacgaggcctgggagcggattgacaagaaagtggaaggcctgagcaagcacatcaagctggaagaggaacggagaagcgaggacgcccagagcaaggccgccctgaccgactggctgcgggctaaggccagcttcgtgatcgagggcctgaaggaggccgacaaggacgagttctgcagatgcgagctgaagctgcagaagtggtacggggacctgcggggaaagcccttcgccatcgaagccgagaacagcatcctggacatcagcggcttcagcaagcagtacaactgtgccttcatctggcagaaggacggcgtgaagaagctgaacctgtacctgatcatcaactacttcaagggcggcaagctgcggttcaagaagatcaaacctgaagccttcgaagccaacagattctacaccgtgatcaacaaaaagagcggcgagatcgtgcccatggaggtgaacttcaacttcgacgaccccaacctgatcatcctgcctctggcctttggcaagagacagggcagagaattcatctggaacgacctgctgtccctggaaaccggcagcctgaagctggccaacggaagagtgatcgagaagacactgtacaacagaagaacccggcaggatgagcctgccctgttcgtggccctgaccttcgagcggcgggaggtcctggactcctccaatatcaaaccaatgaacctgatcggcgtggcaagaggcgaaaacatccccgccgtgatcgccctgaccgaccccgagggctgcccactgagccggtttaaggatagcctgggaaacccaacccacatcctgagaatcggcgagagctataaggagaagcagcggaccatccaggccaagaaggaggtggagcagcggagagccggcggctacagccggaagtacgccagcaaagccaagaatctggcagacgatatggtgagaaacaccgctagagatctgctgtactacgccgtgacccaggatgccatgctgatcttcgccaacctgagccggggcttcggccggcagggcaagcggaccttcatggccgagagacagtacacacggatggaggactggctgaccgccaagctggcctacgagggcctgagcaagacctacctgtccaagacactggcccagtacacctccaagacatgcagcaactgtgggtttaccatcaccagcgccgactacgacagggtgctggagaagctgaagaagacagcaacaggctggatgaccacaattaacggcaaggagctgaaggtggagggccagattacctactacaacagatacaagagacagaacgtagtcaaggacctgtccgtcgagctggatagactgagcgaagaatctgtgaacaacgacatctcctcctggacaaagggcagaagcggagaagctctgagcctcctgaagaaaagattctcccatagacccgtgcaggagaagttcgtgtgcctgaactgcggcttcgagacacacgcagccgagcaagccgccctgaacatcgccagatcctggctgttcctgcggagccaggagtacaagaaataccagacaaacaagacaaccggcaacaccgataagagagccttcgtcgagacctggcagtccttttaccggaagaagcttaaggaggtgtggaaacctgccgtgcggtctggcggatctggcggaggctccatccaggagctggtgaccttcaaggacgtggccgtggacttcacccaggaggagtggggcctgctgaacaacccccagaaggagctgtacaaggaggtgatgctggagaacgcccagaacatgctgagcctgggcctgcccgtgcccagggaggacctgttcagctacttcgaggagagggaggccccctggctgctggagcaggagggcctgaggagctgctgcgccgagagggagatcaggggcggcccaagcagcggcgcccctcctcccagcggcggcagcccagccggctccccaacctctaccgaggagggcacctctgagtccgccacccccgagagcggccctggcacctccaccgagcccagcgagggcagcgcacccggcagccctgccggcagccccacctccacagaggagggaaccagcaccgagcccagcgaaggcagcgccccaggcaccagcaccgagcctagtgagcaggagattaaacggatcaacaagatcagaagaagacttgtgaaagacagcaacaccaagaaggccggcaagacaggccccatgaaaaccctgctggttagagtgatgacacccgatctgagagagcggctggaaaacctgagaaagaagcctgaaaatatcccccagcccatcagcaatacatctagagccaacctgaataagctgctgaccgattacaccgaaatgaagaaggcgatcctgcatgtgtactgggaagagttccagaaggaccctgtgggcctgatgagccgggtggcccagcctgccagcaagaagatcgatcagaacaagctgaaacctgagatggacgagaagggcaacctgaccaccgccggctttgcctgctctcagtgtggccagcccctgttcgtgtacaagctggagcaggtgtctgagaagggcaaggcttacaccaactacttcggacggtgcaatgtggccgagcacgaaaagctgatcctgctggcccagctgaagcccgagaaggatagcgacgaagccgtgacatatagcctgggaaagtttgggcagagggccctggatttctacagcattcatgtgaccaaggagtccacccaccccgtgaagcccctggcccagatcgccggaaacagatacgcctccggacctgtgggaaaggccctgagcgacgcatgtatgggcacaatcgcctccttcctgtctaagtaccaggacatcatcatcgaacaccagaaggtggtgaagggcaaccagaagagactggagagcctgcgggagctggccggcaaggaaaacctggaataccctagcgtgaccctgccacctcagcctcacaccaaggagggcgttgatgcctacaacgaagtgatcgcccgggtgcgaatgtgggtgaacctgaacctgtggcagaagctgaagctaagcagagatgatgccaagcctctgctgagactgaagggattcccttcctttcctctggtcgagagacaggccaacgaagtggactggtgggacatggtgtgtaacgtgaagaagctgatcaacgagaaaaaggaggatggcaaggtgttttggcagaatctggctggctacaagagacaggaagccctgagaccatacctgagcagcgaggaagatcggaagaagggaaagaaattcgctcggtaccagctgggcgacctgctgctgcacctggaaaagaagcacggcgaggactggggaaaggtgtacgacgaggcctgggagcggattgacaagaaagtggaaggcctgagcaagcacatcaagctggaagaggaacggagaagcgaggacgcccagagcaaggccgccctgaccgactggctgcgggctaaggccagcttcgtgatcgagggcctgaaggaggccgacaaggacgagttctgcagatgcgagctgaagctgcagaagtggtacggggacctgcggggaaagcccttcgccatcgaagccgagaacagcatcctggacatcagcggcttcagcaagcagtacaactgtgccttcatctggcagaaggacggcgtgaagaagctgaacctgtacctgatcatcaactacttcaagggcggcaagctgcggttcaagaagatcaaacctgaagccttcgaagccaacagattctacaccgtgatcaacaaaaagagcggcgagatcgtgcccatggaggtgaacttcaacttcgacgaccccaacctgatcatcctgcctctggcctttggcaagagacagggcagagaattcatctggaacgacctgctgtccctggaaaccggcagcctgaagctggccaacggaagagtgatcgagaagacactgtacaacagaagaacccggcaggatgagcctgccctgttcgtggccctgaccttcgagcggcgggaggtcctggactcctccaatatcaaaccaatgaacctgatcggcgtggcaagaggcgaaaacatccccgccgtgatcgccctgaccgaccccgagggctgcccactgagccggtttaaggatagcctgggaaacccaacccacatcctgagaatcggcgagagctataaggagaagcagcggaccatccaggccaagaaggaggtggagcagcggagagccggcggctacagccggaagtacgccagcaaagccaagaatctggcagacgatatggtgagaaacaccgctagagatctgctgtactacgccgtgacccaggatgccatgctgatcttcgccaacctgagccggggcttcggccggcagggcaagcggaccttcatggccgagagacagtacacacggatggaggactggctgaccgccaagctggcctacgagggcctgagcaagacctacctgtccaagacactggcccagtacacctccaagacatgcagcaactgtgggtttaccatcaccagcgccgactacgacagggtgctggagaagctgaagaagacagcaacaggctggatgaccacaattaacggcaaggagctgaaggtggagggccagattacctactacaacagatacaagagacagaacgtagtcaaggacctgtccgtcgagctggatagactgagcgaagaatctgtgaacaacgacatctcctcctggacaaagggcagaagcggagaagctctgagcctcctgaagaaaagattctcccatagacccgtgcaggagaagttcgtgtgcctgaactgcggcttcgagacacacgcagccgagcaagccgccctgaacatcgccagatcctggctgttcctgcggagccaggagtacaagaaataccagacaaacaagacaaccggcaacaccgataagagagccttcgtcgagacctggcagtccttttaccggaagaagcttaaggaggtgtggaaacctgccgtgcggtctggcggatctggcggaggctcctatccaggagctggtgaccttcaaggacgtggccgtggacttcacccaggaggagtggggcctgctgaacaacccccagaaggagctgtacaaggaggtgatgctggagaacgcccagaacatgctgagcctgggcctgcccgtgcccagggaggacctgttcagctacttcgaggagagggaggccccctggctgctggagcaggagggcctgaggagctgctgcgccgagagggagatcaggggatctggctccggcagcggccccaagaaaaagagaaaagtctaagctgccttctgcggggcttgccttctggccatgcccttcttctctcccttgcacctgtacctcttggtctttgaataaagcctgagtaggaaggctagcaaaaaaaaaaaaaaaaaaaaaaaaaaaaaaaaaaaaaaaaaaaaaaaaaaaaaaaaaaaaaaaaaaaaaaaaaaaaaaaa

SEQ ID NO: 16885 - RNA, 9485 nt, synthetic construct
  source 1..9485: mol_type = other RNA
aggaaataagagagaaaagaagagtaagaagaaatataagagccaccatggcccctaagaagaagcgtaaagtgagccggatggaacgcctcgtctacgaggtgcggcagaagtgcagaaacatcgaggacatctgcatctcctgcggatctctgaacgtgaccctggagcacccactgttcatcggcggcatgtgccagaactgtaaaaactgttttctggagtgtgcctatcaatacgacgatgacggctaccagagctactgcaccatctgttgcggcggaagagaggtgctgatgtgtggaaataacaactgctgccggtgcttctgcgtggaatgcgtggacctgctggtgggccccggcgccgcccaggccgctattaaggaagatccttggaactgctacatgtgcggccacaagggcacatacggcctgctgagacggagagaggactggcctagcagactgcagatgttcttcgccaataaccacgaccaggagttcgacccccctaaggtgtaccctcccgtccccgccgagaagagaaagcccatccgggtcctgagcctgttcgatggcatcgccaccggtctgctggtgctgaaggacctgggcatccaggtggataggtacattgcctccgaggtgtgcgaggactccatcaccgtgggaatggtgcgtcatcagggcaagatcatgtacgtgggcgacgtgcggagcgtgacacagaagcatatccaggagtggggccctttcgacctggtgatcggcggcagcccttgcaatgacctgagcatcgtgaacccagcccggaagggcctgtacgagggaaccggcagactgttcttcgagttttacagactgctgcacgacgcccggcctaaggaaggcgacgaccggcccttcttttggctgttcgagaatgtggtggccatgggagtcagcgacaagcgggatattagccggttcctggagagcaaccccgtgatgatcgatgccaaggaagtgagcgccgcccaccgggccagatacttctggggcaatctgcctggcatgaacagacccctggccagcaccgtgaacgacaagctggagctgcaggagtgcctggagcacggccggatcgccaagttcagcaaggtgagaaccatcaccacccgaagcaacagcatcaaacaaggcaaggaccagcactttcctgtgttcatgaacgagaaggaggacatcctgtggtgtaccgagatggagagagtgttcgggttcccagtccactacacagatgtcagcaacatgtctagactggccagacagagactgctgggaagaagctggtccgtccctgtgatcagacacctgttcgcccctctgaaggagtacttcgcctgcgtgagcagcggcaacagcaacgccaacagccggggccccagcttctctagcggcctggtgccactgtccctgagagggagccacatgggccccatggagatctacaaaaccgtgagcgcctggaagcggcagcctgtgcgcgtgctgagcctgtttcggaatatcgataaagtcctgaaaagcctgggattcctggagagcggctctggctccggcggtggcaccctgaagtacgtggaggatgtgacaaacgtggtcagacgggatgtggagaagtggggccccttcgatctggtgtacggcagcacccaacccctgggcagctcttgtgaccggtgccctggctggtacatgtttcagttccaccggatcctgcagtacgccctgccgagacaggagtcccagcggccattcttttggattttcatggacaacttgctgctgaccgaggatgaccaggaaactaccactcggttcctgcagaccgaagccgtgaccctgcaggacgtgagaggccgggactaccagaacgccatgcgggtgtggtccaacatccctggactgaaaagcaagcacgcacctctgacccctaaagaagaggagtacctgcaggcccaggtgcggagcagaagcaagctggacgcccctaaggtggatctgctggtgaagaattgcctcctgcccctgagagagtacttcaagtatttcagccagaatagtctgcccctgggaggcagcggcggcggcgccctggtgacatttgaggacgtcgccgtgcggttcacccaggaggaatgggctctgctggatccttctcagaaaatcctgtaccgggacgtgatgagagagacataccggaatctgacctccgtgggcatcaactgggaatgttgggaccttgaagcctgcttcagaagcctgggaagaaacctgagagtgcaggtggtgaagagaaagtgcgagctgaccaacagcggcccctgcgccgagggcggcccaagcagcggcgcccctcctcccagcggcggcagcccagccggctccccaacctctaccgaggagggcacctctgagtccgccacccccgagagcggccctggcacctccaccgagcccagcgagggcagcgcacccggcagccctgccggcagccccacctccacagaggagggaaccagcaccgagcccagcgaaggcagcgccccaggcaccagcaccgagcctagtgagcaggagattaaacggatcaacaagatcagaagaagacttgtgaaagacagcaacaccaagaaggccggcaagacaggccccatgaaaaccctgctggttagagtgatgacacccgatctgagagagcggctggaaaacctgagaaagaagcctgaaaatatcccccagcccatcagcaatacatctagagccaacctgaataagctgctgaccgattacaccgaaatgaagaaggcgatcctgcatgtgtactgggaagagttccagaaggaccctgtgggcctgatgagccgggtggcccagcctgccagcaagaagatcgatcagaacaagctgaaacctgagatggacgagaagggcaacctgaccaccgccggctttgcctgctctcagtgtggccagcccctgttcgtgtacaagctggagcaggtgtctgagaagggcaaggcttacaccaactacttcggacggtgcaatgtggccgagcacgaaaagctgatcctgctggcccagctgaagcccgagaaggatagcgacgaagccgtgacatatagcctgggaaagtttgggcagagggccctggatttctacagcattcatgtgaccaaggagtccacccaccccgtgaagcccctggcccagatcgccggaaacagatacgcctccggacctgtgggaaaggccctgagcgacgcatgtatgggcacaatcgcctccttcctgtctaagtaccaggacatcatcatcgaacaccagaaggtggtgaagggcaaccagaagagactggagagcctgcgggagctggccggcaaggaaaacctggaataccctagcgtgaccctgccacctcagcctcacaccaaggagggcgttgatgcctacaacgaagtgatcgcccgggtgcgaatgtgggtgaacctgaacctgtggcagaagctgaagctaagcagagatgatgccaagcctctgctgagactgaagggattcccttcctttcctctggtcgagagacaggccaacgaagtggactggtgggacatggtgtgtaacgtgaagaagctgatcaacgagaaaaaggaggatggcaaggtgttttggcagaatctggctggctacaagagacaggaagccctgagaccatacctgagcagcgaggaagatcggaagaagggaaagaaattcgctcggtaccagctgggcgacctgctgctgcacctggaaaagaagcacggcgaggactggggaaaggtgtacgacgaggcctgggagcggattgacaagaaagtggaaggcctgagcaagcacatcaagctggaagaggaacggagaagcgaggacgcccagagcaaggccgccctgaccgactggctgcgggctaaggccagcttcgtgatcgagggcctgaaggaggccgacaaggacgagttctgcagatgcgagctgaagctgcagaagtggtacggggacctgcggggaaagcccttcgccatcgaagccgagaacagcatcctggacatcagcggcttcagcaagcagtacaactgtgccttcatctggcagaaggacggcgtgaagaagctgaacctgtacctgatcatcaactacttcaagggcggcaagctgcggttcaagaagatcaaacctgaagccttcgaagccaacagattctacaccgtgatcaacaaaaagagcggcgagatcgtgcccatggaggtgaacttcaacttcgacgaccccaacctgatcatcctgcctctggcctttggcaagagacagggcagagaattcatctggaacgacctgctgtccctggaaaccggcagcctgaagctggccaacggaagagtgatcgagaagacactgtacaacagaagaacccggcaggatgagcctgccctgttcgtggccctgaccttcgagcggcgggaggtcctggactcctccaatatcaaaccaatgaacctgatcggcgtggcaagaggcgaaaacatccccgccgtgatcgccctgaccgaccccgagggctgcccactgagccggtttaaggatagcctgggaaacccaacccacatcctgagaatcggcgagagctataaggagaagcagcggaccatccaggccaagaaggaggtggagcagcggagagccggcggctacagccggaagtacgccagcaaagccaagaatctggcagacgatatggtgagaaacaccgctagagatctgctgtactacgccgtgacccaggatgccatgctgatcttcgccaacctgagccggggcttcggccggcagggcaagcggaccttcatggccgagagacagtacacacggatggaggactggctgaccgccaagctggcctacgagggcctgagcaagacctacctgtccaagacactggcccagtacacctccaagacatgcagcaactgtgggtttaccatcaccagcgccgactacgacagggtgctggagaagctgaagaagacagcaacaggctggatgaccacaattaacggcaaggagctgaaggtggagggccagattacctactacaacagatacaagagacagaacgtagtcaaggacctgtccgtcgagctggatagactgagcgaagaatctgtgaacaacgacatctcctcctggacaaagggcagaagcggagaagctctgagcctcctgaagaaaagattctcccatagacccgtgcaggagaagttcgtgtgcctgaactgcggcttcgagacacacgcagccgagcaagccgccctgaacatcgccagatcctggctgttcctgcggagccaggagtacaagaaataccagacaaacaagacaaccggcaacaccgataagagagccttcgtcgagacctggcagtccttttaccggaagaagcttaaggaggtgtggaaacctgccgtgcggtctggcggatctggcggaggctccaggcccagggccgtgaagttcgccgacgtggccgtgtacttcagccccgaggagtgggagtgcctgaggcccgcccagagggccctgtacagggacgtgatgcaggagacctacggccacctgggcgccctgggctgcgccggccccaagcccgccctgatcagctggctggagaggaacaccaacgactgggagctggccgccctggacccccaggagtgccccaggcagatgaccgtgcagggcggcccaagcagcggcgcccctcctcccagcggcggcagcccagccggctccccaacctctaccgaggagggcacctctgagtccgccacccccgagagcggccctggcacctccaccgagcccagcgagggcagcgcacccggcagccctgccggcagccccacctccacagaggagggaaccagcaccgagcccagcgaaggcagcgccccaggcaccagcaccgagcctagtgagcaggagattaaacggatcaacaagatcagaagaagacttgtgaaagacagcaacaccaagaaggccggcaagacaggccccatgaaaaccctgctggttagagtgatgacacccgatctgagagagcggctggaaaacctgagaaagaagcctgaaaatatcccccagcccatcagcaatacatctagagccaacctgaataagctgctgaccgattacaccgaaatgaagaaggcgatcctgcatgtgtactgggaagagttccagaaggaccctgtgggcctgatgagccgggtggcccagcctgccagcaagaagatcgatcagaacaagctgaaacctgagatggacgagaagggcaacctgaccaccgccggctttgcctgctctcagtgtggccagcccctgttcgtgtacaagctggagcaggtgtctgagaagggcaaggcttacaccaactacttcggacggtgcaatgtggccgagcacgaaaagctgatcctgctggcccagctgaagcccgagaaggatagcgacgaagccgtgacatatagcctgggaaagtttgggcagagggccctggatttctacagcattcatgtgaccaaggagtccacccaccccgtgaagcccctggcccagatcgccggaaacagatacgcctccggacctgtgggaaaggccctgagcgacgcatgtatgggcacaatcgcctccttcctgtctaagtaccaggacatcatcatcgaacaccagaaggtggtgaagggcaaccagaagagactggagagcctgcgggagctggccggcaaggaaaacctggaataccctagcgtgaccctgccacctcagcctcacaccaaggagggcgttgatgcctacaacgaagtgatcgcccgggtgcgaatgtgggtgaacctgaacctgtggcagaagctgaagctaagcagagatgatgccaagcctctgctgagactgaagggattcccttcctttcctctggtcgagagacaggccaacgaagtggactggtgggacatggtgtgtaacgtgaagaagctgatcaacgagaaaaaggaggatggcaaggtgttttggcagaatctggctggctacaagagacaggaagccctgagaccatacctgagcagcgaggaagatcggaagaagggaaagaaattcgctcggtaccagctgggcgacctgctgctgcacctggaaaagaagcacggcgaggactggggaaaggtgtacgacgaggcctgggagcggattgacaagaaagtggaaggcctgagcaagcacatcaagctggaagaggaacggagaagcgaggacgcccagagcaaggccgccctgaccgactggctgcgggctaaggccagcttcgtgatcgagggcctgaaggaggccgacaaggacgagttctgcagatgcgagctgaagctgcagaagtggtacggggacctgcggggaaagcccttcgccatcgaagccgagaacagcatcctggacatcagcggcttcagcaagcagtacaactgtgccttcatctggcagaaggacggcgtgaagaagctgaacctgtacctgatcatcaactacttcaagggcggcaagctgcggttcaagaagatcaaacctgaagccttcgaagccaacagattctacaccgtgatcaacaaaaagagcggcgagatcgtgcccatggaggtgaacttcaacttcgacgaccccaacctgatcatcctgcctctggcctttggcaagagacagggcagagaattcatctggaacgacctgctgtccctggaaaccggcagcctgaagctggccaacggaagagtgatcgagaagacactgtacaacagaagaacccggcaggatgagcctgccctgttcgtggccctgaccttcgagcggcgggaggtcctggactcctccaatatcaaaccaatgaacctgatcggcgtggcaagaggcgaaaacatccccgccgtgatcgccctgaccgaccccgagggctgcccactgagccggtttaaggatagcctgggaaacccaacccacatcctgagaatcggcgagagctataaggagaagcagcggaccatccaggccaagaaggaggtggagcagcggagagccggcggctacagccggaagtacgccagcaaagccaagaatctggcagacgatatggtgagaaacaccgctagagatctgctgtactacgccgtgacccaggatgccatgctgatcttcgccaacctgagccggggcttcggccggcagggcaagcggaccttcatggccgagagacagtacacacggatggaggactggctgaccgccaagctggcctacgagggcctgagcaagacctacctgtccaagacactggcccagtacacctccaagacatgcagcaactgtgggtttaccatcaccagcgccgactacgacagggtgctggagaagctgaagaagacagcaacaggctggatgaccacaattaacggcaaggagctgaaggtggagggccagattacctactacaacagatacaagagacagaacgtagtcaaggacctgtccgtcgagctggatagactgagcgaagaatctgtgaacaacgacatctcctcctggacaaagggcagaagcggagaagctctgagcctcctgaagaaaagattctcccatagacccgtgcaggagaagttcgtgtgcctgaactgcggcttcgagacacacgcagccgagcaagccgccctgaacatcgccagatcctggctgttcctgcggagccaggagtacaagaaataccagacaaacaagacaaccggcaacaccgataagagagccttcgtcgagacctggcagtccttttaccggaagaagcttaaggaggtgtggaaacctgccgtgcggtctggcggatctggcggaggctcctaggcccagggccgtgaagttcgccgacgtggccgtgtacttcagccccgaggagtgggagtgcctgaggcccgcccagagggccctgtacagggacgtgatgcaggagacctacggccacctgggcgccctgggctgcgccggccccaagcccgccctgatcagctggctggagaggaacaccaacgactgggagctggccgccctggacccccaggagtgccccaggcagatgaccgtgcagggatctggctccggcagcggccccaagaaaaagagaaaagtctaagctgccttctgcggggcttgccttctggccatgcccttcttctctcccttgcacctgtacctcttggtctttgaataaagcctgagtaggaaggctagcaaaaaaaaaaaaaaaaaaaaaaaaaaaaaaaaaaaaaaaaaaaaaaaaaaaaaaaaaaaaaaaaaaaaaaaaaaaaaaaa

SEQ ID NO: 16886 - RNA, 9485 nt, synthetic construct
  source 1..9485: mol_type = other RNA
aggaaataagagagaaaagaagagtaagaagaaatataagagccaccatggcccctaagaagaagcgtaaagtgagccggatggaacgcctcgtctacgaggtgcggcagaagtgcagaaacatcgaggacatctgcatctcctgcggatctctgaacgtgaccctggagcacccactgttcatcggcggcatgtgccagaactgtaaaaactgttttctggagtgtgcctatcaatacgacgatgacggctaccagagctactgcaccatctgttgcggcggaagagaggtgctgatgtgtggaaataacaactgctgccggtgcttctgcgtggaatgcgtggacctgctggtgggccccggcgccgcccaggccgctattaaggaagatccttggaactgctacatgtgcggccacaagggcacatacggcctgctgagacggagagaggactggcctagcagactgcagatgttcttcgccaataaccacgaccaggagttcgacccccctaaggtgtaccctcccgtccccgccgagaagagaaagcccatccgggtcctgagcctgttcgatggcatcgccaccggtctgctggtgctgaaggacctgggcatccaggtggataggtacattgcctccgaggtgtgcgaggactccatcaccgtgggaatggtgcgtcatcagggcaagatcatgtacgtgggcgacgtgcggagcgtgacacagaagcatatccaggagtggggccctttcgacctggtgatcggcggcagcccttgcaatgacctgagcatcgtgaacccagcccggaagggcctgtacgagggaaccggcagactgttcttcgagttttacagactgctgcacgacgcccggcctaaggaaggcgacgaccggcccttcttttggctgttcgagaatgtggtggccatgggagtcagcgacaagcgggatattagccggttcctggagagcaaccccgtgatgatcgatgccaaggaagtgagcgccgcccaccgggccagatacttctggggcaatctgcctggcatgaacagacccctggccagcaccgtgaacgacaagctggagctgcaggagtgcctggagcacggccggatcgccaagttcagcaaggtgagaaccatcaccacccgaagcaacagcatcaaacaaggcaaggaccagcactttcctgtgttcatgaacgagaaggaggacatcctgtggtgtaccgagatggagagagtgttcgggttcccagtccactacacagatgtcagcaacatgtctagactggccagacagagactgctgggaagaagctggtccgtccctgtgatcagacacctgttcgcccctctgaaggagtacttcgcctgcgtgagcagcggcaacagcaacgccaacagccggggccccagcttctctagcggcctggtgccactgtccctgagagggagccacatgggccccatggagatctacaaaaccgtgagcgcctggaagcggcagcctgtgcgcgtgctgagcctgtttcggaatatcgataaagtcctgaaaagcctgggattcctggagagcggctctggctccggcggtggcaccctgaagtacgtggaggatgtgacaaacgtggtcagacgggatgtggagaagtggggccccttcgatctggtgtacggcagcacccaacccctgggcagctcttgtgaccggtgccctggctggtacatgtttcagttccaccggatcctgcagtacgccctgccgagacaggagtcccagcggccattcttttggattttcatggacaacttgctgctgaccgaggatgaccaggaaactaccactcggttcctgcagaccgaagccgtgaccctgcaggacgtgagaggccgggactaccagaacgccatgcgggtgtggtccaacatccctggactgaaaagcaagcacgcacctctgacccctaaagaagaggagtacctgcaggcccaggtgcggagcagaagcaagctggacgcccctaaggtggatctgctggtgaagaattgcctcctgcccctgagagagtacttcaagtatttcagccagaatagtctgcccctgggaggcagcggcggcggcgccctggtgacatttgaggacgtcgccgtgcggttcacccaggaggaatgggctctgctggatccttctcagaaaatcctgtaccgggacgtgatgagagagacataccggaatctgacctccgtgggcatcaactgggaatgttgggaccttgaagcctgcttcagaagcctgggaagaaacctgagagtgcaggtggtgaagagaaagtgcgagctgaccaacagcggcccctgcgccgagggcggcccaagcagcggcgcccctcctcccagcggcggcagcccagccggctccccaacctctaccgaggagggcacctctgagtccgccacccccgagagcggccctggcacctccaccgagcccagcgagggcagcgcacccggcagccctgccggcagccccacctccacagaggagggaaccagcaccgagcccagcgaaggcagcgccccaggcaccagcaccgagcctagtgagcaggagattaaacggatcaacaagatcagaagaagacttgtgaaagacagcaacaccaagaaggccggcaagacaggccccatgaaaaccctgctggttagagtgatgacacccgatctgagagagcggctggaaaacctgagaaagaagcctgaaaatatcccccagcccatcagcaatacatctagagccaacctgaataagctgctgaccgattacaccgaaatgaagaaggcgatcctgcatgtgtactgggaagagttccagaaggaccctgtgggcctgatgagccgggtggcccagcctgccagcaagaagatcgatcagaacaagctgaaacctgagatggacgagaagggcaacctgaccaccgccggctttgcctgctctcagtgtggccagcccctgttcgtgtacaagctggagcaggtgtctgagaagggcaaggcttacaccaactacttcggacggtgcaatgtggccgagcacgaaaagctgatcctgctggcccagctgaagcccgagaaggatagcgacgaagccgtgacatatagcctgggaaagtttgggcagagggccctggatttctacagcattcatgtgaccaaggagtccacccaccccgtgaagcccctggcccagatcgccggaaacagatacgcctccggacctgtgggaaaggccctgagcgacgcatgtatgggcacaatcgcctccttcctgtctaagtaccaggacatcatcatcgaacaccagaaggtggtgaagggcaaccagaagagactggagagcctgcgggagctggccggcaaggaaaacctggaataccctagcgtgaccctgccacctcagcctcacaccaaggagggcgttgatgcctacaacgaagtgatcgcccgggtgcgaatgtgggtgaacctgaacctgtggcagaagctgaagctaagcagagatgatgccaagcctctgctgagactgaagggattcccttcctttcctctggtcgagagacaggccaacgaagtggactggtgggacatggtgtgtaacgtgaagaagctgatcaacgagaaaaaggaggatggcaaggtgttttggcagaatctggctggctacaagagacaggaagccctgagaccatacctgagcagcgaggaagatcggaagaagggaaagaaattcgctcggtaccagctgggcgacctgctgctgcacctggaaaagaagcacggcgaggactggggaaaggtgtacgacgaggcctgggagcggattgacaagaaagtggaaggcctgagcaagcacatcaagctggaagaggaacggagaagcgaggacgcccagagcaaggccgccctgaccgactggctgcgggctaaggccagcttcgtgatcgagggcctgaaggaggccgacaaggacgagttctgcagatgcgagctgaagctgcagaagtggtacggggacctgcggggaaagcccttcgccatcgaagccgagaacagcatcctggacatcagcggcttcagcaagcagtacaactgtgccttcatctggcagaaggacggcgtgaagaagctgaacctgtacctgatcatcaactacttcaagggcggcaagctgcggttcaagaagatcaaacctgaagccttcgaagccaacagattctacaccgtgatcaacaaaaagagcggcgagatcgtgcccatggaggtgaacttcaacttcgacgaccccaacctgatcatcctgcctctggcctttggcaagagacagggcagagaattcatctggaacgacctgctgtccctggaaaccggcagcctgaagctggccaacggaagagtgatcgagaagacactgtacaacagaagaacccggcaggatgagcctgccctgttcgtggccctgaccttcgagcggcgggaggtcctggactcctccaatatcaaaccaatgaacctgatcggcgtggcaagaggcgaaaacatccccgccgtgatcgccctgaccgaccccgagggctgcccactgagccggtttaaggatagcctgggaaacccaacccacatcctgagaatcggcgagagctataaggagaagcagcggaccatccaggccaagaaggaggtggagcagcggagagccggcggctacagccggaagtacgccagcaaagccaagaatctggcagacgatatggtgagaaacaccgctagagatctgctgtactacgccgtgacccaggatgccatgctgatcttcgccaacctgagccggggcttcggccggcagggcaagcggaccttcatggccgagagacagtacacacggatggaggactggctgaccgccaagctggcctacgagggcctgagcaagacctacctgtccaagacactggcccagtacacctccaagacatgcagcaactgtgggtttaccatcaccagcgccgactacgacagggtgctggagaagctgaagaagacagcaacaggctggatgaccacaattaacggcaaggagctgaaggtggagggccagattacctactacaacagatacaagagacagaacgtagtcaaggacctgtccgtcgagctggatagactgagcgaagaatctgtgaacaacgacatctcctcctggacaaagggcagaagcggagaagctctgagcctcctgaagaaaagattctcccatagacccgtgcaggagaagttcgtgtgcctgaactgcggcttcgagacacacgcagccgagcaagccgccctgaacatcgccagatcctggctgttcctgcggagccaggagtacaagaaataccagacaaacaagacaaccggcaacaccgataagagagccttcgtcgagacctggcagtccttttaccggaagaagcttaaggaggtgtggaaacctgccgtgcggtctggcggatctggcggaggctccatgcccgtgaccttcgaggacgtggccgtgaccttcacccaggaggagtggggccagctggaccccgcccagaggaccctgtaccaggaggtgatgctggagacctgcggcctgctggtgagcctgggctgccccctgcccaagcccgagctgttctaccccctggaccacagccccgagctgcacaccctgaagaggggcctgagccccaacagctgccccggcgacagcaccaagcccggcggcggcccaagcagcggcgcccctcctcccagcggcggcagcccagccggctccccaacctctaccgaggagggcacctctgagtccgccacccccgagagcggccctggcacctccaccgagcccagcgagggcagcgcacccggcagccctgccggcagccccacctccacagaggagggaaccagcaccgagcccagcgaaggcagcgccccaggcaccagcaccgagcctagtgagcaggagattaaacggatcaacaagatcagaagaagacttgtgaaagacagcaacaccaagaaggccggcaagacaggccccatgaaaaccctgctggttagagtgatgacacccgatctgagagagcggctggaaaacctgagaaagaagcctgaaaatatcccccagcccatcagcaatacatctagagccaacctgaataagctgctgaccgattacaccgaaatgaagaaggcgatcctgcatgtgtactgggaagagttccagaaggaccctgtgggcctgatgagccgggtggcccagcctgccagcaagaagatcgatcagaacaagctgaaacctgagatggacgagaagggcaacctgaccaccgccggctttgcctgctctcagtgtggccagcccctgttcgtgtacaagctggagcaggtgtctgagaagggcaaggcttacaccaactacttcggacggtgcaatgtggccgagcacgaaaagctgatcctgctggcccagctgaagcccgagaaggatagcgacgaagccgtgacatatagcctgggaaagtttgggcagagggccctggatttctacagcattcatgtgaccaaggagtccacccaccccgtgaagcccctggcccagatcgccggaaacagatacgcctccggacctgtgggaaaggccctgagcgacgcatgtatgggcacaatcgcctccttcctgtctaagtaccaggacatcatcatcgaacaccagaaggtggtgaagggcaaccagaagagactggagagcctgcgggagctggccggcaaggaaaacctggaataccctagcgtgaccctgccacctcagcctcacaccaaggagggcgttgatgcctacaacgaagtgatcgcccgggtgcgaatgtgggtgaacctgaacctgtggcagaagctgaagctaagcagagatgatgccaagcctctgctgagactgaagggattcccttcctttcctctggtcgagagacaggccaacgaagtggactggtgggacatggtgtgtaacgtgaagaagctgatcaacgagaaaaaggaggatggcaaggtgttttggcagaatctggctggctacaagagacaggaagccctgagaccatacctgagcagcgaggaagatcggaagaagggaaagaaattcgctcggtaccagctgggcgacctgctgctgcacctggaaaagaagcacggcgaggactggggaaaggtgtacgacgaggcctgggagcggattgacaagaaagtggaaggcctgagcaagcacatcaagctggaagaggaacggagaagcgaggacgcccagagcaaggccgccctgaccgactggctgcgggctaaggccagcttcgtgatcgagggcctgaaggaggccgacaaggacgagttctgcagatgcgagctgaagctgcagaagtggtacggggacctgcggggaaagcccttcgccatcgaagccgagaacagcatcctggacatcagcggcttcagcaagcagtacaactgtgccttcatctggcagaaggacggcgtgaagaagctgaacctgtacctgatcatcaactacttcaagggcggcaagctgcggttcaagaagatcaaacctgaagccttcgaagccaacagattctacaccgtgatcaacaaaaagagcggcgagatcgtgcccatggaggtgaacttcaacttcgacgaccccaacctgatcatcctgcctctggcctttggcaagagacagggcagagaattcatctggaacgacctgctgtccctggaaaccggcagcctgaagctggccaacggaagagtgatcgagaagacactgtacaacagaagaacccggcaggatgagcctgccctgttcgtggccctgaccttcgagcggcgggaggtcctggactcctccaatatcaaaccaatgaacctgatcggcgtggcaagaggcgaaaacatccccgccgtgatcgccctgaccgaccccgagggctgcccactgagccggtttaaggatagcctgggaaacccaacccacatcctgagaatcggcgagagctataaggagaagcagcggaccatccaggccaagaaggaggtggagcagcggagagccggcggctacagccggaagtacgccagcaaagccaagaatctggcagacgatatggtgagaaacaccgctagagatctgctgtactacgccgtgacccaggatgccatgctgatcttcgccaacctgagccggggcttcggccggcagggcaagcggaccttcatggccgagagacagtacacacggatggaggactggctgaccgccaagctggcctacgagggcctgagcaagacctacctgtccaagacactggcccagtacacctccaagacatgcagcaactgtgggtttaccatcaccagcgccgactacgacagggtgctggagaagctgaagaagacagcaacaggctggatgaccacaattaacggcaaggagctgaaggtggagggccagattacctactacaacagatacaagagacagaacgtagtcaaggacctgtccgtcgagctggatagactgagcgaagaatctgtgaacaacgacatctcctcctggacaaagggcagaagcggagaagctctgagcctcctgaagaaaagattctcccatagacccgtgcaggagaagttcgtgtgcctgaactgcggcttcgagacacacgcagccgagcaagccgccctgaacatcgccagatcctggctgttcctgcggagccaggagtacaagaaataccagacaaacaagacaaccggcaacaccgataagagagccttcgtcgagacctggcagtccttttaccggaagaagcttaaggaggtgtggaaacctgccgtgcggtctggcggatctggcggaggctcctatgcccgtgaccttcgaggacgtggccgtgaccttcacccaggaggagtggggccagctggaccccgcccagaggaccctgtaccaggaggtgatgctggagacctgcggcctgctggtgagcctgggctgccccctgcccaagcccgagctgttctaccccctggaccacagccccgagctgcacaccctgaagaggggcctgagccccaacagctgccccggcgacagcaccaagcccggcggatctggctccggcagcggccccaagaaaaagagaaaagtctaagctgccttctgcggggcttgccttctggccatgcccttcttctctcccttgcacctgtacctcttggtctttgaataaagcctgagtaggaaggctagcaaaaaaaaaaaaaaaaaaaaaaaaaaaaaaaaaaaaaaaaaaaaaaaaaaaaaaaaaaaaaaaaaaaaaaaaaaaaaaaa

SEQ ID NO: 16887 - RNA, 9521 nt, synthetic construct
  source 1..9521: mol_type = other RNA
aggaaataagagagaaaagaagagtaagaagaaatataagagccaccatggcccctaagaagaagcgtaaagtgagccggatggaacgcctcgtctacgaggtgcggcagaagtgcagaaacatcgaggacatctgcatctcctgcggatctctgaacgtgaccctggagcacccactgttcatcggcggcatgtgccagaactgtaaaaactgttttctggagtgtgcctatcaatacgacgatgacggctaccagagctactgcaccatctgttgcggcggaagagaggtgctgatgtgtggaaataacaactgctgccggtgcttctgcgtggaatgcgtggacctgctggtgggccccggcgccgcccaggccgctattaaggaagatccttggaactgctacatgtgcggccacaagggcacatacggcctgctgagacggagagaggactggcctagcagactgcagatgttcttcgccaataaccacgaccaggagttcgacccccctaaggtgtaccctcccgtccccgccgagaagagaaagcccatccgggtcctgagcctgttcgatggcatcgccaccggtctgctggtgctgaaggacctgggcatccaggtggataggtacattgcctccgaggtgtgcgaggactccatcaccgtgggaatggtgcgtcatcagggcaagatcatgtacgtgggcgacgtgcggagcgtgacacagaagcatatccaggagtggggccctttcgacctggtgatcggcggcagcccttgcaatgacctgagcatcgtgaacccagcccggaagggcctgtacgagggaaccggcagactgttcttcgagttttacagactgctgcacgacgcccggcctaaggaaggcgacgaccggcccttcttttggctgttcgagaatgtggtggccatgggagtcagcgacaagcgggatattagccggttcctggagagcaaccccgtgatgatcgatgccaaggaagtgagcgccgcccaccgggccagatacttctggggcaatctgcctggcatgaacagacccctggccagcaccgtgaacgacaagctggagctgcaggagtgcctggagcacggccggatcgccaagttcagcaaggtgagaaccatcaccacccgaagcaacagcatcaaacaaggcaaggaccagcactttcctgtgttcatgaacgagaaggaggacatcctgtggtgtaccgagatggagagagtgttcgggttcccagtccactacacagatgtcagcaacatgtctagactggccagacagagactgctgggaagaagctggtccgtccctgtgatcagacacctgttcgcccctctgaaggagtacttcgcctgcgtgagcagcggcaacagcaacgccaacagccggggccccagcttctctagcggcctggtgccactgtccctgagagggagccacatgggccccatggagatctacaaaaccgtgagcgcctggaagcggcagcctgtgcgcgtgctgagcctgtttcggaatatcgataaagtcctgaaaagcctgggattcctggagagcggctctggctccggcggtggcaccctgaagtacgtggaggatgtgacaaacgtggtcagacgggatgtggagaagtggggccccttcgatctggtgtacggcagcacccaacccctgggcagctcttgtgaccggtgccctggctggtacatgtttcagttccaccggatcctgcagtacgccctgccgagacaggagtcccagcggccattcttttggattttcatggacaacttgctgctgaccgaggatgaccaggaaactaccactcggttcctgcagaccgaagccgtgaccctgcaggacgtgagaggccgggactaccagaacgccatgcgggtgtggtccaacatccctggactgaaaagcaagcacgcacctctgacccctaaagaagaggagtacctgcaggcccaggtgcggagcagaagcaagctggacgcccctaaggtggatctgctggtgaagaattgcctcctgcccctgagagagtacttcaagtatttcagccagaatagtctgcccctgggaggcagcggcggcggcgccctggtgacatttgaggacgtcgccgtgcggttcacccaggaggaatgggctctgctggatccttctcagaaaatcctgtaccgggacgtgatgagagagacataccggaatctgacctccgtgggcatcaactgggaatgttgggaccttgaagcctgcttcagaagcctgggaagaaacctgagagtgcaggtggtgaagagaaagtgcgagctgaccaacagcggcccctgcgccgagggcggcccaagcagcggcgcccctcctcccagcggcggcagcccagccggctccccaacctctaccgaggagggcacctctgagtccgccacccccgagagcggccctggcacctccaccgagcccagcgagggcagcgcacccggcagccctgccggcagccccacctccacagaggagggaaccagcaccgagcccagcgaaggcagcgccccaggcaccagcaccgagcctagtgagcaggagattaaacggatcaacaagatcagaagaagacttgtgaaagacagcaacaccaagaaggccggcaagacaggccccatgaaaaccctgctggttagagtgatgacacccgatctgagagagcggctggaaaacctgagaaagaagcctgaaaatatcccccagcccatcagcaatacatctagagccaacctgaataagctgctgaccgattacaccgaaatgaagaaggcgatcctgcatgtgtactgggaagagttccagaaggaccctgtgggcctgatgagccgggtggcccagcctgccagcaagaagatcgatcagaacaagctgaaacctgagatggacgagaagggcaacctgaccaccgccggctttgcctgctctcagtgtggccagcccctgttcgtgtacaagctggagcaggtgtctgagaagggcaaggcttacaccaactacttcggacggtgcaatgtggccgagcacgaaaagctgatcctgctggcccagctgaagcccgagaaggatagcgacgaagccgtgacatatagcctgggaaagtttgggcagagggccctggatttctacagcattcatgtgaccaaggagtccacccaccccgtgaagcccctggcccagatcgccggaaacagatacgcctccggacctgtgggaaaggccctgagcgacgcatgtatgggcacaatcgcctccttcctgtctaagtaccaggacatcatcatcgaacaccagaaggtggtgaagggcaaccagaagagactggagagcctgcgggagctggccggcaaggaaaacctggaataccctagcgtgaccctgccacctcagcctcacaccaaggagggcgttgatgcctacaacgaagtgatcgcccgggtgcgaatgtgggtgaacctgaacctgtggcagaagctgaagctaagcagagatgatgccaagcctctgctgagactgaagggattcccttcctttcctctggtcgagagacaggccaacgaagtggactggtgggacatggtgtgtaacgtgaagaagctgatcaacgagaaaaaggaggatggcaaggtgttttggcagaatctggctggctacaagagacaggaagccctgagaccatacctgagcagcgaggaagatcggaagaagggaaagaaattcgctcggtaccagctgggcgacctgctgctgcacctggaaaagaagcacggcgaggactggggaaaggtgtacgacgaggcctgggagcggattgacaagaaagtggaaggcctgagcaagcacatcaagctggaagaggaacggagaagcgaggacgcccagagcaaggccgccctgaccgactggctgcgggctaaggccagcttcgtgatcgagggcctgaaggaggccgacaaggacgagttctgcagatgcgagctgaagctgcagaagtggtacggggacctgcggggaaagcccttcgccatcgaagccgagaacagcatcctggacatcagcggcttcagcaagcagtacaactgtgccttcatctggcagaaggacggcgtgaagaagctgaacctgtacctgatcatcaactacttcaagggcggcaagctgcggttcaagaagatcaaacctgaagccttcgaagccaacagattctacaccgtgatcaacaaaaagagcggcgagatcgtgcccatggaggtgaacttcaacttcgacgaccccaacctgatcatcctgcctctggcctttggcaagagacagggcagagaattcatctggaacgacctgctgtccctggaaaccggcagcctgaagctggccaacggaagagtgatcgagaagacactgtacaacagaagaacccggcaggatgagcctgccctgttcgtggccctgaccttcgagcggcgggaggtcctggactcctccaatatcaaaccaatgaacctgatcggcgtggcaagaggcgaaaacatccccgccgtgatcgccctgaccgaccccgagggctgcccactgagccggtttaaggatagcctgggaaacccaacccacatcctgagaatcggcgagagctataaggagaagcagcggaccatccaggccaagaaggaggtggagcagcggagagccggcggctacagccggaagtacgccagcaaagccaagaatctggcagacgatatggtgagaaacaccgctagagatctgctgtactacgccgtgacccaggatgccatgctgatcttcgccaacctgagccggggcttcggccggcagggcaagcggaccttcatggccgagagacagtacacacggatggaggactggctgaccgccaagctggcctacgagggcctgagcaagacctacctgtccaagacactggcccagtacacctccaagacatgcagcaactgtgggtttaccatcaccagcgccgactacgacagggtgctggagaagctgaagaagacagcaacaggctggatgaccacaattaacggcaaggagctgaaggtggagggccagattacctactacaacagatacaagagacagaacgtagtcaaggacctgtccgtcgagctggatagactgagcgaagaatctgtgaacaacgacatctcctcctggacaaagggcagaagcggagaagctctgagcctcctgaagaaaagattctcccatagacccgtgcaggagaagttcgtgtgcctgaactgcggcttcgagacacacgcagccgagcaagccgccctgaacatcgccagatcctggctgttcctgcggagccaggagtacaagaaataccagacaaacaagacaaccggcaacaccgataagagagccttcgtcgagacctggcagtccttttaccggaagaagcttaaggaggtgtggaaacctgccgtgcggtctggcggatctggcggaggctccgtggccttcgaggacgtggccgtgaacttcacccaggaggagtgggccctgctgaacagcagccagaagaacctgtacagggaggtgatgcaggagacctgcaggaacctggccagcgtgggcagcaagtggaaggaccagaacatcgaggaccacttcgagaagcccggcaagaacatcaggaagcacatggtgcagaagctgtgcgagagcaaggagggcagccagtacggcgaggtggtgagccagatccccaacctgggcggcccaagcagcggcgcccctcctcccagcggcggcagcccagccggctccccaacctctaccgaggagggcacctctgagtccgccacccccgagagcggccctggcacctccaccgagcccagcgagggcagcgcacccggcagccctgccggcagccccacctccacagaggagggaaccagcaccgagcccagcgaaggcagcgccccaggcaccagcaccgagcctagtgagcaggagattaaacggatcaacaagatcagaagaagacttgtgaaagacagcaacaccaagaaggccggcaagacaggccccatgaaaaccctgctggttagagtgatgacacccgatctgagagagcggctggaaaacctgagaaagaagcctgaaaatatcccccagcccatcagcaatacatctagagccaacctgaataagctgctgaccgattacaccgaaatgaagaaggcgatcctgcatgtgtactgggaagagttccagaaggaccctgtgggcctgatgagccgggtggcccagcctgccagcaagaagatcgatcagaacaagctgaaacctgagatggacgagaagggcaacctgaccaccgccggctttgcctgctctcagtgtggccagcccctgttcgtgtacaagctggagcaggtgtctgagaagggcaaggcttacaccaactacttcggacggtgcaatgtggccgagcacgaaaagctgatcctgctggcccagctgaagcccgagaaggatagcgacgaagccgtgacatatagcctgggaaagtttgggcagagggccctggatttctacagcattcatgtgaccaaggagtccacccaccccgtgaagcccctggcccagatcgccggaaacagatacgcctccggacctgtgggaaaggccctgagcgacgcatgtatgggcacaatcgcctccttcctgtctaagtaccaggacatcatcatcgaacaccagaaggtggtgaagggcaaccagaagagactggagagcctgcgggagctggccggcaaggaaaacctggaataccctagcgtgaccctgccacctcagcctcacaccaaggagggcgttgatgcctacaacgaagtgatcgcccgggtgcgaatgtgggtgaacctgaacctgtggcagaagctgaagctaagcagagatgatgccaagcctctgctgagactgaagggattcccttcctttcctctggtcgagagacaggccaacgaagtggactggtgggacatggtgtgtaacgtgaagaagctgatcaacgagaaaaaggaggatggcaaggtgttttggcagaatctggctggctacaagagacaggaagccctgagaccatacctgagcagcgaggaagatcggaagaagggaaagaaattcgctcggtaccagctgggcgacctgctgctgcacctggaaaagaagcacggcgaggactggggaaaggtgtacgacgaggcctgggagcggattgacaagaaagtggaaggcctgagcaagcacatcaagctggaagaggaacggagaagcgaggacgcccagagcaaggccgccctgaccgactggctgcgggctaaggccagcttcgtgatcgagggcctgaaggaggccgacaaggacgagttctgcagatgcgagctgaagctgcagaagtggtacggggacctgcggggaaagcccttcgccatcgaagccgagaacagcatcctggacatcagcggcttcagcaagcagtacaactgtgccttcatctggcagaaggacggcgtgaagaagctgaacctgtacctgatcatcaactacttcaagggcggcaagctgcggttcaagaagatcaaacctgaagccttcgaagccaacagattctacaccgtgatcaacaaaaagagcggcgagatcgtgcccatggaggtgaacttcaacttcgacgaccccaacctgatcatcctgcctctggcctttggcaagagacagggcagagaattcatctggaacgacctgctgtccctggaaaccggcagcctgaagctggccaacggaagagtgatcgagaagacactgtacaacagaagaacccggcaggatgagcctgccctgttcgtggccctgaccttcgagcggcgggaggtcctggactcctccaatatcaaaccaatgaacctgatcggcgtggcaagaggcgaaaacatccccgccgtgatcgccctgaccgaccccgagggctgcccactgagccggtttaaggatagcctgggaaacccaacccacatcctgagaatcggcgagagctataaggagaagcagcggaccatccaggccaagaaggaggtggagcagcggagagccggcggctacagccggaagtacgccagcaaagccaagaatctggcagacgatatggtgagaaacaccgctagagatctgctgtactacgccgtgacccaggatgccatgctgatcttcgccaacctgagccggggcttcggccggcagggcaagcggaccttcatggccgagagacagtacacacggatggaggactggctgaccgccaagctggcctacgagggcctgagcaagacctacctgtccaagacactggcccagtacacctccaagacatgcagcaactgtgggtttaccatcaccagcgccgactacgacagggtgctggagaagctgaagaagacagcaacaggctggatgaccacaattaacggcaaggagctgaaggtggagggccagattacctactacaacagatacaagagacagaacgtagtcaaggacctgtccgtcgagctggatagactgagcgaagaatctgtgaacaacgacatctcctcctggacaaagggcagaagcggagaagctctgagcctcctgaagaaaagattctcccatagacccgtgcaggagaagttcgtgtgcctgaactgcggcttcgagacacacgcagccgagcaagccgccctgaacatcgccagatcctggctgttcctgcggagccaggagtacaagaaataccagacaaacaagacaaccggcaacaccgataagagagccttcgtcgagacctggcagtccttttaccggaagaagcttaaggaggtgtggaaacctgccgtgcggtctggcggatctggcggaggctcctgtggccttcgaggacgtggccgtgaacttcacccaggaggagtgggccctgctgaacagcagccagaagaacctgtacagggaggtgatgcaggagacctgcaggaacctggccagcgtgggcagcaagtggaaggaccagaacatcgaggaccacttcgagaagcccggcaagaacatcaggaagcacatggtgcagaagctgtgcgagagcaaggagggcagccagtacggcgaggtggtgagccagatccccaacctgggatctggctccggcagcggccccaagaaaaagagaaaagtctaagctgccttctgcggggcttgccttctggccatgcccttcttctctcccttgcacctgtacctcttggtctttgaataaagcctgagtaggaaggctagcaaaaaaaaaaaaaaaaaaaaaaaaaaaaaaaaaaaaaaaaaaaaaaaaaaaaaaaaaaaaaaaaaaaaaaaaaaaaaaaa

SEQ ID NO: 16888 - RNA, 9503 nt, synthetic construct
  source 1..9503: mol_type = other RNA
aggaaataagagagaaaagaagagtaagaagaaatataagagccaccatggcccctaagaagaagcgtaaagtgagccggatggaacgcctcgtctacgaggtgcggcagaagtgcagaaacatcgaggacatctgcatctcctgcggatctctgaacgtgaccctggagcacccactgttcatcggcggcatgtgccagaactgtaaaaactgttttctggagtgtgcctatcaatacgacgatgacggctaccagagctactgcaccatctgttgcggcggaagagaggtgctgatgtgtggaaataacaactgctgccggtgcttctgcgtggaatgcgtggacctgctggtgggccccggcgccgcccaggccgctattaaggaagatccttggaactgctacatgtgcggccacaagggcacatacggcctgctgagacggagagaggactggcctagcagactgcagatgttcttcgccaataaccacgaccaggagttcgacccccctaaggtgtaccctcccgtccccgccgagaagagaaagcccatccgggtcctgagcctgttcgatggcatcgccaccggtctgctggtgctgaaggacctgggcatccaggtggataggtacattgcctccgaggtgtgcgaggactccatcaccgtgggaatggtgcgtcatcagggcaagatcatgtacgtgggcgacgtgcggagcgtgacacagaagcatatccaggagtggggccctttcgacctggtgatcggcggcagcccttgcaatgacctgagcatcgtgaacccagcccggaagggcctgtacgagggaaccggcagactgttcttcgagttttacagactgctgcacgacgcccggcctaaggaaggcgacgaccggcccttcttttggctgttcgagaatgtggtggccatgggagtcagcgacaagcgggatattagccggttcctggagagcaaccccgtgatgatcgatgccaaggaagtgagcgccgcccaccgggccagatacttctggggcaatctgcctggcatgaacagacccctggccagcaccgtgaacgacaagctggagctgcaggagtgcctggagcacggccggatcgccaagttcagcaaggtgagaaccatcaccacccgaagcaacagcatcaaacaaggcaaggaccagcactttcctgtgttcatgaacgagaaggaggacatcctgtggtgtaccgagatggagagagtgttcgggttcccagtccactacacagatgtcagcaacatgtctagactggccagacagagactgctgggaagaagctggtccgtccctgtgatcagacacctgttcgcccctctgaaggagtacttcgcctgcgtgagcagcggcaacagcaacgccaacagccggggccccagcttctctagcggcctggtgccactgtccctgagagggagccacatgggccccatggagatctacaaaaccgtgagcgcctggaagcggcagcctgtgcgcgtgctgagcctgtttcggaatatcgataaagtcctgaaaagcctgggattcctggagagcggctctggctccggcggtggcaccctgaagtacgtggaggatgtgacaaacgtggtcagacgggatgtggagaagtggggccccttcgatctggtgtacggcagcacccaacccctgggcagctcttgtgaccggtgccctggctggtacatgtttcagttccaccggatcctgcagtacgccctgccgagacaggagtcccagcggccattcttttggattttcatggacaacttgctgctgaccgaggatgaccaggaaactaccactcggttcctgcagaccgaagccgtgaccctgcaggacgtgagaggccgggactaccagaacgccatgcgggtgtggtccaacatccctggactgaaaagcaagcacgcacctctgacccctaaagaagaggagtacctgcaggcccaggtgcggagcagaagcaagctggacgcccctaaggtggatctgctggtgaagaattgcctcctgcccctgagagagtacttcaagtatttcagccagaatagtctgcccctgggaggcagcggcggcggcgccctggtgacatttgaggacgtcgccgtgcggttcacccaggaggaatgggctctgctggatccttctcagaaaatcctgtaccgggacgtgatgagagagacataccggaatctgacctccgtgggcatcaactgggaatgttgggaccttgaagcctgcttcagaagcctgggaagaaacctgagagtgcaggtggtgaagagaaagtgcgagctgaccaacagcggcccctgcgccgagggcggcccaagcagcggcgcccctcctcccagcggcggcagcccagccggctccccaacctctaccgaggagggcacctctgagtccgccacccccgagagcggccctggcacctccaccgagcccagcgagggcagcgcacccggcagccctgccggcagccccacctccacagaggagggaaccagcaccgagcccagcgaaggcagcgccccaggcaccagcaccgagcctagtgagcaggagattaaacggatcaacaagatcagaagaagacttgtgaaagacagcaacaccaagaaggccggcaagacaggccccatgaaaaccctgctggttagagtgatgacacccgatctgagagagcggctggaaaacctgagaaagaagcctgaaaatatcccccagcccatcagcaatacatctagagccaacctgaataagctgctgaccgattacaccgaaatgaagaaggcgatcctgcatgtgtactgggaagagttccagaaggaccctgtgggcctgatgagccgggtggcccagcctgccagcaagaagatcgatcagaacaagctgaaacctgagatggacgagaagggcaacctgaccaccgccggctttgcctgctctcagtgtggccagcccctgttcgtgtacaagctggagcaggtgtctgagaagggcaaggcttacaccaactacttcggacggtgcaatgtggccgagcacgaaaagctgatcctgctggcccagctgaagcccgagaaggatagcgacgaagccgtgacatatagcctgggaaagtttgggcagagggccctggatttctacagcattcatgtgaccaaggagtccacccaccccgtgaagcccctggcccagatcgccggaaacagatacgcctccggacctgtgggaaaggccctgagcgacgcatgtatgggcacaatcgcctccttcctgtctaagtaccaggacatcatcatcgaacaccagaaggtggtgaagggcaaccagaagagactggagagcctgcgggagctggccggcaaggaaaacctggaataccctagcgtgaccctgccacctcagcctcacaccaaggagggcgttgatgcctacaacgaagtgatcgcccgggtgcgaatgtgggtgaacctgaacctgtggcagaagctgaagctaagcagagatgatgccaagcctctgctgagactgaagggattcccttcctttcctctggtcgagagacaggccaacgaagtggactggtgggacatggtgtgtaacgtgaagaagctgatcaacgagaaaaaggaggatggcaaggtgttttggcagaatctggctggctacaagagacaggaagccctgagaccatacctgagcagcgaggaagatcggaagaagggaaagaaattcgctcggtaccagctgggcgacctgctgctgcacctggaaaagaagcacggcgaggactggggaaaggtgtacgacgaggcctgggagcggattgacaagaaagtggaaggcctgagcaagcacatcaagctggaagaggaacggagaagcgaggacgcccagagcaaggccgccctgaccgactggctgcgggctaaggccagcttcgtgatcgagggcctgaaggaggccgacaaggacgagttctgcagatgcgagctgaagctgcagaagtggtacggggacctgcggggaaagcccttcgccatcgaagccgagaacagcatcctggacatcagcggcttcagcaagcagtacaactgtgccttcatctggcagaaggacggcgtgaagaagctgaacctgtacctgatcatcaactacttcaagggcggcaagctgcggttcaagaagatcaaacctgaagccttcgaagccaacagattctacaccgtgatcaacaaaaagagcggcgagatcgtgcccatggaggtgaacttcaacttcgacgaccccaacctgatcatcctgcctctggcctttggcaagagacagggcagagaattcatctggaacgacctgctgtccctggaaaccggcagcctgaagctggccaacggaagagtgatcgagaagacactgtacaacagaagaacccggcaggatgagcctgccctgttcgtggccctgaccttcgagcggcgggaggtcctggactcctccaatatcaaaccaatgaacctgatcggcgtggcaagaggcgaaaacatccccgccgtgatcgccctgaccgaccccgagggctgcccactgagccggtttaaggatagcctgggaaacccaacccacatcctgagaatcggcgagagctataaggagaagcagcggaccatccaggccaagaaggaggtggagcagcggagagccggcggctacagccggaagtacgccagcaaagccaagaatctggcagacgatatggtgagaaacaccgctagagatctgctgtactacgccgtgacccaggatgccatgctgatcttcgccaacctgagccggggcttcggccggcagggcaagcggaccttcatggccgagagacagtacacacggatggaggactggctgaccgccaagctggcctacgagggcctgagcaagacctacctgtccaagacactggcccagtacacctccaagacatgcagcaactgtgggtttaccatcaccagcgccgactacgacagggtgctggagaagctgaagaagacagcaacaggctggatgaccacaattaacggcaaggagctgaaggtggagggccagattacctactacaacagatacaagagacagaacgtagtcaaggacctgtccgtcgagctggatagactgagcgaagaatctgtgaacaacgacatctcctcctggacaaagggcagaagcggagaagctctgagcctcctgaagaaaagattctcccatagacccgtgcaggagaagttcgtgtgcctgaactgcggcttcgagacacacgcagccgagcaagccgccctgaacatcgccagatcctggctgttcctgcggagccaggagtacaagaaataccagacaaacaagacaaccggcaacaccgataagagagccttcgtcgagacctggcagtccttttaccggaagaagcttaaggaggtgtggaaacctgccgtgcggtctggcggatctggcggaggctccctgaccttcgaggacgtggccgtgtacttcagcgaggaggagtggcagctgctggacccccccgagaagaccctgtacaacgacgtgatgcaggacatctacgagaccgtgatcagcctgggcctgaagctgaagaacgacaccggcaacgaccaccccatcagcgtgagcaccagcgagatccagaccagcggctgcaaggtgagcaagaagaccaggatgaagatcgcccagaagaccatgggcagggagggcggcccaagcagcggcgcccctcctcccagcggcggcagcccagccggctccccaacctctaccgaggagggcacctctgagtccgccacccccgagagcggccctggcacctccaccgagcccagcgagggcagcgcacccggcagccctgccggcagccccacctccacagaggagggaaccagcaccgagcccagcgaaggcagcgccccaggcaccagcaccgagcctagtgagcaggagattaaacggatcaacaagatcagaagaagacttgtgaaagacagcaacaccaagaaggccggcaagacaggccccatgaaaaccctgctggttagagtgatgacacccgatctgagagagcggctggaaaacctgagaaagaagcctgaaaatatcccccagcccatcagcaatacatctagagccaacctgaataagctgctgaccgattacaccgaaatgaagaaggcgatcctgcatgtgtactgggaagagttccagaaggaccctgtgggcctgatgagccgggtggcccagcctgccagcaagaagatcgatcagaacaagctgaaacctgagatggacgagaagggcaacctgaccaccgccggctttgcctgctctcagtgtggccagcccctgttcgtgtacaagctggagcaggtgtctgagaagggcaaggcttacaccaactacttcggacggtgcaatgtggccgagcacgaaaagctgatcctgctggcccagctgaagcccgagaaggatagcgacgaagccgtgacatatagcctgggaaagtttgggcagagggccctggatttctacagcattcatgtgaccaaggagtccacccaccccgtgaagcccctggcccagatcgccggaaacagatacgcctccggacctgtgggaaaggccctgagcgacgcatgtatgggcacaatcgcctccttcctgtctaagtaccaggacatcatcatcgaacaccagaaggtggtgaagggcaaccagaagagactggagagcctgcgggagctggccggcaaggaaaacctggaataccctagcgtgaccctgccacctcagcctcacaccaaggagggcgttgatgcctacaacgaagtgatcgcccgggtgcgaatgtgggtgaacctgaacctgtggcagaagctgaagctaagcagagatgatgccaagcctctgctgagactgaagggattcccttcctttcctctggtcgagagacaggccaacgaagtggactggtgggacatggtgtgtaacgtgaagaagctgatcaacgagaaaaaggaggatggcaaggtgttttggcagaatctggctggctacaagagacaggaagccctgagaccatacctgagcagcgaggaagatcggaagaagggaaagaaattcgctcggtaccagctgggcgacctgctgctgcacctggaaaagaagcacggcgaggactggggaaaggtgtacgacgaggcctgggagcggattgacaagaaagtggaaggcctgagcaagcacatcaagctggaagaggaacggagaagcgaggacgcccagagcaaggccgccctgaccgactggctgcgggctaaggccagcttcgtgatcgagggcctgaaggaggccgacaaggacgagttctgcagatgcgagctgaagctgcagaagtggtacggggacctgcggggaaagcccttcgccatcgaagccgagaacagcatcctggacatcagcggcttcagcaagcagtacaactgtgccttcatctggcagaaggacggcgtgaagaagctgaacctgtacctgatcatcaactacttcaagggcggcaagctgcggttcaagaagatcaaacctgaagccttcgaagccaacagattctacaccgtgatcaacaaaaagagcggcgagatcgtgcccatggaggtgaacttcaacttcgacgaccccaacctgatcatcctgcctctggcctttggcaagagacagggcagagaattcatctggaacgacctgctgtccctggaaaccggcagcctgaagctggccaacggaagagtgatcgagaagacactgtacaacagaagaacccggcaggatgagcctgccctgttcgtggccctgaccttcgagcggcgggaggtcctggactcctccaatatcaaaccaatgaacctgatcggcgtggcaagaggcgaaaacatccccgccgtgatcgccctgaccgaccccgagggctgcccactgagccggtttaaggatagcctgggaaacccaacccacatcctgagaatcggcgagagctataaggagaagcagcggaccatccaggccaagaaggaggtggagcagcggagagccggcggctacagccggaagtacgccagcaaagccaagaatctggcagacgatatggtgagaaacaccgctagagatctgctgtactacgccgtgacccaggatgccatgctgatcttcgccaacctgagccggggcttcggccggcagggcaagcggaccttcatggccgagagacagtacacacggatggaggactggctgaccgccaagctggcctacgagggcctgagcaagacctacctgtccaagacactggcccagtacacctccaagacatgcagcaactgtgggtttaccatcaccagcgccgactacgacagggtgctggagaagctgaagaagacagcaacaggctggatgaccacaattaacggcaaggagctgaaggtggagggccagattacctactacaacagatacaagagacagaacgtagtcaaggacctgtccgtcgagctggatagactgagcgaagaatctgtgaacaacgacatctcctcctggacaaagggcagaagcggagaagctctgagcctcctgaagaaaagattctcccatagacccgtgcaggagaagttcgtgtgcctgaactgcggcttcgagacacacgcagccgagcaagccgccctgaacatcgccagatcctggctgttcctgcggagccaggagtacaagaaataccagacaaacaagacaaccggcaacaccgataagagagccttcgtcgagacctggcagtccttttaccggaagaagcttaaggaggtgtggaaacctgccgtgcggtctggcggatctggcggaggctcctctgaccttcgaggacgtggccgtgtacttcagcgaggaggagtggcagctgctggacccccccgagaagaccctgtacaacgacgtgatgcaggacatctacgagaccgtgatcagcctgggcctgaagctgaagaacgacaccggcaacgaccaccccatcagcgtgagcaccagcgagatccagaccagcggctgcaaggtgagcaagaagaccaggatgaagatcgcccagaagaccatgggcagggagggatctggctccggcagcggccccaagaaaaagagaaaagtctaagctgccttctgcggggcttgccttctggccatgcccttcttctctcccttgcacctgtacctcttggtctttgaataaagcctgagtaggaaggctagcaaaaaaaaaaaaaaaaaaaaaaaaaaaaaaaaaaaaaaaaaaaaaaaaaaaaaaaaaaaaaaaaaaaaaaaaaaaaaaaa

SEQ ID NO: 16889 - RNA, 9485 nt, synthetic construct
  source 1..9485: mol_type = other RNA
aggaaataagagagaaaagaagagtaagaagaaatataagagccaccatggcccctaagaagaagcgtaaagtgagccggatggaacgcctcgtctacgaggtgcggcagaagtgcagaaacatcgaggacatctgcatctcctgcggatctctgaacgtgaccctggagcacccactgttcatcggcggcatgtgccagaactgtaaaaactgttttctggagtgtgcctatcaatacgacgatgacggctaccagagctactgcaccatctgttgcggcggaagagaggtgctgatgtgtggaaataacaactgctgccggtgcttctgcgtggaatgcgtggacctgctggtgggccccggcgccgcccaggccgctattaaggaagatccttggaactgctacatgtgcggccacaagggcacatacggcctgctgagacggagagaggactggcctagcagactgcagatgttcttcgccaataaccacgaccaggagttcgacccccctaaggtgtaccctcccgtccccgccgagaagagaaagcccatccgggtcctgagcctgttcgatggcatcgccaccggtctgctggtgctgaaggacctgggcatccaggtggataggtacattgcctccgaggtgtgcgaggactccatcaccgtgggaatggtgcgtcatcagggcaagatcatgtacgtgggcgacgtgcggagcgtgacacagaagcatatccaggagtggggccctttcgacctggtgatcggcggcagcccttgcaatgacctgagcatcgtgaacccagcccggaagggcctgtacgagggaaccggcagactgttcttcgagttttacagactgctgcacgacgcccggcctaaggaaggcgacgaccggcccttcttttggctgttcgagaatgtggtggccatgggagtcagcgacaagcgggatattagccggttcctggagagcaaccccgtgatgatcgatgccaaggaagtgagcgccgcccaccgggccagatacttctggggcaatctgcctggcatgaacagacccctggccagcaccgtgaacgacaagctggagctgcaggagtgcctggagcacggccggatcgccaagttcagcaaggtgagaaccatcaccacccgaagcaacagcatcaaacaaggcaaggaccagcactttcctgtgttcatgaacgagaaggaggacatcctgtggtgtaccgagatggagagagtgttcgggttcccagtccactacacagatgtcagcaacatgtctagactggccagacagagactgctgggaagaagctggtccgtccctgtgatcagacacctgttcgcccctctgaaggagtacttcgcctgcgtgagcagcggcaacagcaacgccaacagccggggccccagcttctctagcggcctggtgccactgtccctgagagggagccacatgggccccatggagatctacaaaaccgtgagcgcctggaagcggcagcctgtgcgcgtgctgagcctgtttcggaatatcgataaagtcctgaaaagcctgggattcctggagagcggctctggctccggcggtggcaccctgaagtacgtggaggatgtgacaaacgtggtcagacgggatgtggagaagtggggccccttcgatctggtgtacggcagcacccaacccctgggcagctcttgtgaccggtgccctggctggtacatgtttcagttccaccggatcctgcagtacgccctgccgagacaggagtcccagcggccattcttttggattttcatggacaacttgctgctgaccgaggatgaccaggaaactaccactcggttcctgcagaccgaagccgtgaccctgcaggacgtgagaggccgggactaccagaacgccatgcgggtgtggtccaacatccctggactgaaaagcaagcacgcacctctgacccctaaagaagaggagtacctgcaggcccaggtgcggagcagaagcaagctggacgcccctaaggtggatctgctggtgaagaattgcctcctgcccctgagagagtacttcaagtatttcagccagaatagtctgcccctgggaggcagcggcggcggcgccctggtgacatttgaggacgtcgccgtgcggttcacccaggaggaatgggctctgctggatccttctcagaaaatcctgtaccgggacgtgatgagagagacataccggaatctgacctccgtgggcatcaactgggaatgttgggaccttgaagcctgcttcagaagcctgggaagaaacctgagagtgcaggtggtgaagagaaagtgcgagctgaccaacagcggcccctgcgccgagggcggcccaagcagcggcgcccctcctcccagcggcggcagcccagccggctccccaacctctaccgaggagggcacctctgagtccgccacccccgagagcggccctggcacctccaccgagcccagcgagggcagcgcacccggcagccctgccggcagccccacctccacagaggagggaaccagcaccgagcccagcgaaggcagcgccccaggcaccagcaccgagcctagtgagcaggagattaaacggatcaacaagatcagaagaagacttgtgaaagacagcaacaccaagaaggccggcaagacaggccccatgaaaaccctgctggttagagtgatgacacccgatctgagagagcggctggaaaacctgagaaagaagcctgaaaatatcccccagcccatcagcaatacatctagagccaacctgaataagctgctgaccgattacaccgaaatgaagaaggcgatcctgcatgtgtactgggaagagttccagaaggaccctgtgggcctgatgagccgggtggcccagcctgccagcaagaagatcgatcagaacaagctgaaacctgagatggacgagaagggcaacctgaccaccgccggctttgcctgctctcagtgtggccagcccctgttcgtgtacaagctggagcaggtgtctgagaagggcaaggcttacaccaactacttcggacggtgcaatgtggccgagcacgaaaagctgatcctgctggcccagctgaagcccgagaaggatagcgacgaagccgtgacatatagcctgggaaagtttgggcagagggccctggatttctacagcattcatgtgaccaaggagtccacccaccccgtgaagcccctggcccagatcgccggaaacagatacgcctccggacctgtgggaaaggccctgagcgacgcatgtatgggcacaatcgcctccttcctgtctaagtaccaggacatcatcatcgaacaccagaaggtggtgaagggcaaccagaagagactggagagcctgcgggagctggccggcaaggaaaacctggaataccctagcgtgaccctgccacctcagcctcacaccaaggagggcgttgatgcctacaacgaagtgatcgcccgggtgcgaatgtgggtgaacctgaacctgtggcagaagctgaagctaagcagagatgatgccaagcctctgctgagactgaagggattcccttcctttcctctggtcgagagacaggccaacgaagtggactggtgggacatggtgtgtaacgtgaagaagctgatcaacgagaaaaaggaggatggcaaggtgttttggcagaatctggctggctacaagagacaggaagccctgagaccatacctgagcagcgaggaagatcggaagaagggaaagaaattcgctcggtaccagctgggcgacctgctgctgcacctggaaaagaagcacggcgaggactggggaaaggtgtacgacgaggcctgggagcggattgacaagaaagtggaaggcctgagcaagcacatcaagctggaagaggaacggagaagcgaggacgcccagagcaaggccgccctgaccgactggctgcgggctaaggccagcttcgtgatcgagggcctgaaggaggccgacaaggacgagttctgcagatgcgagctgaagctgcagaagtggtacggggacctgcggggaaagcccttcgccatcgaagccgagaacagcatcctggacatcagcggcttcagcaagcagtacaactgtgccttcatctggcagaaggacggcgtgaagaagctgaacctgtacctgatcatcaactacttcaagggcggcaagctgcggttcaagaagatcaaacctgaagccttcgaagccaacagattctacaccgtgatcaacaaaaagagcggcgagatcgtgcccatggaggtgaacttcaacttcgacgaccccaacctgatcatcctgcctctggcctttggcaagagacagggcagagaattcatctggaacgacctgctgtccctggaaaccggcagcctgaagctggccaacggaagagtgatcgagaagacactgtacaacagaagaacccggcaggatgagcctgccctgttcgtggccctgaccttcgagcggcgggaggtcctggactcctccaatatcaaaccaatgaacctgatcggcgtggcaagaggcgaaaacatccccgccgtgatcgccctgaccgaccccgagggctgcccactgagccggtttaaggatagcctgggaaacccaacccacatcctgagaatcggcgagagctataaggagaagcagcggaccatccaggccaagaaggaggtggagcagcggagagccggcggctacagccggaagtacgccagcaaagccaagaatctggcagacgatatggtgagaaacaccgctagagatctgctgtactacgccgtgacccaggatgccatgctgatcttcgccaacctgagccggggcttcggccggcagggcaagcggaccttcatggccgagagacagtacacacggatggaggactggctgaccgccaagctggcctacgagggcctgagcaagacctacctgtccaagacactggcccagtacacctccaagacatgcagcaactgtgggtttaccatcaccagcgccgactacgacagggtgctggagaagctgaagaagacagcaacaggctggatgaccacaattaacggcaaggagctgaaggtggagggccagattacctactacaacagatacaagagacagaacgtagtcaaggacctgtccgtcgagctggatagactgagcgaagaatctgtgaacaacgacatctcctcctggacaaagggcagaagcggagaagctctgagcctcctgaagaaaagattctcccatagacccgtgcaggagaagttcgtgtgcctgaactgcggcttcgagacacacgcagccgagcaagccgccctgaacatcgccagatcctggctgttcctgcggagccaggagtacaagaaataccagacaaacaagacaaccggcaacaccgataagagagccttcgtcgagacctggcagtccttttaccggaagaagcttaaggaggtgtggaaacctgccgtgcggtctggcggatctggcggaggctccatgagccaggtgaccttcagcgacgtggccatcgacttcagccacgaggagtgggcctgcctggacagcgcccagagggacctgtacaaggacgtgatggtgcagaactacgagaacctggtgagcgtgggcctgagcatcaccaagccctacgtgatcatgctgctggaggacggcaaggagccctggatgatggagaagaagctgagcaaggtgtaccccttccccctgagccacagcgtgggcggcccaagcagcggcgcccctcctcccagcggcggcagcccagccggctccccaacctctaccgaggagggcacctctgagtccgccacccccgagagcggccctggcacctccaccgagcccagcgagggcagcgcacccggcagccctgccggcagccccacctccacagaggagggaaccagcaccgagcccagcgaaggcagcgccccaggcaccagcaccgagcctagtgagcaggagattaaacggatcaacaagatcagaagaagacttgtgaaagacagcaacaccaagaaggccggcaagacaggccccatgaaaaccctgctggttagagtgatgacacccgatctgagagagcggctggaaaacctgagaaagaagcctgaaaatatcccccagcccatcagcaatacatctagagccaacctgaataagctgctgaccgattacaccgaaatgaagaaggcgatcctgcatgtgtactgggaagagttccagaaggaccctgtgggcctgatgagccgggtggcccagcctgccagcaagaagatcgatcagaacaagctgaaacctgagatggacgagaagggcaacctgaccaccgccggctttgcctgctctcagtgtggccagcccctgttcgtgtacaagctggagcaggtgtctgagaagggcaaggcttacaccaactacttcggacggtgcaatgtggccgagcacgaaaagctgatcctgctggcccagctgaagcccgagaaggatagcgacgaagccgtgacatatagcctgggaaagtttgggcagagggccctggatttctacagcattcatgtgaccaaggagtccacccaccccgtgaagcccctggcccagatcgccggaaacagatacgcctccggacctgtgggaaaggccctgagcgacgcatgtatgggcacaatcgcctccttcctgtctaagtaccaggacatcatcatcgaacaccagaaggtggtgaagggcaaccagaagagactggagagcctgcgggagctggccggcaaggaaaacctggaataccctagcgtgaccctgccacctcagcctcacaccaaggagggcgttgatgcctacaacgaagtgatcgcccgggtgcgaatgtgggtgaacctgaacctgtggcagaagctgaagctaagcagagatgatgccaagcctctgctgagactgaagggattcccttcctttcctctggtcgagagacaggccaacgaagtggactggtgggacatggtgtgtaacgtgaagaagctgatcaacgagaaaaaggaggatggcaaggtgttttggcagaatctggctggctacaagagacaggaagccctgagaccatacctgagcagcgaggaagatcggaagaagggaaagaaattcgctcggtaccagctgggcgacctgctgctgcacctggaaaagaagcacggcgaggactggggaaaggtgtacgacgaggcctgggagcggattgacaagaaagtggaaggcctgagcaagcacatcaagctggaagaggaacggagaagcgaggacgcccagagcaaggccgccctgaccgactggctgcgggctaaggccagcttcgtgatcgagggcctgaaggaggccgacaaggacgagttctgcagatgcgagctgaagctgcagaagtggtacggggacctgcggggaaagcccttcgccatcgaagccgagaacagcatcctggacatcagcggcttcagcaagcagtacaactgtgccttcatctggcagaaggacggcgtgaagaagctgaacctgtacctgatcatcaactacttcaagggcggcaagctgcggttcaagaagatcaaacctgaagccttcgaagccaacagattctacaccgtgatcaacaaaaagagcggcgagatcgtgcccatggaggtgaacttcaacttcgacgaccccaacctgatcatcctgcctctggcctttggcaagagacagggcagagaattcatctggaacgacctgctgtccctggaaaccggcagcctgaagctggccaacggaagagtgatcgagaagacactgtacaacagaagaacccggcaggatgagcctgccctgttcgtggccctgaccttcgagcggcgggaggtcctggactcctccaatatcaaaccaatgaacctgatcggcgtggcaagaggcgaaaacatccccgccgtgatcgccctgaccgaccccgagggctgcccactgagccggtttaaggatagcctgggaaacccaacccacatcctgagaatcggcgagagctataaggagaagcagcggaccatccaggccaagaaggaggtggagcagcggagagccggcggctacagccggaagtacgccagcaaagccaagaatctggcagacgatatggtgagaaacaccgctagagatctgctgtactacgccgtgacccaggatgccatgctgatcttcgccaacctgagccggggcttcggccggcagggcaagcggaccttcatggccgagagacagtacacacggatggaggactggctgaccgccaagctggcctacgagggcctgagcaagacctacctgtccaagacactggcccagtacacctccaagacatgcagcaactgtgggtttaccatcaccagcgccgactacgacagggtgctggagaagctgaagaagacagcaacaggctggatgaccacaattaacggcaaggagctgaaggtggagggccagattacctactacaacagatacaagagacagaacgtagtcaaggacctgtccgtcgagctggatagactgagcgaagaatctgtgaacaacgacatctcctcctggacaaagggcagaagcggagaagctctgagcctcctgaagaaaagattctcccatagacccgtgcaggagaagttcgtgtgcctgaactgcggcttcgagacacacgcagccgagcaagccgccctgaacatcgccagatcctggctgttcctgcggagccaggagtacaagaaataccagacaaacaagacaaccggcaacaccgataagagagccttcgtcgagacctggcagtccttttaccggaagaagcttaaggaggtgtggaaacctgccgtgcggtctggcggatctggcggaggctcctatgagccaggtgaccttcagcgacgtggccatcgacttcagccacgaggagtgggcctgcctggacagcgcccagagggacctgtacaaggacgtgatggtgcagaactacgagaacctggtgagcgtgggcctgagcatcaccaagccctacgtgatcatgctgctggaggacggcaaggagccctggatgatggagaagaagctgagcaaggtgtaccccttccccctgagccacagcgtgggatctggctccggcagcggccccaagaaaaagagaaaagtctaagctgccttctgcggggcttgccttctggccatgcccttcttctctcccttgcacctgtacctcttggtctttgaataaagcctgagtaggaaggctagcaaaaaaaaaaaaaaaaaaaaaaaaaaaaaaaaaaaaaaaaaaaaaaaaaaaaaaaaaaaaaaaaaaaaaaaaaaaaaaaa

SEQ ID NO: 16890 - RNA, 9485 nt, synthetic construct
  source 1..9485: mol_type = other RNA
aggaaataagagagaaaagaagagtaagaagaaatataagagccaccatggcccctaagaagaagcgtaaagtgagccggatggaacgcctcgtctacgaggtgcggcagaagtgcagaaacatcgaggacatctgcatctcctgcggatctctgaacgtgaccctggagcacccactgttcatcggcggcatgtgccagaactgtaaaaactgttttctggagtgtgcctatcaatacgacgatgacggctaccagagctactgcaccatctgttgcggcggaagagaggtgctgatgtgtggaaataacaactgctgccggtgcttctgcgtggaatgcgtggacctgctggtgggccccggcgccgcccaggccgctattaaggaagatccttggaactgctacatgtgcggccacaagggcacatacggcctgctgagacggagagaggactggcctagcagactgcagatgttcttcgccaataaccacgaccaggagttcgacccccctaaggtgtaccctcccgtccccgccgagaagagaaagcccatccgggtcctgagcctgttcgatggcatcgccaccggtctgctggtgctgaaggacctgggcatccaggtggataggtacattgcctccgaggtgtgcgaggactccatcaccgtgggaatggtgcgtcatcagggcaagatcatgtacgtgggcgacgtgcggagcgtgacacagaagcatatccaggagtggggccctttcgacctggtgatcggcggcagcccttgcaatgacctgagcatcgtgaacccagcccggaagggcctgtacgagggaaccggcagactgttcttcgagttttacagactgctgcacgacgcccggcctaaggaaggcgacgaccggcccttcttttggctgttcgagaatgtggtggccatgggagtcagcgacaagcgggatattagccggttcctggagagcaaccccgtgatgatcgatgccaaggaagtgagcgccgcccaccgggccagatacttctggggcaatctgcctggcatgaacagacccctggccagcaccgtgaacgacaagctggagctgcaggagtgcctggagcacggccggatcgccaagttcagcaaggtgagaaccatcaccacccgaagcaacagcatcaaacaaggcaaggaccagcactttcctgtgttcatgaacgagaaggaggacatcctgtggtgtaccgagatggagagagtgttcgggttcccagtccactacacagatgtcagcaacatgtctagactggccagacagagactgctgggaagaagctggtccgtccctgtgatcagacacctgttcgcccctctgaaggagtacttcgcctgcgtgagcagcggcaacagcaacgccaacagccggggccccagcttctctagcggcctggtgccactgtccctgagagggagccacatgggccccatggagatctacaaaaccgtgagcgcctggaagcggcagcctgtgcgcgtgctgagcctgtttcggaatatcgataaagtcctgaaaagcctgggattcctggagagcggctctggctccggcggtggcaccctgaagtacgtggaggatgtgacaaacgtggtcagacgggatgtggagaagtggggccccttcgatctggtgtacggcagcacccaacccctgggcagctcttgtgaccggtgccctggctggtacatgtttcagttccaccggatcctgcagtacgccctgccgagacaggagtcccagcggccattcttttggattttcatggacaacttgctgctgaccgaggatgaccaggaaactaccactcggttcctgcagaccgaagccgtgaccctgcaggacgtgagaggccgggactaccagaacgccatgcgggtgtggtccaacatccctggactgaaaagcaagcacgcacctctgacccctaaagaagaggagtacctgcaggcccaggtgcggagcagaagcaagctggacgcccctaaggtggatctgctggtgaagaattgcctcctgcccctgagagagtacttcaagtatttcagccagaatagtctgcccctgggaggcagcggcggcggcgccctggtgacatttgaggacgtcgccgtgcggttcacccaggaggaatgggctctgctggatccttctcagaaaatcctgtaccgggacgtgatgagagagacataccggaatctgacctccgtgggcatcaactgggaatgttgggaccttgaagcctgcttcagaagcctgggaagaaacctgagagtgcaggtggtgaagagaaagtgcgagctgaccaacagcggcccctgcgccgagggcggcccaagcagcggcgcccctcctcccagcggcggcagcccagccggctccccaacctctaccgaggagggcacctctgagtccgccacccccgagagcggccctggcacctccaccgagcccagcgagggcagcgcacccggcagccctgccggcagccccacctccacagaggagggaaccagcaccgagcccagcgaaggcagcgccccaggcaccagcaccgagcctagtgagcaggagattaaacggatcaacaagatcagaagaagacttgtgaaagacagcaacaccaagaaggccggcaagacaggccccatgaaaaccctgctggttagagtgatgacacccgatctgagagagcggctggaaaacctgagaaagaagcctgaaaatatcccccagcccatcagcaatacatctagagccaacctgaataagctgctgaccgattacaccgaaatgaagaaggcgatcctgcatgtgtactgggaagagttccagaaggaccctgtgggcctgatgagccgggtggcccagcctgccagcaagaagatcgatcagaacaagctgaaacctgagatggacgagaagggcaacctgaccaccgccggctttgcctgctctcagtgtggccagcccctgttcgtgtacaagctggagcaggtgtctgagaagggcaaggcttacaccaactacttcggacggtgcaatgtggccgagcacgaaaagctgatcctgctggcccagctgaagcccgagaaggatagcgacgaagccgtgacatatagcctgggaaagtttgggcagagggccctggatttctacagcattcatgtgaccaaggagtccacccaccccgtgaagcccctggcccagatcgccggaaacagatacgcctccggacctgtgggaaaggccctgagcgacgcatgtatgggcacaatcgcctccttcctgtctaagtaccaggacatcatcatcgaacaccagaaggtggtgaagggcaaccagaagagactggagagcctgcgggagctggccggcaaggaaaacctggaataccctagcgtgaccctgccacctcagcctcacaccaaggagggcgttgatgcctacaacgaagtgatcgcccgggtgcgaatgtgggtgaacctgaacctgtggcagaagctgaagctaagcagagatgatgccaagcctctgctgagactgaagggattcccttcctttcctctggtcgagagacaggccaacgaagtggactggtgggacatggtgtgtaacgtgaagaagctgatcaacgagaaaaaggaggatggcaaggtgttttggcagaatctggctggctacaagagacaggaagccctgagaccatacctgagcagcgaggaagatcggaagaagggaaagaaattcgctcggtaccagctgggcgacctgctgctgcacctggaaaagaagcacggcgaggactggggaaaggtgtacgacgaggcctgggagcggattgacaagaaagtggaaggcctgagcaagcacatcaagctggaagaggaacggagaagcgaggacgcccagagcaaggccgccctgaccgactggctgcgggctaaggccagcttcgtgatcgagggcctgaaggaggccgacaaggacgagttctgcagatgcgagctgaagctgcagaagtggtacggggacctgcggggaaagcccttcgccatcgaagccgagaacagcatcctggacatcagcggcttcagcaagcagtacaactgtgccttcatctggcagaaggacggcgtgaagaagctgaacctgtacctgatcatcaactacttcaagggcggcaagctgcggttcaagaagatcaaacctgaagccttcgaagccaacagattctacaccgtgatcaacaaaaagagcggcgagatcgtgcccatggaggtgaacttcaacttcgacgaccccaacctgatcatcctgcctctggcctttggcaagagacagggcagagaattcatctggaacgacctgctgtccctggaaaccggcagcctgaagctggccaacggaagagtgatcgagaagacactgtacaacagaagaacccggcaggatgagcctgccctgttcgtggccctgaccttcgagcggcgggaggtcctggactcctccaatatcaaaccaatgaacctgatcggcgtggcaagaggcgaaaacatccccgccgtgatcgccctgaccgaccccgagggctgcccactgagccggtttaaggatagcctgggaaacccaacccacatcctgagaatcggcgagagctataaggagaagcagcggaccatccaggccaagaaggaggtggagcagcggagagccggcggctacagccggaagtacgccagcaaagccaagaatctggcagacgatatggtgagaaacaccgctagagatctgctgtactacgccgtgacccaggatgccatgctgatcttcgccaacctgagccggggcttcggccggcagggcaagcggaccttcatggccgagagacagtacacacggatggaggactggctgaccgccaagctggcctacgagggcctgagcaagacctacctgtccaagacactggcccagtacacctccaagacatgcagcaactgtgggtttaccatcaccagcgccgactacgacagggtgctggagaagctgaagaagacagcaacaggctggatgaccacaattaacggcaaggagctgaaggtggagggccagattacctactacaacagatacaagagacagaacgtagtcaaggacctgtccgtcgagctggatagactgagcgaagaatctgtgaacaacgacatctcctcctggacaaagggcagaagcggagaagctctgagcctcctgaagaaaagattctcccatagacccgtgcaggagaagttcgtgtgcctgaactgcggcttcgagacacacgcagccgagcaagccgccctgaacatcgccagatcctggctgttcctgcggagccaggagtacaagaaataccagacaaacaagacaaccggcaacaccgataagagagccttcgtcgagacctggcagtccttttaccggaagaagcttaaggaggtgtggaaacctgccgtgcggtctggcggatctggcggaggctccacccagatgcaggtgaagttcgacgacatcgccgtgagcttcagccaggaggagtggaagtacctggacgaggagcagaaggagctgtacagggaggtgatgaaggagaactaccagatcctgatcagcctgggcaccggcagcagcaccacccccaagatcatcagccacatcgagaggggcgaggagccctacatcagggacgagcccgtgctggtggagaggaagaccggcaagagcagcggcggcccaagcagcggcgcccctcctcccagcggcggcagcccagccggctccccaacctctaccgaggagggcacctctgagtccgccacccccgagagcggccctggcacctccaccgagcccagcgagggcagcgcacccggcagccctgccggcagccccacctccacagaggagggaaccagcaccgagcccagcgaaggcagcgccccaggcaccagcaccgagcctagtgagcaggagattaaacggatcaacaagatcagaagaagacttgtgaaagacagcaacaccaagaaggccggcaagacaggccccatgaaaaccctgctggttagagtgatgacacccgatctgagagagcggctggaaaacctgagaaagaagcctgaaaatatcccccagcccatcagcaatacatctagagccaacctgaataagctgctgaccgattacaccgaaatgaagaaggcgatcctgcatgtgtactgggaagagttccagaaggaccctgtgggcctgatgagccgggtggcccagcctgccagcaagaagatcgatcagaacaagctgaaacctgagatggacgagaagggcaacctgaccaccgccggctttgcctgctctcagtgtggccagcccctgttcgtgtacaagctggagcaggtgtctgagaagggcaaggcttacaccaactacttcggacggtgcaatgtggccgagcacgaaaagctgatcctgctggcccagctgaagcccgagaaggatagcgacgaagccgtgacatatagcctgggaaagtttgggcagagggccctggatttctacagcattcatgtgaccaaggagtccacccaccccgtgaagcccctggcccagatcgccggaaacagatacgcctccggacctgtgggaaaggccctgagcgacgcatgtatgggcacaatcgcctccttcctgtctaagtaccaggacatcatcatcgaacaccagaaggtggtgaagggcaaccagaagagactggagagcctgcgggagctggccggcaaggaaaacctggaataccctagcgtgaccctgccacctcagcctcacaccaaggagggcgttgatgcctacaacgaagtgatcgcccgggtgcgaatgtgggtgaacctgaacctgtggcagaagctgaagctaagcagagatgatgccaagcctctgctgagactgaagggattcccttcctttcctctggtcgagagacaggccaacgaagtggactggtgggacatggtgtgtaacgtgaagaagctgatcaacgagaaaaaggaggatggcaaggtgttttggcagaatctggctggctacaagagacaggaagccctgagaccatacctgagcagcgaggaagatcggaagaagggaaagaaattcgctcggtaccagctgggcgacctgctgctgcacctggaaaagaagcacggcgaggactggggaaaggtgtacgacgaggcctgggagcggattgacaagaaagtggaaggcctgagcaagcacatcaagctggaagaggaacggagaagcgaggacgcccagagcaaggccgccctgaccgactggctgcgggctaaggccagcttcgtgatcgagggcctgaaggaggccgacaaggacgagttctgcagatgcgagctgaagctgcagaagtggtacggggacctgcggggaaagcccttcgccatcgaagccgagaacagcatcctggacatcagcggcttcagcaagcagtacaactgtgccttcatctggcagaaggacggcgtgaagaagctgaacctgtacctgatcatcaactacttcaagggcggcaagctgcggttcaagaagatcaaacctgaagccttcgaagccaacagattctacaccgtgatcaacaaaaagagcggcgagatcgtgcccatggaggtgaacttcaacttcgacgaccccaacctgatcatcctgcctctggcctttggcaagagacagggcagagaattcatctggaacgacctgctgtccctggaaaccggcagcctgaagctggccaacggaagagtgatcgagaagacactgtacaacagaagaacccggcaggatgagcctgccctgttcgtggccctgaccttcgagcggcgggaggtcctggactcctccaatatcaaaccaatgaacctgatcggcgtggcaagaggcgaaaacatccccgccgtgatcgccctgaccgaccccgagggctgcccactgagccggtttaaggatagcctgggaaacccaacccacatcctgagaatcggcgagagctataaggagaagcagcggaccatccaggccaagaaggaggtggagcagcggagagccggcggctacagccggaagtacgccagcaaagccaagaatctggcagacgatatggtgagaaacaccgctagagatctgctgtactacgccgtgacccaggatgccatgctgatcttcgccaacctgagccggggcttcggccggcagggcaagcggaccttcatggccgagagacagtacacacggatggaggactggctgaccgccaagctggcctacgagggcctgagcaagacctacctgtccaagacactggcccagtacacctccaagacatgcagcaactgtgggtttaccatcaccagcgccgactacgacagggtgctggagaagctgaagaagacagcaacaggctggatgaccacaattaacggcaaggagctgaaggtggagggccagattacctactacaacagatacaagagacagaacgtagtcaaggacctgtccgtcgagctggatagactgagcgaagaatctgtgaacaacgacatctcctcctggacaaagggcagaagcggagaagctctgagcctcctgaagaaaagattctcccatagacccgtgcaggagaagttcgtgtgcctgaactgcggcttcgagacacacgcagccgagcaagccgccctgaacatcgccagatcctggctgttcctgcggagccaggagtacaagaaataccagacaaacaagacaaccggcaacaccgataagagagccttcgtcgagacctggcagtccttttaccggaagaagcttaaggaggtgtggaaacctgccgtgcggtctggcggatctggcggaggctcctacccagatgcaggtgaagttcgacgacatcgccgtgagcttcagccaggaggagtggaagtacctggacgaggagcagaaggagctgtacagggaggtgatgaaggagaactaccagatcctgatcagcctgggcaccggcagcagcaccacccccaagatcatcagccacatcgagaggggcgaggagccctacatcagggacgagcccgtgctggtggagaggaagaccggcaagagcagcggatctggctccggcagcggccccaagaaaaagagaaaagtctaagctgccttctgcggggcttgccttctggccatgcccttcttctctcccttgcacctgtacctcttggtctttgaataaagcctgagtaggaaggctagcaaaaaaaaaaaaaaaaaaaaaaaaaaaaaaaaaaaaaaaaaaaaaaaaaaaaaaaaaaaaaaaaaaaaaaaaaaaaaaaa

SEQ ID NO: 16891 - RNA, 9485 nt, synthetic construct
  source 1..9485: mol_type = other RNA
aggaaataagagagaaaagaagagtaagaagaaatataagagccaccatggcccctaagaagaagcgtaaagtgagccggatggaacgcctcgtctacgaggtgcggcagaagtgcagaaacatcgaggacatctgcatctcctgcggatctctgaacgtgaccctggagcacccactgttcatcggcggcatgtgccagaactgtaaaaactgttttctggagtgtgcctatcaatacgacgatgacggctaccagagctactgcaccatctgttgcggcggaagagaggtgctgatgtgtggaaataacaactgctgccggtgcttctgcgtggaatgcgtggacctgctggtgggccccggcgccgcccaggccgctattaaggaagatccttggaactgctacatgtgcggccacaagggcacatacggcctgctgagacggagagaggactggcctagcagactgcagatgttcttcgccaataaccacgaccaggagttcgacccccctaaggtgtaccctcccgtccccgccgagaagagaaagcccatccgggtcctgagcctgttcgatggcatcgccaccggtctgctggtgctgaaggacctgggcatccaggtggataggtacattgcctccgaggtgtgcgaggactccatcaccgtgggaatggtgcgtcatcagggcaagatcatgtacgtgggcgacgtgcggagcgtgacacagaagcatatccaggagtggggccctttcgacctggtgatcggcggcagcccttgcaatgacctgagcatcgtgaacccagcccggaagggcctgtacgagggaaccggcagactgttcttcgagttttacagactgctgcacgacgcccggcctaaggaaggcgacgaccggcccttcttttggctgttcgagaatgtggtggccatgggagtcagcgacaagcgggatattagccggttcctggagagcaaccccgtgatgatcgatgccaaggaagtgagcgccgcccaccgggccagatacttctggggcaatctgcctggcatgaacagacccctggccagcaccgtgaacgacaagctggagctgcaggagtgcctggagcacggccggatcgccaagttcagcaaggtgagaaccatcaccacccgaagcaacagcatcaaacaaggcaaggaccagcactttcctgtgttcatgaacgagaaggaggacatcctgtggtgtaccgagatggagagagtgttcgggttcccagtccactacacagatgtcagcaacatgtctagactggccagacagagactgctgggaagaagctggtccgtccctgtgatcagacacctgttcgcccctctgaaggagtacttcgcctgcgtgagcagcggcaacagcaacgccaacagccggggccccagcttctctagcggcctggtgccactgtccctgagagggagccacatgggccccatggagatctacaaaaccgtgagcgcctggaagcggcagcctgtgcgcgtgctgagcctgtttcggaatatcgataaagtcctgaaaagcctgggattcctggagagcggctctggctccggcggtggcaccctgaagtacgtggaggatgtgacaaacgtggtcagacgggatgtggagaagtggggccccttcgatctggtgtacggcagcacccaacccctgggcagctcttgtgaccggtgccctggctggtacatgtttcagttccaccggatcctgcagtacgccctgccgagacaggagtcccagcggccattcttttggattttcatggacaacttgctgctgaccgaggatgaccaggaaactaccactcggttcctgcagaccgaagccgtgaccctgcaggacgtgagaggccgggactaccagaacgccatgcgggtgtggtccaacatccctggactgaaaagcaagcacgcacctctgacccctaaagaagaggagtacctgcaggcccaggtgcggagcagaagcaagctggacgcccctaaggtggatctgctggtgaagaattgcctcctgcccctgagagagtacttcaagtatttcagccagaatagtctgcccctgggaggcagcggcggcggcgccctggtgacatttgaggacgtcgccgtgcggttcacccaggaggaatgggctctgctggatccttctcagaaaatcctgtaccgggacgtgatgagagagacataccggaatctgacctccgtgggcatcaactgggaatgttgggaccttgaagcctgcttcagaagcctgggaagaaacctgagagtgcaggtggtgaagagaaagtgcgagctgaccaacagcggcccctgcgccgagggcggcccaagcagcggcgcccctcctcccagcggcggcagcccagccggctccccaacctctaccgaggagggcacctctgagtccgccacccccgagagcggccctggcacctccaccgagcccagcgagggcagcgcacccggcagccctgccggcagccccacctccacagaggagggaaccagcaccgagcccagcgaaggcagcgccccaggcaccagcaccgagcctagtgagcaggagattaaacggatcaacaagatcagaagaagacttgtgaaagacagcaacaccaagaaggccggcaagacaggccccatgaaaaccctgctggttagagtgatgacacccgatctgagagagcggctggaaaacctgagaaagaagcctgaaaatatcccccagcccatcagcaatacatctagagccaacctgaataagctgctgaccgattacaccgaaatgaagaaggcgatcctgcatgtgtactgggaagagttccagaaggaccctgtgggcctgatgagccgggtggcccagcctgccagcaagaagatcgatcagaacaagctgaaacctgagatggacgagaagggcaacctgaccaccgccggctttgcctgctctcagtgtggccagcccctgttcgtgtacaagctggagcaggtgtctgagaagggcaaggcttacaccaactacttcggacggtgcaatgtggccgagcacgaaaagctgatcctgctggcccagctgaagcccgagaaggatagcgacgaagccgtgacatatagcctgggaaagtttgggcagagggccctggatttctacagcattcatgtgaccaaggagtccacccaccccgtgaagcccctggcccagatcgccggaaacagatacgcctccggacctgtgggaaaggccctgagcgacgcatgtatgggcacaatcgcctccttcctgtctaagtaccaggacatcatcatcgaacaccagaaggtggtgaagggcaaccagaagagactggagagcctgcgggagctggccggcaaggaaaacctggaataccctagcgtgaccctgccacctcagcctcacaccaaggagggcgttgatgcctacaacgaagtgatcgcccgggtgcgaatgtgggtgaacctgaacctgtggcagaagctgaagctaagcagagatgatgccaagcctctgctgagactgaagggattcccttcctttcctctggtcgagagacaggccaacgaagtggactggtgggacatggtgtgtaacgtgaagaagctgatcaacgagaaaaaggaggatggcaaggtgttttggcagaatctggctggctacaagagacaggaagccctgagaccatacctgagcagcgaggaagatcggaagaagggaaagaaattcgctcggtaccagctgggcgacctgctgctgcacctggaaaagaagcacggcgaggactggggaaaggtgtacgacgaggcctgggagcggattgacaagaaagtggaaggcctgagcaagcacatcaagctggaagaggaacggagaagcgaggacgcccagagcaaggccgccctgaccgactggctgcgggctaaggccagcttcgtgatcgagggcctgaaggaggccgacaaggacgagttctgcagatgcgagctgaagctgcagaagtggtacggggacctgcggggaaagcccttcgccatcgaagccgagaacagcatcctggacatcagcggcttcagcaagcagtacaactgtgccttcatctggcagaaggacggcgtgaagaagctgaacctgtacctgatcatcaactacttcaagggcggcaagctgcggttcaagaagatcaaacctgaagccttcgaagccaacagattctacaccgtgatcaacaaaaagagcggcgagatcgtgcccatggaggtgaacttcaacttcgacgaccccaacctgatcatcctgcctctggcctttggcaagagacagggcagagaattcatctggaacgacctgctgtccctggaaaccggcagcctgaagctggccaacggaagagtgatcgagaagacactgtacaacagaagaacccggcaggatgagcctgccctgttcgtggccctgaccttcgagcggcgggaggtcctggactcctccaatatcaaaccaatgaacctgatcggcgtggcaagaggcgaaaacatccccgccgtgatcgccctgaccgaccccgagggctgcccactgagccggtttaaggatagcctgggaaacccaacccacatcctgagaatcggcgagagctataaggagaagcagcggaccatccaggccaagaaggaggtggagcagcggagagccggcggctacagccggaagtacgccagcaaagccaagaatctggcagacgatatggtgagaaacaccgctagagatctgctgtactacgccgtgacccaggatgccatgctgatcttcgccaacctgagccggggcttcggccggcagggcaagcggaccttcatggccgagagacagtacacacggatggaggactggctgaccgccaagctggcctacgagggcctgagcaagacctacctgtccaagacactggcccagtacacctccaagacatgcagcaactgtgggtttaccatcaccagcgccgactacgacagggtgctggagaagctgaagaagacagcaacaggctggatgaccacaattaacggcaaggagctgaaggtggagggccagattacctactacaacagatacaagagacagaacgtagtcaaggacctgtccgtcgagctggatagactgagcgaagaatctgtgaacaacgacatctcctcctggacaaagggcagaagcggagaagctctgagcctcctgaagaaaagattctcccatagacccgtgcaggagaagttcgtgtgcctgaactgcggcttcgagacacacgcagccgagcaagccgccctgaacatcgccagatcctggctgttcctgcggagccaggagtacaagaaataccagacaaacaagacaaccggcaacaccgataagagagccttcgtcgagacctggcagtccttttaccggaagaagcttaaggaggtgtggaaacctgccgtgcggtctggcggatctggcggaggctccatgaccctgctgaccttcagggacgtggccatcgagttcagcctggaggagtggaagtgcctggacctggcccagcagaacctgtacagggacgtgatgctggagaactacaggaacctgttcagcatcggcctgaccgtgagcaagcccggcctgatcacctgcctggagcagaggaaggagccctggaacgtgaagaggcaggaggccgtggacggccaccccggctggtgcagcggcgtgggcggcccaagcagcggcgcccctcctcccagcggcggcagcccagccggctccccaacctctaccgaggagggcacctctgagtccgccacccccgagagcggccctggcacctccaccgagcccagcgagggcagcgcacccggcagccctgccggcagccccacctccacagaggagggaaccagcaccgagcccagcgaaggcagcgccccaggcaccagcaccgagcctagtgagcaggagattaaacggatcaacaagatcagaagaagacttgtgaaagacagcaacaccaagaaggccggcaagacaggccccatgaaaaccctgctggttagagtgatgacacccgatctgagagagcggctggaaaacctgagaaagaagcctgaaaatatcccccagcccatcagcaatacatctagagccaacctgaataagctgctgaccgattacaccgaaatgaagaaggcgatcctgcatgtgtactgggaagagttccagaaggaccctgtgggcctgatgagccgggtggcccagcctgccagcaagaagatcgatcagaacaagctgaaacctgagatggacgagaagggcaacctgaccaccgccggctttgcctgctctcagtgtggccagcccctgttcgtgtacaagctggagcaggtgtctgagaagggcaaggcttacaccaactacttcggacggtgcaatgtggccgagcacgaaaagctgatcctgctggcccagctgaagcccgagaaggatagcgacgaagccgtgacatatagcctgggaaagtttgggcagagggccctggatttctacagcattcatgtgaccaaggagtccacccaccccgtgaagcccctggcccagatcgccggaaacagatacgcctccggacctgtgggaaaggccctgagcgacgcatgtatgggcacaatcgcctccttcctgtctaagtaccaggacatcatcatcgaacaccagaaggtggtgaagggcaaccagaagagactggagagcctgcgggagctggccggcaaggaaaacctggaataccctagcgtgaccctgccacctcagcctcacaccaaggagggcgttgatgcctacaacgaagtgatcgcccgggtgcgaatgtgggtgaacctgaacctgtggcagaagctgaagctaagcagagatgatgccaagcctctgctgagactgaagggattcccttcctttcctctggtcgagagacaggccaacgaagtggactggtgggacatggtgtgtaacgtgaagaagctgatcaacgagaaaaaggaggatggcaaggtgttttggcagaatctggctggctacaagagacaggaagccctgagaccatacctgagcagcgaggaagatcggaagaagggaaagaaattcgctcggtaccagctgggcgacctgctgctgcacctggaaaagaagcacggcgaggactggggaaaggtgtacgacgaggcctgggagcggattgacaagaaagtggaaggcctgagcaagcacatcaagctggaagaggaacggagaagcgaggacgcccagagcaaggccgccctgaccgactggctgcgggctaaggccagcttcgtgatcgagggcctgaaggaggccgacaaggacgagttctgcagatgcgagctgaagctgcagaagtggtacggggacctgcggggaaagcccttcgccatcgaagccgagaacagcatcctggacatcagcggcttcagcaagcagtacaactgtgccttcatctggcagaaggacggcgtgaagaagctgaacctgtacctgatcatcaactacttcaagggcggcaagctgcggttcaagaagatcaaacctgaagccttcgaagccaacagattctacaccgtgatcaacaaaaagagcggcgagatcgtgcccatggaggtgaacttcaacttcgacgaccccaacctgatcatcctgcctctggcctttggcaagagacagggcagagaattcatctggaacgacctgctgtccctggaaaccggcagcctgaagctggccaacggaagagtgatcgagaagacactgtacaacagaagaacccggcaggatgagcctgccctgttcgtggccctgaccttcgagcggcgggaggtcctggactcctccaatatcaaaccaatgaacctgatcggcgtggcaagaggcgaaaacatccccgccgtgatcgccctgaccgaccccgagggctgcccactgagccggtttaaggatagcctgggaaacccaacccacatcctgagaatcggcgagagctataaggagaagcagcggaccatccaggccaagaaggaggtggagcagcggagagccggcggctacagccggaagtacgccagcaaagccaagaatctggcagacgatatggtgagaaacaccgctagagatctgctgtactacgccgtgacccaggatgccatgctgatcttcgccaacctgagccggggcttcggccggcagggcaagcggaccttcatggccgagagacagtacacacggatggaggactggctgaccgccaagctggcctacgagggcctgagcaagacctacctgtccaagacactggcccagtacacctccaagacatgcagcaactgtgggtttaccatcaccagcgccgactacgacagggtgctggagaagctgaagaagacagcaacaggctggatgaccacaattaacggcaaggagctgaaggtggagggccagattacctactacaacagatacaagagacagaacgtagtcaaggacctgtccgtcgagctggatagactgagcgaagaatctgtgaacaacgacatctcctcctggacaaagggcagaagcggagaagctctgagcctcctgaagaaaagattctcccatagacccgtgcaggagaagttcgtgtgcctgaactgcggcttcgagacacacgcagccgagcaagccgccctgaacatcgccagatcctggctgttcctgcggagccaggagtacaagaaataccagacaaacaagacaaccggcaacaccgataagagagccttcgtcgagacctggcagtccttttaccggaagaagcttaaggaggtgtggaaacctgccgtgcggtctggcggatctggcggaggctcctatgaccctgctgaccttcagggacgtggccatcgagttcagcctggaggagtggaagtgcctggacctggcccagcagaacctgtacagggacgtgatgctggagaactacaggaacctgttcagcatcggcctgaccgtgagcaagcccggcctgatcacctgcctggagcagaggaaggagccctggaacgtgaagaggcaggaggccgtggacggccaccccggctggtgcagcggcgtgggatctggctccggcagcggccccaagaaaaagagaaaagtctaagctgccttctgcggggcttgccttctggccatgcccttcttctctcccttgcacctgtacctcttggtctttgaataaagcctgagtaggaaggctagcaaaaaaaaaaaaaaaaaaaaaaaaaaaaaaaaaaaaaaaaaaaaaaaaaaaaaaaaaaaaaaaaaaaaaaaaaaaaaaaa

SEQ ID NO: 16892 - RNA, 9545 nt, synthetic construct
  source 1..9545: mol_type = other RNA
aggaaataagagagaaaagaagagtaagaagaaatataagagccaccatggcccctaagaagaagcgtaaagtgagccggatggaacgcctcgtctacgaggtgcggcagaagtgcagaaacatcgaggacatctgcatctcctgcggatctctgaacgtgaccctggagcacccactgttcatcggcggcatgtgccagaactgtaaaaactgttttctggagtgtgcctatcaatacgacgatgacggctaccagagctactgcaccatctgttgcggcggaagagaggtgctgatgtgtggaaataacaactgctgccggtgcttctgcgtggaatgcgtggacctgctggtgggccccggcgccgcccaggccgctattaaggaagatccttggaactgctacatgtgcggccacaagggcacatacggcctgctgagacggagagaggactggcctagcagactgcagatgttcttcgccaataaccacgaccaggagttcgacccccctaaggtgtaccctcccgtccccgccgagaagagaaagcccatccgggtcctgagcctgttcgatggcatcgccaccggtctgctggtgctgaaggacctgggcatccaggtggataggtacattgcctccgaggtgtgcgaggactccatcaccgtgggaatggtgcgtcatcagggcaagatcatgtacgtgggcgacgtgcggagcgtgacacagaagcatatccaggagtggggccctttcgacctggtgatcggcggcagcccttgcaatgacctgagcatcgtgaacccagcccggaagggcctgtacgagggaaccggcagactgttcttcgagttttacagactgctgcacgacgcccggcctaaggaaggcgacgaccggcccttcttttggctgttcgagaatgtggtggccatgggagtcagcgacaagcgggatattagccggttcctggagagcaaccccgtgatgatcgatgccaaggaagtgagcgccgcccaccgggccagatacttctggggcaatctgcctggcatgaacagacccctggccagcaccgtgaacgacaagctggagctgcaggagtgcctggagcacggccggatcgccaagttcagcaaggtgagaaccatcaccacccgaagcaacagcatcaaacaaggcaaggaccagcactttcctgtgttcatgaacgagaaggaggacatcctgtggtgtaccgagatggagagagtgttcgggttcccagtccactacacagatgtcagcaacatgtctagactggccagacagagactgctgggaagaagctggtccgtccctgtgatcagacacctgttcgcccctctgaaggagtacttcgcctgcgtgagcagcggcaacagcaacgccaacagccggggccccagcttctctagcggcctggtgccactgtccctgagagggagccacatgggccccatggagatctacaaaaccgtgagcgcctggaagcggcagcctgtgcgcgtgctgagcctgtttcggaatatcgataaagtcctgaaaagcctgggattcctggagagcggctctggctccggcggtggcaccctgaagtacgtggaggatgtgacaaacgtggtcagacgggatgtggagaagtggggccccttcgatctggtgtacggcagcacccaacccctgggcagctcttgtgaccggtgccctggctggtacatgtttcagttccaccggatcctgcagtacgccctgccgagacaggagtcccagcggccattcttttggattttcatggacaacttgctgctgaccgaggatgaccaggaaactaccactcggttcctgcagaccgaagccgtgaccctgcaggacgtgagaggccgggactaccagaacgccatgcgggtgtggtccaacatccctggactgaaaagcaagcacgcacctctgacccctaaagaagaggagtacctgcaggcccaggtgcggagcagaagcaagctggacgcccctaaggtggatctgctggtgaagaattgcctcctgcccctgagagagtacttcaagtatttcagccagaatagtctgcccctgggaggcagcggcggcggcgccctggtgacatttgaggacgtcgccgtgcggttcacccaggaggaatgggctctgctggatccttctcagaaaatcctgtaccgggacgtgatgagagagacataccggaatctgacctccgtgggcatcaactgggaatgttgggaccttgaagcctgcttcagaagcctgggaagaaacctgagagtgcaggtggtgaagagaaagtgcgagctgaccaacagcggcccctgcgccgagggcggcccaagcagcggcgcccctcctcccagcggcggcagcccagccggctccccaacctctaccgaggagggcacctctgagtccgccacccccgagagcggccctggcacctccaccgagcccagcgagggcagcgcacccggcagccctgccggcagccccacctccacagaggagggaaccagcaccgagcccagcgaaggcagcgccccaggcaccagcaccgagcctagtgagcaggagattaaacggatcaacaagatcagaagaagacttgtgaaagacagcaacaccaagaaggccggcaagacaggccccatgaaaaccctgctggttagagtgatgacacccgatctgagagagcggctggaaaacctgagaaagaagcctgaaaatatcccccagcccatcagcaatacatctagagccaacctgaataagctgctgaccgattacaccgaaatgaagaaggcgatcctgcatgtgtactgggaagagttccagaaggaccctgtgggcctgatgagccgggtggcccagcctgccagcaagaagatcgatcagaacaagctgaaacctgagatggacgagaagggcaacctgaccaccgccggctttgcctgctctcagtgtggccagcccctgttcgtgtacaagctggagcaggtgtctgagaagggcaaggcttacaccaactacttcggacggtgcaatgtggccgagcacgaaaagctgatcctgctggcccagctgaagcccgagaaggatagcgacgaagccgtgacatatagcctgggaaagtttgggcagagggccctggatttctacagcattcatgtgaccaaggagtccacccaccccgtgaagcccctggcccagatcgccggaaacagatacgcctccggacctgtgggaaaggccctgagcgacgcatgtatgggcacaatcgcctccttcctgtctaagtaccaggacatcatcatcgaacaccagaaggtggtgaagggcaaccagaagagactggagagcctgcgggagctggccggcaaggaaaacctggaataccctagcgtgaccctgccacctcagcctcacaccaaggagggcgttgatgcctacaacgaagtgatcgcccgggtgcgaatgtgggtgaacctgaacctgtggcagaagctgaagctaagcagagatgatgccaagcctctgctgagactgaagggattcccttcctttcctctggtcgagagacaggccaacgaagtggactggtgggacatggtgtgtaacgtgaagaagctgatcaacgagaaaaaggaggatggcaaggtgttttggcagaatctggctggctacaagagacaggaagccctgagaccatacctgagcagcgaggaagatcggaagaagggaaagaaattcgctcggtaccagctgggcgacctgctgctgcacctggaaaagaagcacggcgaggactggggaaaggtgtacgacgaggcctgggagcggattgacaagaaagtggaaggcctgagcaagcacatcaagctggaagaggaacggagaagcgaggacgcccagagcaaggccgccctgaccgactggctgcgggctaaggccagcttcgtgatcgagggcctgaaggaggccgacaaggacgagttctgcagatgcgagctgaagctgcagaagtggtacggggacctgcggggaaagcccttcgccatcgaagccgagaacagcatcctggacatcagcggcttcagcaagcagtacaactgtgccttcatctggcagaaggacggcgtgaagaagctgaacctgtacctgatcatcaactacttcaagggcggcaagctgcggttcaagaagatcaaacctgaagccttcgaagccaacagattctacaccgtgatcaacaaaaagagcggcgagatcgtgcccatggaggtgaacttcaacttcgacgaccccaacctgatcatcctgcctctggcctttggcaagagacagggcagagaattcatctggaacgacctgctgtccctggaaaccggcagcctgaagctggccaacggaagagtgatcgagaagacactgtacaacagaagaacccggcaggatgagcctgccctgttcgtggccctgaccttcgagcggcgggaggtcctggactcctccaatatcaaaccaatgaacctgatcggcgtggcaagaggcgaaaacatccccgccgtgatcgccctgaccgaccccgagggctgcccactgagccggtttaaggatagcctgggaaacccaacccacatcctgagaatcggcgagagctataaggagaagcagcggaccatccaggccaagaaggaggtggagcagcggagagccggcggctacagccggaagtacgccagcaaagccaagaatctggcagacgatatggtgagaaacaccgctagagatctgctgtactacgccgtgacccaggatgccatgctgatcttcgccaacctgagccggggcttcggccggcagggcaagcggaccttcatggccgagagacagtacacacggatggaggactggctgaccgccaagctggcctacgagggcctgagcaagacctacctgtccaagacactggcccagtacacctccaagacatgcagcaactgtgggtttaccatcaccagcgccgactacgacagggtgctggagaagctgaagaagacagcaacaggctggatgaccacaattaacggcaaggagctgaaggtggagggccagattacctactacaacagatacaagagacagaacgtagtcaaggacctgtccgtcgagctggatagactgagcgaagaatctgtgaacaacgacatctcctcctggacaaagggcagaagcggagaagctctgagcctcctgaagaaaagattctcccatagacccgtgcaggagaagttcgtgtgcctgaactgcggcttcgagacacacgcagccgagcaagccgccctgaacatcgccagatcctggctgttcctgcggagccaggagtacaagaaataccagacaaacaagacaaccggcaacaccgataagagagccttcgtcgagacctggcagtccttttaccggaagaagcttaaggaggtgtggaaacctgccgtgcggtctggcggatctggcggaggctccgtgaccttcgaggacgtggccgtgaacttcaccccccaggagtgggccctgctggaccccagccagaagaacctgtacagggacgtgatgcaggagaccctgaggaacctggccagcgtgggcaagaagtggaaggaccagaacatggaggacgagtgcaagacccccaggaggaacctgaggagcgtggtgggcgagaggctgttcaccagcaaggagggcagccagtgcggcgagaccctgaacctggacagccaccacatgctgaagaagggcggcccaagcagcggcgcccctcctcccagcggcggcagcccagccggctccccaacctctaccgaggagggcacctctgagtccgccacccccgagagcggccctggcacctccaccgagcccagcgagggcagcgcacccggcagccctgccggcagccccacctccacagaggagggaaccagcaccgagcccagcgaaggcagcgccccaggcaccagcaccgagcctagtgagcaggagattaaacggatcaacaagatcagaagaagacttgtgaaagacagcaacaccaagaaggccggcaagacaggccccatgaaaaccctgctggttagagtgatgacacccgatctgagagagcggctggaaaacctgagaaagaagcctgaaaatatcccccagcccatcagcaatacatctagagccaacctgaataagctgctgaccgattacaccgaaatgaagaaggcgatcctgcatgtgtactgggaagagttccagaaggaccctgtgggcctgatgagccgggtggcccagcctgccagcaagaagatcgatcagaacaagctgaaacctgagatggacgagaagggcaacctgaccaccgccggctttgcctgctctcagtgtggccagcccctgttcgtgtacaagctggagcaggtgtctgagaagggcaaggcttacaccaactacttcggacggtgcaatgtggccgagcacgaaaagctgatcctgctggcccagctgaagcccgagaaggatagcgacgaagccgtgacatatagcctgggaaagtttgggcagagggccctggatttctacagcattcatgtgaccaaggagtccacccaccccgtgaagcccctggcccagatcgccggaaacagatacgcctccggacctgtgggaaaggccctgagcgacgcatgtatgggcacaatcgcctccttcctgtctaagtaccaggacatcatcatcgaacaccagaaggtggtgaagggcaaccagaagagactggagagcctgcgggagctggccggcaaggaaaacctggaataccctagcgtgaccctgccacctcagcctcacaccaaggagggcgttgatgcctacaacgaagtgatcgcccgggtgcgaatgtgggtgaacctgaacctgtggcagaagctgaagctaagcagagatgatgccaagcctctgctgagactgaagggattcccttcctttcctctggtcgagagacaggccaacgaagtggactggtgggacatggtgtgtaacgtgaagaagctgatcaacgagaaaaaggaggatggcaaggtgttttggcagaatctggctggctacaagagacaggaagccctgagaccatacctgagcagcgaggaagatcggaagaagggaaagaaattcgctcggtaccagctgggcgacctgctgctgcacctggaaaagaagcacggcgaggactggggaaaggtgtacgacgaggcctgggagcggattgacaagaaagtggaaggcctgagcaagcacatcaagctggaagaggaacggagaagcgaggacgcccagagcaaggccgccctgaccgactggctgcgggctaaggccagcttcgtgatcgagggcctgaaggaggccgacaaggacgagttctgcagatgcgagctgaagctgcagaagtggtacggggacctgcggggaaagcccttcgccatcgaagccgagaacagcatcctggacatcagcggcttcagcaagcagtacaactgtgccttcatctggcagaaggacggcgtgaagaagctgaacctgtacctgatcatcaactacttcaagggcggcaagctgcggttcaagaagatcaaacctgaagccttcgaagccaacagattctacaccgtgatcaacaaaaagagcggcgagatcgtgcccatggaggtgaacttcaacttcgacgaccccaacctgatcatcctgcctctggcctttggcaagagacagggcagagaattcatctggaacgacctgctgtccctggaaaccggcagcctgaagctggccaacggaagagtgatcgagaagacactgtacaacagaagaacccggcaggatgagcctgccctgttcgtggccctgaccttcgagcggcgggaggtcctggactcctccaatatcaaaccaatgaacctgatcggcgtggcaagaggcgaaaacatccccgccgtgatcgccctgaccgaccccgagggctgcccactgagccggtttaaggatagcctgggaaacccaacccacatcctgagaatcggcgagagctataaggagaagcagcggaccatccaggccaagaaggaggtggagcagcggagagccggcggctacagccggaagtacgccagcaaagccaagaatctggcagacgatatggtgagaaacaccgctagagatctgctgtactacgccgtgacccaggatgccatgctgatcttcgccaacctgagccggggcttcggccggcagggcaagcggaccttcatggccgagagacagtacacacggatggaggactggctgaccgccaagctggcctacgagggcctgagcaagacctacctgtccaagacactggcccagtacacctccaagacatgcagcaactgtgggtttaccatcaccagcgccgactacgacagggtgctggagaagctgaagaagacagcaacaggctggatgaccacaattaacggcaaggagctgaaggtggagggccagattacctactacaacagatacaagagacagaacgtagtcaaggacctgtccgtcgagctggatagactgagcgaagaatctgtgaacaacgacatctcctcctggacaaagggcagaagcggagaagctctgagcctcctgaagaaaagattctcccatagacccgtgcaggagaagttcgtgtgcctgaactgcggcttcgagacacacgcagccgagcaagccgccctgaacatcgccagatcctggctgttcctgcggagccaggagtacaagaaataccagacaaacaagacaaccggcaacaccgataagagagccttcgtcgagacctggcagtccttttaccggaagaagcttaaggaggtgtggaaacctgccgtgcggtctggcggatctggcggaggctcctgtgaccttcgaggacgtggccgtgaacttcaccccccaggagtgggccctgctggaccccagccagaagaacctgtacagggacgtgatgcaggagaccctgaggaacctggccagcgtgggcaagaagtggaaggaccagaacatggaggacgagtgcaagacccccaggaggaacctgaggagcgtggtgggcgagaggctgttcaccagcaaggagggcagccagtgcggcgagaccctgaacctggacagccaccacatgctgaagaagggatctggctccggcagcggccccaagaaaaagagaaaagtctaagctgccttctgcggggcttgccttctggccatgcccttcttctctcccttgcacctgtacctcttggtctttgaataaagcctgagtaggaaggctagcaaaaaaaaaaaaaaaaaaaaaaaaaaaaaaaaaaaaaaaaaaaaaaaaaaaaaaaaaaaaaaaaaaaaaaaaaaaaaaaa

SEQ ID NO: 16893 - RNA, 9581 nt, synthetic construct
  source 1..9581: mol_type = other RNA
aggaaataagagagaaaagaagagtaagaagaaatataagagccaccatggcccctaagaagaagcgtaaagtgagccggatggaacgcctcgtctacgaggtgcggcagaagtgcagaaacatcgaggacatctgcatctcctgcggatctctgaacgtgaccctggagcacccactgttcatcggcggcatgtgccagaactgtaaaaactgttttctggagtgtgcctatcaatacgacgatgacggctaccagagctactgcaccatctgttgcggcggaagagaggtgctgatgtgtggaaataacaactgctgccggtgcttctgcgtggaatgcgtggacctgctggtgggccccggcgccgcccaggccgctattaaggaagatccttggaactgctacatgtgcggccacaagggcacatacggcctgctgagacggagagaggactggcctagcagactgcagatgttcttcgccaataaccacgaccaggagttcgacccccctaaggtgtaccctcccgtccccgccgagaagagaaagcccatccgggtcctgagcctgttcgatggcatcgccaccggtctgctggtgctgaaggacctgggcatccaggtggataggtacattgcctccgaggtgtgcgaggactccatcaccgtgggaatggtgcgtcatcagggcaagatcatgtacgtgggcgacgtgcggagcgtgacacagaagcatatccaggagtggggccctttcgacctggtgatcggcggcagcccttgcaatgacctgagcatcgtgaacccagcccggaagggcctgtacgagggaaccggcagactgttcttcgagttttacagactgctgcacgacgcccggcctaaggaaggcgacgaccggcccttcttttggctgttcgagaatgtggtggccatgggagtcagcgacaagcgggatattagccggttcctggagagcaaccccgtgatgatcgatgccaaggaagtgagcgccgcccaccgggccagatacttctggggcaatctgcctggcatgaacagacccctggccagcaccgtgaacgacaagctggagctgcaggagtgcctggagcacggccggatcgccaagttcagcaaggtgagaaccatcaccacccgaagcaacagcatcaaacaaggcaaggaccagcactttcctgtgttcatgaacgagaaggaggacatcctgtggtgtaccgagatggagagagtgttcgggttcccagtccactacacagatgtcagcaacatgtctagactggccagacagagactgctgggaagaagctggtccgtccctgtgatcagacacctgttcgcccctctgaaggagtacttcgcctgcgtgagcagcggcaacagcaacgccaacagccggggccccagcttctctagcggcctggtgccactgtccctgagagggagccacatgggccccatggagatctacaaaaccgtgagcgcctggaagcggcagcctgtgcgcgtgctgagcctgtttcggaatatcgataaagtcctgaaaagcctgggattcctggagagcggctctggctccggcggtggcaccctgaagtacgtggaggatgtgacaaacgtggtcagacgggatgtggagaagtggggccccttcgatctggtgtacggcagcacccaacccctgggcagctcttgtgaccggtgccctggctggtacatgtttcagttccaccggatcctgcagtacgccctgccgagacaggagtcccagcggccattcttttggattttcatggacaacttgctgctgaccgaggatgaccaggaaactaccactcggttcctgcagaccgaagccgtgaccctgcaggacgtgagaggccgggactaccagaacgccatgcgggtgtggtccaacatccctggactgaaaagcaagcacgcacctctgacccctaaagaagaggagtacctgcaggcccaggtgcggagcagaagcaagctggacgcccctaaggtggatctgctggtgaagaattgcctcctgcccctgagagagtacttcaagtatttcagccagaatagtctgcccctgggaggcagcggcggcggcgccctggtgacatttgaggacgtcgccgtgcggttcacccaggaggaatgggctctgctggatccttctcagaaaatcctgtaccgggacgtgatgagagagacataccggaatctgacctccgtgggcatcaactgggaatgttgggaccttgaagcctgcttcagaagcctgggaagaaacctgagagtgcaggtggtgaagagaaagtgcgagctgaccaacagcggcccctgcgccgagggcggcccaagcagcggcgcccctcctcccagcggcggcagcccagccggctccccaacctctaccgaggagggcacctctgagtccgccacccccgagagcggccctggcacctccaccgagcccagcgagggcagcgcacccggcagccctgccggcagccccacctccacagaggagggaaccagcaccgagcccagcgaaggcagcgccccaggcaccagcaccgagcctagtgagcaggagattaaacggatcaacaagatcagaagaagacttgtgaaagacagcaacaccaagaaggccggcaagacaggccccatgaaaaccctgctggttagagtgatgacacccgatctgagagagcggctggaaaacctgagaaagaagcctgaaaatatcccccagcccatcagcaatacatctagagccaacctgaataagctgctgaccgattacaccgaaatgaagaaggcgatcctgcatgtgtactgggaagagttccagaaggaccctgtgggcctgatgagccgggtggcccagcctgccagcaagaagatcgatcagaacaagctgaaacctgagatggacgagaagggcaacctgaccaccgccggctttgcctgctctcagtgtggccagcccctgttcgtgtacaagctggagcaggtgtctgagaagggcaaggcttacaccaactacttcggacggtgcaatgtggccgagcacgaaaagctgatcctgctggcccagctgaagcccgagaaggatagcgacgaagccgtgacatatagcctgggaaagtttgggcagagggccctggatttctacagcattcatgtgaccaaggagtccacccaccccgtgaagcccctggcccagatcgccggaaacagatacgcctccggacctgtgggaaaggccctgagcgacgcatgtatgggcacaatcgcctccttcctgtctaagtaccaggacatcatcatcgaacaccagaaggtggtgaagggcaaccagaagagactggagagcctgcgggagctggccggcaaggaaaacctggaataccctagcgtgaccctgccacctcagcctcacaccaaggagggcgttgatgcctacaacgaagtgatcgcccgggtgcgaatgtgggtgaacctgaacctgtggcagaagctgaagctaagcagagatgatgccaagcctctgctgagactgaagggattcccttcctttcctctggtcgagagacaggccaacgaagtggactggtgggacatggtgtgtaacgtgaagaagctgatcaacgagaaaaaggaggatggcaaggtgttttggcagaatctggctggctacaagagacaggaagccctgagaccatacctgagcagcgaggaagatcggaagaagggaaagaaattcgctcggtaccagctgggcgacctgctgctgcacctggaaaagaagcacggcgaggactggggaaaggtgtacgacgaggcctgggagcggattgacaagaaagtggaaggcctgagcaagcacatcaagctggaagaggaacggagaagcgaggacgcccagagcaaggccgccctgaccgactggctgcgggctaaggccagcttcgtgatcgagggcctgaaggaggccgacaaggacgagttctgcagatgcgagctgaagctgcagaagtggtacggggacctgcggggaaagcccttcgccatcgaagccgagaacagcatcctggacatcagcggcttcagcaagcagtacaactgtgccttcatctggcagaaggacggcgtgaagaagctgaacctgtacctgatcatcaactacttcaagggcggcaagctgcggttcaagaagatcaaacctgaagccttcgaagccaacagattctacaccgtgatcaacaaaaagagcggcgagatcgtgcccatggaggtgaacttcaacttcgacgaccccaacctgatcatcctgcctctggcctttggcaagagacagggcagagaattcatctggaacgacctgctgtccctggaaaccggcagcctgaagctggccaacggaagagtgatcgagaagacactgtacaacagaagaacccggcaggatgagcctgccctgttcgtggccctgaccttcgagcggcgggaggtcctggactcctccaatatcaaaccaatgaacctgatcggcgtggcaagaggcgaaaacatccccgccgtgatcgccctgaccgaccccgagggctgcccactgagccggtttaaggatagcctgggaaacccaacccacatcctgagaatcggcgagagctataaggagaagcagcggaccatccaggccaagaaggaggtggagcagcggagagccggcggctacagccggaagtacgccagcaaagccaagaatctggcagacgatatggtgagaaacaccgctagagatctgctgtactacgccgtgacccaggatgccatgctgatcttcgccaacctgagccggggcttcggccggcagggcaagcggaccttcatggccgagagacagtacacacggatggaggactggctgaccgccaagctggcctacgagggcctgagcaagacctacctgtccaagacactggcccagtacacctccaagacatgcagcaactgtgggtttaccatcaccagcgccgactacgacagggtgctggagaagctgaagaagacagcaacaggctggatgaccacaattaacggcaaggagctgaaggtggagggccagattacctactacaacagatacaagagacagaacgtagtcaaggacctgtccgtcgagctggatagactgagcgaagaatctgtgaacaacgacatctcctcctggacaaagggcagaagcggagaagctctgagcctcctgaagaaaagattctcccatagacccgtgcaggagaagttcgtgtgcctgaactgcggcttcgagacacacgcagccgagcaagccgccctgaacatcgccagatcctggctgttcctgcggagccaggagtacaagaaataccagacaaacaagacaaccggcaacaccgataagagagccttcgtcgagacctggcagtccttttaccggaagaagcttaaggaggtgtggaaacctgccgtgcggtctggcggatctggcggaggctccgagaagatcgaggacatggccgtgagcctgatcagggaggagtggctgctggaccccagccagaaggacctgaggagggacaacaggaccgagaactacaggaacatgttcagcctgggcggcgagaccaggagcgagaacagggagctggccagcaagcaggtggccagcgccggcgtgcagccccacggcgagaccgccgccaggtgcaacggcgacgtgaccggcgccctggagcacggcgaggccagggacctgctgggcagcagggtggagaggcagagggccaacggcggcccaagcagcggcgcccctcctcccagcggcggcagcccagccggctccccaacctctaccgaggagggcacctctgagtccgccacccccgagagcggccctggcacctccaccgagcccagcgagggcagcgcacccggcagccctgccggcagccccacctccacagaggagggaaccagcaccgagcccagcgaaggcagcgccccaggcaccagcaccgagcctagtgagcaggagattaaacggatcaacaagatcagaagaagacttgtgaaagacagcaacaccaagaaggccggcaagacaggccccatgaaaaccctgctggttagagtgatgacacccgatctgagagagcggctggaaaacctgagaaagaagcctgaaaatatcccccagcccatcagcaatacatctagagccaacctgaataagctgctgaccgattacaccgaaatgaagaaggcgatcctgcatgtgtactgggaagagttccagaaggaccctgtgggcctgatgagccgggtggcccagcctgccagcaagaagatcgatcagaacaagctgaaacctgagatggacgagaagggcaacctgaccaccgccggctttgcctgctctcagtgtggccagcccctgttcgtgtacaagctggagcaggtgtctgagaagggcaaggcttacaccaactacttcggacggtgcaatgtggccgagcacgaaaagctgatcctgctggcccagctgaagcccgagaaggatagcgacgaagccgtgacatatagcctgggaaagtttgggcagagggccctggatttctacagcattcatgtgaccaaggagtccacccaccccgtgaagcccctggcccagatcgccggaaacagatacgcctccggacctgtgggaaaggccctgagcgacgcatgtatgggcacaatcgcctccttcctgtctaagtaccaggacatcatcatcgaacaccagaaggtggtgaagggcaaccagaagagactggagagcctgcgggagctggccggcaaggaaaacctggaataccctagcgtgaccctgccacctcagcctcacaccaaggagggcgttgatgcctacaacgaagtgatcgcccgggtgcgaatgtgggtgaacctgaacctgtggcagaagctgaagctaagcagagatgatgccaagcctctgctgagactgaagggattcccttcctttcctctggtcgagagacaggccaacgaagtggactggtgggacatggtgtgtaacgtgaagaagctgatcaacgagaaaaaggaggatggcaaggtgttttggcagaatctggctggctacaagagacaggaagccctgagaccatacctgagcagcgaggaagatcggaagaagggaaagaaattcgctcggtaccagctgggcgacctgctgctgcacctggaaaagaagcacggcgaggactggggaaaggtgtacgacgaggcctgggagcggattgacaagaaagtggaaggcctgagcaagcacatcaagctggaagaggaacggagaagcgaggacgcccagagcaaggccgccctgaccgactggctgcgggctaaggccagcttcgtgatcgagggcctgaaggaggccgacaaggacgagttctgcagatgcgagctgaagctgcagaagtggtacggggacctgcggggaaagcccttcgccatcgaagccgagaacagcatcctggacatcagcggcttcagcaagcagtacaactgtgccttcatctggcagaaggacggcgtgaagaagctgaacctgtacctgatcatcaactacttcaagggcggcaagctgcggttcaagaagatcaaacctgaagccttcgaagccaacagattctacaccgtgatcaacaaaaagagcggcgagatcgtgcccatggaggtgaacttcaacttcgacgaccccaacctgatcatcctgcctctggcctttggcaagagacagggcagagaattcatctggaacgacctgctgtccctggaaaccggcagcctgaagctggccaacggaagagtgatcgagaagacactgtacaacagaagaacccggcaggatgagcctgccctgttcgtggccctgaccttcgagcggcgggaggtcctggactcctccaatatcaaaccaatgaacctgatcggcgtggcaagaggcgaaaacatccccgccgtgatcgccctgaccgaccccgagggctgcccactgagccggtttaaggatagcctgggaaacccaacccacatcctgagaatcggcgagagctataaggagaagcagcggaccatccaggccaagaaggaggtggagcagcggagagccggcggctacagccggaagtacgccagcaaagccaagaatctggcagacgatatggtgagaaacaccgctagagatctgctgtactacgccgtgacccaggatgccatgctgatcttcgccaacctgagccggggcttcggccggcagggcaagcggaccttcatggccgagagacagtacacacggatggaggactggctgaccgccaagctggcctacgagggcctgagcaagacctacctgtccaagacactggcccagtacacctccaagacatgcagcaactgtgggtttaccatcaccagcgccgactacgacagggtgctggagaagctgaagaagacagcaacaggctggatgaccacaattaacggcaaggagctgaaggtggagggccagattacctactacaacagatacaagagacagaacgtagtcaaggacctgtccgtcgagctggatagactgagcgaagaatctgtgaacaacgacatctcctcctggacaaagggcagaagcggagaagctctgagcctcctgaagaaaagattctcccatagacccgtgcaggagaagttcgtgtgcctgaactgcggcttcgagacacacgcagccgagcaagccgccctgaacatcgccagatcctggctgttcctgcggagccaggagtacaagaaataccagacaaacaagacaaccggcaacaccgataagagagccttcgtcgagacctggcagtccttttaccggaagaagcttaaggaggtgtggaaacctgccgtgcggtctggcggatctggcggaggctcctgagaagatcgaggacatggccgtgagcctgatcagggaggagtggctgctggaccccagccagaaggacctgaggagggacaacaggaccgagaactacaggaacatgttcagcctgggcggcgagaccaggagcgagaacagggagctggccagcaagcaggtggccagcgccggcgtgcagccccacggcgagaccgccgccaggtgcaacggcgacgtgaccggcgccctggagcacggcgaggccagggacctgctgggcagcagggtggagaggcagagggccaacggatctggctccggcagcggccccaagaaaaagagaaaagtctaagctgccttctgcggggcttgccttctggccatgcccttcttctctcccttgcacctgtacctcttggtctttgaataaagcctgagtaggaaggctagcaaaaaaaaaaaaaaaaaaaaaaaaaaaaaaaaaaaaaaaaaaaaaaaaaaaaaaaaaaaaaaaaaaaaaaaaaaaaaaaa

SEQ ID NO: 16894 - RNA, 9485 nt, synthetic construct; identical to SEQ ID NO: 15297
  modified_base 1..9485: mod_base = OTHER; note = Each t is m1f
  source 1..9485: mol_type = other RNA

SEQ ID NO: 16895 - RNA, 9485 nt, synthetic construct; identical to SEQ ID NO: 15298
  modified_base 1..9485: mod_base = OTHER; note = Each t is m1f
  source 1..9485: mol_type = other RNA

SEQ ID NO: 16896 - RNA, 9485 nt, synthetic construct; identical to SEQ ID NO: 15299
  modified_base 1..9485: mod_base = OTHER; note = Each t is m1f
  source 1..9485: mol_type = other RNA

SEQ ID NO: 16897 - RNA, 9485 nt, synthetic construct; identical to SEQ ID NO: 15300
  modified_base 1..9485: mod_base = OTHER; note = Each t is m1f
  source 1..9485: mol_type = other RNA

SEQ ID NO: 16898 - RNA, 9485 nt, synthetic construct; identical to SEQ ID NO: 15301
  modified_base 1..9485: mod_base = OTHER; note = Each t is m1f
  source 1..9485: mol_type = other RNA

SEQ ID NO: 16899 - RNA, 9485 nt, synthetic construct; identical to SEQ ID NO: 15302
  modified_base 1..9485: mod_base = OTHER; note = Each t is m1f
  source 1..9485: mol_type = other RNA

SEQ ID NO: 16900 - RNA, 9485 nt, synthetic construct; identical to SEQ ID NO: 15303
  modified_base 1..9485: mod_base = OTHER; note = Each t is m1f
  source 1..9485: mol_type = other RNA

SEQ ID NO: 16901 - RNA, 9485 nt, synthetic construct; identical to SEQ ID NO: 15304
  modified_base 1..9485: mod_base = OTHER; note = Each t is m1f
  source 1..9485: mol_type = other RNA

SEQ ID NO: 16902 - RNA, 9485 nt, synthetic construct; identical to SEQ ID NO: 15305
  modified_base 1..9485: mod_base = OTHER; note = Each t is m1f
  source 1..9485: mol_type = other RNA

SEQ ID NO: 16903 - RNA, 9485 nt, synthetic construct; identical to SEQ ID NO: 15306
  modified_base 1..9485: mod_base = OTHER; note = Each t is m1f
  source 1..9485: mol_type = other RNA

SEQ ID NO: 16904 - RNA, 9485 nt, synthetic construct; identical to SEQ ID NO: 15307
  modified_base 1..9485: mod_base = OTHER; note = Each t is m1f
  source 1..9485: mol_type = other RNA

SEQ ID NO: 16905 - RNA, 9485 nt, synthetic construct; identical to SEQ ID NO: 15308
  modified_base 1..9485: mod_base = OTHER; note = Each t is m1f
  source 1..9485: mol_type = other RNA

SEQ ID NO: 16906 - RNA, 9485 nt, synthetic construct; identical to SEQ ID NO: 15309
  modified_base 1..9485: mod_base = OTHER; note = Each t is m1f
  source 1..9485: mol_type = other RNA

SEQ ID NO: 16907 - RNA, 9485 nt, synthetic construct; identical to SEQ ID NO: 15310
  modified_base 1..9485: mod_base = OTHER; note = Each t is m1f
  source 1..9485: mol_type = other RNA

SEQ ID NO: 16908 - RNA, 9485 nt, synthetic construct; identical to SEQ ID NO: 15311
  modified_base 1..9485: mod_base = OTHER; note = Each t is m1f
  source 1..9485: mol_type = other RNA

SEQ ID NO: 16909 - RNA, 9485 nt, synthetic construct; identical to SEQ ID NO: 15312
  modified_base 1..9485: mod_base = OTHER; note = Each t is m1f
  source 1..9485: mol_type = other RNA

SEQ ID NO: 16910 - RNA, 9485 nt, synthetic construct; identical to SEQ ID NO: 15313
  modified_base 1..9485: mod_base = OTHER; note = Each t is m1f
  source 1..9485: mol_type = other RNA

SEQ ID NO: 16911 - RNA, 9485 nt, synthetic construct; identical to SEQ ID NO: 15314
  modified_base 1..9485: mod_base = OTHER; note = Each t is m1f
  source 1..9485: mol_type = other RNA

SEQ ID NO: 16912 - RNA, 9485 nt, synthetic construct; identical to SEQ ID NO: 15315
  modified_base 1..9485: mod_base = OTHER; note = Each t is m1f
  source 1..9485: mol_type = other RNA

SEQ ID NO: 16913 - RNA, 9485 nt, synthetic construct; identical to SEQ ID NO: 15316
  modified_base 1..9485: mod_base = OTHER; note = Each t is m1f
  source 1..9485: mol_type = other RNA

SEQ ID NO: 16914 - RNA, 9485 nt, synthetic construct; identical to SEQ ID NO: 15317
  modified_base 1..9485: mod_base = OTHER; note = Each t is m1f
  source 1..9485: mol_type = other RNA

SEQ ID NO: 16915 - RNA, 9485 nt, synthetic construct; identical to SEQ ID NO: 15318
  modified_base 1..9485: mod_base = OTHER; note = Each t is m1f
  source 1..9485: mol_type = other RNA

SEQ ID NO: 16916 - RNA, 9485 nt, synthetic construct; identical to SEQ ID NO: 15319
  modified_base 1..9485: mod_base = OTHER; note = Each t is m1f
  source 1..9485: mol_type = other RNA

SEQ ID NO: 16917 - RNA, 9485 nt, synthetic construct; identical to SEQ ID NO: 15320
  modified_base 1..9485: mod_base = OTHER; note = Each t is m1f
  source 1..9485: mol_type = other RNA

SEQ ID NO: 16918 - RNA, 9485 nt, synthetic construct; identical to SEQ ID NO: 15321
  modified_base 1..9485: mod_base = OTHER; note = Each t is m1f
  source 1..9485: mol_type = other RNA

SEQ ID NO: 16919 - RNA, 9485 nt, synthetic construct; identical to SEQ ID NO: 15322
  modified_base 1..9485: mod_base = OTHER; note = Each t is m1f
  source 1..9485: mol_type = other RNA

SEQ ID NO: 16920 - RNA, 9485 nt, synthetic construct; identical to SEQ ID NO: 15323
  modified_base 1..9485: mod_base = OTHER; note = Each t is m1f
  source 1..9485: mol_type = other RNA

SEQ ID NO: 16921 - RNA, 9485 nt, synthetic construct; identical to SEQ ID NO: 15324
  modified_base 1..9485: mod_base = OTHER; note = Each t is m1f
  source 1..9485: mol_type = other RNA

SEQ ID NO: 16922 - RNA, 9485 nt, synthetic construct; identical to SEQ ID NO: 15325
  modified_base 1..9485: mod_base = OTHER; note = Each t is m1f
  source 1..9485: mol_type = other RNA

SEQ ID NO: 16923 - RNA, 9485 nt, synthetic construct; identical to SEQ ID NO: 15326
  modified_base 1..9485: mod_base = OTHER; note = Each t is m1f
  source 1..9485: mol_type = other RNA

SEQ ID NO: 16924 - RNA, 9485 nt, synthetic construct; identical to SEQ ID NO: 15327
  modified_base 1..9485: mod_base = OTHER; note = Each t is m1f
  source 1..9485: mol_type = other RNA

SEQ ID NO: 16925 - RNA, 9485 nt, synthetic construct; identical to SEQ ID NO: 15328
  modified_base 1..9485: mod_base = OTHER; note = Each t is m1f
  source 1..9485: mol_type = other RNA

SEQ ID NO: 16926 - RNA, 9485 nt, synthetic construct; identical to SEQ ID NO: 15329
  modified_base 1..9485: mod_base = OTHER; note = Each t is m1f
  source 1..9485: mol_type = other RNA

SEQ ID NO: 16927 - RNA, 9485 nt, synthetic construct; identical to SEQ ID NO: 15330
  modified_base 1..9485: mod_base = OTHER; note = Each t is m1f
  source 1..9485: mol_type = other RNA

SEQ ID NO: 16928 - RNA, 9485 nt, synthetic construct; identical to SEQ ID NO: 15331
  modified_base 1..9485: mod_base = OTHER; note = Each t is m1f
  source 1..9485: mol_type = other RNA

SEQ ID NO: 16929 - RNA, 9485 nt, synthetic construct; identical to SEQ ID NO: 15332
  modified_base 1..9485: mod_base = OTHER; note = Each t is m1f
  source 1..9485: mol_type = other RNA

SEQ ID NO: 16930 - RNA, 9485 nt, synthetic construct; identical to SEQ ID NO: 15333
  modified_base 1..9485: mod_base = OTHER; note = Each t is m1f
  source 1..9485: mol_type = other RNA

SEQ ID NO: 16931 - RNA, 9485 nt, synthetic construct; identical to SEQ ID NO: 15334
  modified_base 1..9485: mod_base = OTHER; note = Each t is m1f
  source 1..9485: mol_type = other RNA

SEQ ID NO: 16932 - RNA, 9485 nt, synthetic construct; identical to SEQ ID NO: 15335
  modified_base 1..9485: mod_base = OTHER; note = Each t is m1f
  source 1..9485: mol_type = other RNA

SEQ ID NO: 16933 - RNA, 9485 nt, synthetic construct; identical to SEQ ID NO: 15336
  modified_base 1..9485: mod_base = OTHER; note = Each t is m1f
  source 1..9485: mol_type = other RNA

SEQ ID NO: 16934 - RNA, 9485 nt, synthetic construct; identical to SEQ ID NO: 15337
  modified_base 1..9485: mod_base = OTHER; note = Each t is m1f
  source 1..9485: mol_type = other RNA

SEQ ID NO: 16935 - RNA, 9485 nt, synthetic construct; identical to SEQ ID NO: 15338
  modified_base 1..9485: mod_base = OTHER; note = Each t is m1f
  source 1..9485: mol_type = other RNA

SEQ ID NO: 16936 - RNA, 9485 nt, synthetic construct; identical to SEQ ID NO: 15339
  modified_base 1..9485: mod_base = OTHER; note = Each t is m1f
  source 1..9485: mol_type = other RNA

SEQ ID NO: 16937 - RNA, 9485 nt, synthetic construct; identical to SEQ ID NO: 15340
  modified_base 1..9485: mod_base = OTHER; note = Each t is m1f
  source 1..9485: mol_type = other RNA

SEQ ID NO: 16938 - RNA, 9485 nt, synthetic construct; identical to SEQ ID NO: 15341
  modified_base 1..9485: mod_base = OTHER; note = Each t is m1f
  source 1..9485: mol_type = other RNA

SEQ ID NO: 16939 - RNA, 9485 nt, synthetic construct; identical to SEQ ID NO: 15342
  modified_base 1..9485: mod_base = OTHER; note = Each t is m1f
  source 1..9485: mol_type = other RNA

SEQ ID NO: 16940 - RNA, 9485 nt, synthetic construct; identical to SEQ ID NO: 15343
  modified_base 1..9485: mod_base = OTHER; note = Each t is m1f
  source 1..9485: mol_type = other RNA

SEQ ID NO: 16941 - RNA, 9485 nt, synthetic construct; identical to SEQ ID NO: 15344
  modified_base 1..9485: mod_base = OTHER; note = Each t is m1f
  source 1..9485: mol_type = other RNA

SEQ ID NO: 16942 - RNA, 9485 nt, synthetic construct; identical to SEQ ID NO: 15345
  modified_base 1..9485: mod_base = OTHER; note = Each t is m1f
  source 1..9485: mol_type = other RNA

SEQ ID NO: 16943 - RNA, 9485 nt, synthetic construct; identical to SEQ ID NO: 15346
  modified_base 1..9485: mod_base = OTHER; note = Each t is m1f
  source 1..9485: mol_type = other RNA

SEQ ID NO: 16944 - RNA, 9485 nt, synthetic construct; identical to SEQ ID NO: 15347
  modified_base 1..9485: mod_base = OTHER; note = Each t is m1f
  source 1..9485: mol_type = other RNA

SEQ ID NO: 16945 - RNA, 9485 nt, synthetic construct; identical to SEQ ID NO: 15348
  modified_base 1..9485: mod_base = OTHER; note = Each t is m1f
  source 1..9485: mol_type = other RNA

SEQ ID NO: 16946 - RNA, 9485 nt, synthetic construct; identical to SEQ ID NO: 15349
  modified_base 1..9485: mod_base = OTHER; note = Each t is m1f
  source 1..9485: mol_type = other RNA

SEQ ID NO: 16947 - RNA, 9485 nt, synthetic construct; identical to SEQ ID NO: 15350
  modified_base 1..9485: mod_base = OTHER; note = Each t is m1f
  source 1..9485: mol_type = other RNA

SEQ ID NO: 16948 - RNA, 9485 nt, synthetic construct; identical to SEQ ID NO: 15351
  modified_base 1..9485: mod_base = OTHER; note = Each t is m1f
  source 1..9485: mol_type = other RNA

SEQ ID NO: 16949 - RNA, 9503 nt, synthetic construct; identical to SEQ ID NO: 15352
  modified_base 1..9503: mod_base = OTHER; note = Each t is m1f
  source 1..9503: mol_type = other RNA

SEQ ID NO: 16950 - RNA, 9485 nt, synthetic construct; identical to SEQ ID NO: 15353
  modified_base 1..9485: mod_base = OTHER; note = Each t is m1f
  source 1..9485: mol_type = other RNA

SEQ ID NO: 16951 - RNA, 9485 nt, synthetic construct; identical to SEQ ID NO: 15354
  modified_base 1..9485: mod_base = OTHER; note = Each t is m1f
  source 1..9485: mol_type = other RNA

SEQ ID NO: 16952 - RNA, 9485 nt, synthetic construct; identical to SEQ ID NO: 15355
  modified_base 1..9485: mod_base = OTHER; note = Each t is m1f
  source 1..9485: mol_type = other RNA

SEQ ID NO: 16953 - RNA, 9479 nt, synthetic construct; identical to SEQ ID NO: 15356
  modified_base 1..9479: mod_base = OTHER; note = Each t is m1f
  source 1..9479: mol_type = other RNA

SEQ ID NO: 16954 - RNA, 9485 nt, synthetic construct; identical to SEQ ID NO: 15357
  modified_base 1..9485: mod_base = OTHER; note = Each t is m1f
  source 1..9485: mol_type = other RNA

SEQ ID NO: 16955 - RNA, 9485 nt, synthetic construct; identical to SEQ ID NO: 15358
  modified_base 1..9485: mod_base = OTHER; note = Each t is m1f
  source 1..9485: mol_type = other RNA

SEQ ID NO: 16956 - RNA, 9485 nt, synthetic construct; identical to SEQ ID NO: 15359
  modified_base 1..9485: mod_base = OTHER; note = Each t is m1f
  source 1..9485: mol_type = other RNA

SEQ ID NO: 16957 - RNA, 9485 nt, synthetic construct; identical to SEQ ID NO: 15360
  modified_base 1..9485: mod_base = OTHER; note = Each t is m1f
  source 1..9485: mol_type = other RNA

SEQ ID NO: 16958 - RNA, 9485 nt, synthetic construct; identical to SEQ ID NO: 15361
  modified_base 1..9485: mod_base = OTHER; note = Each t is m1f
  source 1..9485: mol_type = other RNA

SEQ ID NO: 16959 - RNA, 9485 nt, synthetic construct; identical to SEQ ID NO: 15362
  modified_base 1..9485: mod_base = OTHER; note = Each t is m1f
  source 1..9485: mol_type = other RNA

SEQ ID NO: 16960 - RNA, 9485 nt, synthetic construct; identical to SEQ ID NO: 15363
  modified_base 1..9485: mod_base = OTHER; note = Each t is m1f
  source 1..9485: mol_type = other RNA

SEQ ID NO: 16961 - RNA, 9485 nt, synthetic construct; identical to SEQ ID NO: 15364
  modified_base 1..9485: mod_base = OTHER; note = Each t is m1f
  source 1..9485: mol_type = other RNA

SEQ ID NO: 16962 - RNA, 9485 nt, synthetic construct; identical to SEQ ID NO: 15365
  modified_base 1..9485: mod_base = OTHER; note = Each t is m1f
  source 1..9485: mol_type = other RNA

SEQ ID NO: 16963 - RNA, 9485 nt, synthetic construct; identical to SEQ ID NO: 15366
  modified_base 1..9485: mod_base = OTHER; note = Each t is m1f
  source 1..9485: mol_type = other RNA

SEQ ID NO: 16964 - RNA, 9485 nt, synthetic construct; identical to SEQ ID NO: 15367
  modified_base 1..9485: mod_base = OTHER; note = Each t is m1f
  source 1..9485: mol_type = other RNA

SEQ ID NO: 16965 - RNA, 9485 nt, synthetic construct; identical to SEQ ID NO: 15368
  modified_base 1..9485: mod_base = OTHER; note = Each t is m1f
  source 1..9485: mol_type = other RNA

SEQ ID NO: 16966 - RNA, 9485 nt, synthetic construct; identical to SEQ ID NO: 15369
  modified_base 1..9485: mod_base = OTHER; note = Each t is m1f
  source 1..9485: mol_type = other RNA

SEQ ID NO: 16967 - RNA, 9485 nt, synthetic construct; identical to SEQ ID NO: 15370
  modified_base 1..9485: mod_base = OTHER; note = Each t is m1f
  source 1..9485: mol_type = other RNA

SEQ ID NO: 16968 - RNA, 9485 nt, synthetic construct; identical to SEQ ID NO: 15371
  modified_base 1..9485: mod_base = OTHER; note = Each t is m1f
  source 1..9485: mol_type = other RNA

SEQ ID NO: 16969 - RNA, 9485 nt, synthetic construct; identical to SEQ ID NO: 15372
  modified_base 1..9485: mod_base = OTHER; note = Each t is m1f
  source 1..9485: mol_type = other RNA

SEQ ID NO: 16970 - RNA, 9485 nt, synthetic construct; identical to SEQ ID NO: 15373
  modified_base 1..9485: mod_base = OTHER; note = Each t is m1f
  source 1..9485: mol_type = other RNA

SEQ ID NO: 16971 - RNA, 9485 nt, synthetic construct; identical to SEQ ID NO: 15374
  modified_base 1..9485: mod_base = OTHER; note = Each t is m1f
  source 1..9485: mol_type = other RNA

SEQ ID NO: 16972 - RNA, 9485 nt, synthetic construct; identical to SEQ ID NO: 15375
  modified_base 1..9485: mod_base = OTHER; note = Each t is m1f
  source 1..9485: mol_type = other RNA

SEQ ID NO: 16973 - RNA, 9485 nt, synthetic construct; identical to SEQ ID NO: 15376
  modified_base 1..9485: mod_base = OTHER; note = Each t is m1f
  source 1..9485: mol_type = other RNA

SEQ ID NO: 16974 - RNA, 9485 nt, synthetic construct; identical to SEQ ID NO: 15377
  modified_base 1..9485: mod_base = OTHER; note = Each t is m1f
  source 1..9485: mol_type = other RNA

SEQ ID NO: 16975 - RNA, 9485 nt, synthetic construct; identical to SEQ ID NO: 15378
  modified_base 1..9485: mod_base = OTHER; note = Each t is m1f
  source 1..9485: mol_type = other RNA

SEQ ID NO: 16976 - RNA, 9485 nt, synthetic construct; identical to SEQ ID NO: 15379
  modified_base 1..9485: mod_base = OTHER; note = Each t is m1f
  source 1..9485: mol_type = other RNA

SEQ ID NO: 16977 - RNA, 9485 nt, synthetic construct; identical to SEQ ID NO: 15380
  modified_base 1..9485: mod_base = OTHER; note = Each t is m1f
  source 1..9485: mol_type = other RNA

SEQ ID NO: 16978 - RNA, 9485 nt, synthetic construct; identical to SEQ ID NO: 15381
  modified_base 1..9485: mod_base = OTHER; note = Each t is m1f
  source 1..9485: mol_type = other RNA

SEQ ID NO: 16979 - RNA, 9485 nt, synthetic construct; identical to SEQ ID NO: 15382
  modified_base 1..9485: mod_base = OTHER; note = Each t is m1f
  source 1..9485: mol_type = other RNA

SEQ ID NO: 16980 - RNA, 9485 nt, synthetic construct; identical to SEQ ID NO: 15383
  modified_base 1..9485: mod_base = OTHER; note = Each t is m1f
  source 1..9485: mol_type = other RNA

SEQ ID NO: 16981 - RNA, 9485 nt, synthetic construct; identical to SEQ ID NO: 15384
  modified_base 1..9485: mod_base = OTHER; note = Each t is m1f
  source 1..9485: mol_type = other RNA

SEQ ID NO: 16982 - RNA, 9485 nt, synthetic construct; identical to SEQ ID NO: 15385
  modified_base 1..9485: mod_base = OTHER; note = Each t is m1f
  source 1..9485: mol_type = other RNA

SEQ ID NO: 16983 - RNA, 9485 nt, synthetic construct; identical to SEQ ID NO: 15386
  modified_base 1..9485: mod_base = OTHER; note = Each t is m1f
  source 1..9485: mol_type = other RNA

SEQ ID NO: 16984 - RNA, 9485 nt, synthetic construct; identical to SEQ ID NO: 15387
  modified_base 1..9485: mod_base = OTHER; note = Each t is m1f
  source 1..9485: mol_type = other RNA

SEQ ID NO: 16985 - RNA, 9485 nt, synthetic construct; identical to SEQ ID NO: 15388
  modified_base 1..9485: mod_base = OTHER; note = Each t is m1f
  source 1..9485: mol_type = other RNA

SEQ ID NO: 16986 - RNA, 9485 nt, synthetic construct; identical to SEQ ID NO: 15389
  modified_base 1..9485: mod_base = OTHER; note = Each t is m1f
  source 1..9485: mol_type = other RNA

SEQ ID NO: 16987 - RNA, 9485 nt, synthetic construct; identical to SEQ ID NO: 15390
  modified_base 1..9485: mod_base = OTHER; note = Each t is m1f
  source 1..9485: mol_type = other RNA

SEQ ID NO: 16988 - RNA, 9485 nt, synthetic construct; identical to SEQ ID NO: 15391
  modified_base 1..9485: mod_base = OTHER; note = Each t is m1f
  source 1..9485: mol_type = other RNA

SEQ ID NO: 16989 - RNA, 9485 nt, synthetic construct; identical to SEQ ID NO: 15392
  modified_base 1..9485: mod_base = OTHER; note = Each t is m1f
  source 1..9485: mol_type = other RNA

SEQ ID NO: 16990 - RNA, 9485 nt, synthetic construct; identical to SEQ ID NO: 15393
  modified_base 1..9485: mod_base = OTHER; note = Each t is m1f
  source 1..9485: mol_type = other RNA

SEQ ID NO: 16991 - RNA, 9485 nt, synthetic construct; identical to SEQ ID NO: 15394
  modified_base 1..9485: mod_base = OTHER; note = Each t is m1f
  source 1..9485: mol_type = other RNA

SEQ ID NO: 16992 - RNA, 9485 nt, synthetic construct; identical to SEQ ID NO: 15395
  modified_base 1..9485: mod_base = OTHER; note = Each t is m1f
  source 1..9485: mol_type = other RNA

SEQ ID NO: 16993 - RNA, 9485 nt, synthetic construct; identical to SEQ ID NO: 15396
  modified_base 1..9485: mod_base = OTHER; note = Each t is m1f
  source 1..9485: mol_type = other RNA

SEQ ID NO: 16994 - RNA, 9485 nt, synthetic construct; identical to SEQ ID NO: 15397
  modified_base 1..9485: mod_base = OTHER; note = Each t is m1f
  source 1..9485: mol_type = other RNA

SEQ ID NO: 16995 - RNA, 9485 nt, synthetic construct; identical to SEQ ID NO: 15398
  modified_base 1..9485: mod_base = OTHER; note = Each t is m1f
  source 1..9485: mol_type = other RNA

SEQ ID NO: 16996 - RNA, 9485 nt, synthetic construct; identical to SEQ ID NO: 15399
  modified_base 1..9485: mod_base = OTHER; note = Each t is m1f
  source 1..9485: mol_type = other RNA

SEQ ID NO: 16997 - RNA, 9485 nt, synthetic construct; identical to SEQ ID NO: 15400
  modified_base 1..9485: mod_base = OTHER; note = Each t is m1f
  source 1..9485: mol_type = other RNA

SEQ ID NO: 16998 - RNA, 9485 nt, synthetic construct; identical to SEQ ID NO: 15401
  modified_base 1..9485: mod_base = OTHER; note = Each t is m1f
  source 1..9485: mol_type = other RNA

SEQ ID NO: 16999 - RNA, 9485 nt, synthetic construct; identical to SEQ ID NO: 15402
  modified_base 1..9485: mod_base = OTHER; note = Each t is m1f
  source 1..9485: mol_type = other RNA

SEQ ID NO: 17000 - RNA, 9485 nt, synthetic construct; identical to SEQ ID NO: 15403
  modified_base 1..9485: mod_base = OTHER; note = Each t is m1f
  source 1..9485: mol_type = other RNA

SEQ ID NO: 17001 - RNA, 9485 nt, synthetic construct; identical to SEQ ID NO: 15404
  modified_base 1..9485: mod_base = OTHER; note = Each t is m1f
  source 1..9485: mol_type = other RNA

SEQ ID NO: 17002 - RNA, 9485 nt, synthetic construct; identical to SEQ ID NO: 15405
  modified_base 1..9485: mod_base = OTHER; note = Each t is m1f
  source 1..9485: mol_type = other RNA

SEQ ID NO: 17003 - RNA, 9485 nt, synthetic construct; identical to SEQ ID NO: 15406
  modified_base 1..9485: mod_base = OTHER; note = Each t is m1f
  source 1..9485: mol_type = other RNA

SEQ ID NO: 17004 - RNA, 9485 nt, synthetic construct; identical to SEQ ID NO: 15407
  modified_base 1..9485: mod_base = OTHER; note = Each t is m1f
  source 1..9485: mol_type = other RNA

SEQ ID NO: 17005 - RNA, 9485 nt, synthetic construct; identical to SEQ ID NO: 15408
  modified_base 1..9485: mod_base = OTHER; note = Each t is m1f
  source 1..9485: mol_type = other RNA

SEQ ID NO: 17006 - RNA, 9485 nt, synthetic construct; identical to SEQ ID NO: 15409
  modified_base 1..9485: mod_base = OTHER; note = Each t is m1f
  source 1..9485: mol_type = other RNA

SEQ ID NO: 17007 - RNA, 9485 nt, synthetic construct; identical to SEQ ID NO: 15410
  modified_base 1..9485: mod_base = OTHER; note = Each t is m1f
  source 1..9485: mol_type = other RNA

SEQ ID NO: 17008 - RNA, 9485 nt, synthetic construct; identical to SEQ ID NO: 15411
  modified_base 1..9485: mod_base = OTHER; note = Each t is m1f
  source 1..9485: mol_type = other RNA

SEQ ID NO: 17009 - RNA, 9485 nt, synthetic construct; identical to SEQ ID NO: 15412
  modified_base 1..9485: mod_base = OTHER; note = Each t is m1f
  source 1..9485: mol_type = other RNA

SEQ ID NO: 17010 - RNA, 9485 nt, synthetic construct; identical to SEQ ID NO: 15413
  modified_base 1..9485: mod_base = OTHER; note = Each t is m1f
  source 1..9485: mol_type = other RNA

SEQ ID NO: 17011 - RNA, 9485 nt, synthetic construct; identical to SEQ ID NO: 15414
  modified_base 1..9485: mod_base = OTHER; note = Each t is m1f
  source 1..9485: mol_type = other RNA

SEQ ID NO: 17012 - RNA, 9485 nt, synthetic construct; identical to SEQ ID NO: 15415
  modified_base 1..9485: mod_base = OTHER; note = Each t is m1f
  source 1..9485: mol_type = other RNA

SEQ ID NO: 17013 - RNA, 9485 nt, synthetic construct; identical to SEQ ID NO: 15416
  modified_base 1..9485: mod_base = OTHER; note = Each t is m1f
  source 1..9485: mol_type = other RNA

SEQ ID NO: 17014 - RNA, 9485 nt, synthetic construct; identical to SEQ ID NO: 15417
  modified_base 1..9485: mod_base = OTHER; note = Each t is m1f
  source 1..9485: mol_type = other RNA

SEQ ID NO: 17015 - RNA, 9485 nt, synthetic construct; identical to SEQ ID NO: 15418
  modified_base 1..9485: mod_base = OTHER; note = Each t is m1f
  source 1..9485: mol_type = other RNA

SEQ ID NO: 17016 - RNA, 9485 nt, synthetic construct; identical to SEQ ID NO: 15419
  modified_base 1..9485: mod_base = OTHER; note = Each t is m1f
  source 1..9485: mol_type = other RNA

SEQ ID NO: 17017 - RNA, 9485 nt, synthetic construct; identical to SEQ ID NO: 15420
  modified_base 1..9485: mod_base = OTHER; note = Each t is m1f
  source 1..9485: mol_type = other RNA

SEQ ID NO: 17018 - RNA, 9485 nt, synthetic construct; identical to SEQ ID NO: 15421
  modified_base 1..9485: mod_base = OTHER; note = Each t is m1f
  source 1..9485: mol_type = other RNA

SEQ ID NO: 17019 - RNA, 9485 nt, synthetic construct; identical to SEQ ID NO: 15422
  modified_base 1..9485: mod_base = OTHER; note = Each t is m1f
  source 1..9485: mol_type = other RNA

SEQ ID NO: 17020 - RNA, 9485 nt, synthetic construct; identical to SEQ ID NO: 15423
  modified_base 1..9485: mod_base = OTHER; note = Each t is m1f
  source 1..9485: mol_type = other RNA

SEQ ID NO: 17021 - RNA, 9485 nt, synthetic construct; identical to SEQ ID NO: 15424
  modified_base 1..9485: mod_base = OTHER; note = Each t is m1f
  source 1..9485: mol_type = other RNA

SEQ ID NO: 17022 - RNA, 9485 nt, synthetic construct; identical to SEQ ID NO: 15425
  modified_base 1..9485: mod_base = OTHER; note = Each t is m1f
  source 1..9485: mol_type = other RNA

SEQ ID NO: 17023 - RNA, 9485 nt, synthetic construct; identical to SEQ ID NO: 15426
  modified_base 1..9485: mod_base = OTHER; note = Each t is m1f
  source 1..9485: mol_type = other RNA

SEQ ID NO: 17024 - RNA, 9485 nt, synthetic construct; identical to SEQ ID NO: 15427
  modified_base 1..9485: mod_base = OTHER; note = Each t is m1f
  source 1..9485: mol_type = other RNA

SEQ ID NO: 17025 - RNA, 9485 nt, synthetic construct; identical to SEQ ID NO: 15428
  modified_base 1..9485: mod_base = OTHER; note = Each t is m1f
  source 1..9485: mol_type = other RNA

SEQ ID NO: 17026 - RNA, 9485 nt, synthetic construct; identical to SEQ ID NO: 15429
  modified_base 1..9485: mod_base = OTHER; note = Each t is m1f
  source 1..9485: mol_type = other RNA

SEQ ID NO: 17027 - RNA, 9485 nt, synthetic construct; identical to SEQ ID NO: 15430
  modified_base 1..9485: mod_base = OTHER; note = Each t is m1f
  source 1..9485: mol_type = other RNA

SEQ ID NO: 17028 - RNA, 9485 nt, synthetic construct; identical to SEQ ID NO: 15431
  modified_base 1..9485: mod_base = OTHER; note = Each t is m1f
  source 1..9485: mol_type = other RNA

SEQ ID NO: 17029 - RNA, 9485 nt, synthetic construct; identical to SEQ ID NO: 15432
  modified_base 1..9485: mod_base = OTHER; note = Each t is m1f
  source 1..9485: mol_type = other RNA

SEQ ID NO: 17030 - RNA, 9485 nt, synthetic construct; identical to SEQ ID NO: 15433
  modified_base 1..9485: mod_base = OTHER; note = Each t is m1f
  source 1..9485: mol_type = other RNA

SEQ ID NO: 17031 - RNA, 9485 nt, synthetic construct; identical to SEQ ID NO: 15434
  modified_base 1..9485: mod_base = OTHER; note = Each t is m1f
  source 1..9485: mol_type = other RNA

SEQ ID NO: 17032 - RNA, 9485 nt, synthetic construct; identical to SEQ ID NO: 15435
  modified_base 1..9485: mod_base = OTHER; note = Each t is m1f
  source 1..9485: mol_type = other RNA

SEQ ID NO: 17033 - RNA, 9485 nt, synthetic construct; identical to SEQ ID NO: 15436
  modified_base 1..9485: mod_base = OTHER; note = Each t is m1f
  source 1..9485: mol_type = other RNA

SEQ ID NO: 17034 - RNA, 9485 nt, synthetic construct; identical to SEQ ID NO: 15437
  modified_base 1..9485: mod_base = OTHER; note = Each t is m1f
  source 1..9485: mol_type = other RNA

SEQ ID NO: 17035 - RNA, 9485 nt, synthetic construct; identical to SEQ ID NO: 15438
  modified_base 1..9485: mod_base = OTHER; note = Each t is m1f
  source 1..9485: mol_type = other RNA

SEQ ID NO: 17036 - RNA, 9485 nt, synthetic construct; identical to SEQ ID NO: 15439
  modified_base 1..9485: mod_base = OTHER; note = Each t is m1f
  source 1..9485: mol_type = other RNA

SEQ ID NO: 17037 - RNA, 9485 nt, synthetic construct; identical to SEQ ID NO: 15440
  modified_base 1..9485: mod_base = OTHER; note = Each t is m1f
  source 1..9485: mol_type = other RNA

SEQ ID NO: 17038 - RNA, 9485 nt, synthetic construct; identical to SEQ ID NO: 15441
  modified_base 1..9485: mod_base = OTHER; note = Each t is m1f
  source 1..9485: mol_type = other RNA

SEQ ID NO: 17039 - RNA, 9485 nt, synthetic construct; identical to SEQ ID NO: 15442
  modified_base 1..9485: mod_base = OTHER; note = Each t is m1f
  source 1..9485: mol_type = other RNA

SEQ ID NO: 17040 - RNA, 9485 nt, synthetic construct; identical to SEQ ID NO: 15443
  modified_base 1..9485: mod_base = OTHER; note = Each t is m1f
  source 1..9485: mol_type = other RNA

SEQ ID NO: 17041 - RNA, 9485 nt, synthetic construct; identical to SEQ ID NO: 15444
  modified_base 1..9485: mod_base = OTHER; note = Each t is m1f
  source 1..9485: mol_type = other RNA

SEQ ID NO: 17042 - RNA, 9485 nt, synthetic construct; identical to SEQ ID NO: 15445
  modified_base 1..9485: mod_base = OTHER; note = Each t is m1f
  source 1..9485: mol_type = other RNA

SEQ ID NO: 17043 - RNA, 9485 nt, synthetic construct; identical to SEQ ID NO: 15446
  modified_base 1..9485: mod_base = OTHER; note = Each t is m1f
  source 1..9485: mol_type = other RNA

SEQ ID NO: 17044 - RNA, 9485 nt, synthetic construct; identical to SEQ ID NO: 15447
  modified_base 1..9485: mod_base = OTHER; note = Each t is m1f
  source 1..9485: mol_type = other RNA

SEQ ID NO: 17045 - RNA, 9485 nt, synthetic construct; identical to SEQ ID NO: 15448
  modified_base 1..9485: mod_base = OTHER; note = Each t is m1f
  source 1..9485: mol_type = other RNA

SEQ ID NO: 17046 - RNA, 9485 nt, synthetic construct; identical to SEQ ID NO: 15449
  modified_base 1..9485: mod_base = OTHER; note = Each t is m1f
  source 1..9485: mol_type = other RNA

SEQ ID NO: 17047 - RNA, 9485 nt, synthetic construct; identical to SEQ ID NO: 15450
  modified_base 1..9485: mod_base = OTHER; note = Each t is m1f
  source 1..9485: mol_type = other RNA

SEQ ID NO: 17048 - RNA, 9485 nt, synthetic construct; identical to SEQ ID NO: 15451
  modified_base 1..9485: mod_base = OTHER; note = Each t is m1f
  source 1..9485: mol_type = other RNA

SEQ ID NO: 17049 - RNA, 9485 nt, synthetic construct; identical to SEQ ID NO: 15452
  modified_base 1..9485: mod_base = OTHER; note = Each t is m1f
  source 1..9485: mol_type = other RNA

SEQ ID NO: 17050 - RNA, 9485 nt, synthetic construct; identical to SEQ ID NO: 15453
  modified_base 1..9485: mod_base = OTHER; note = Each t is m1f
  source 1..9485: mol_type = other RNA

SEQ ID NO: 17051 - RNA, 9485 nt, synthetic construct; identical to SEQ ID NO: 15454
  modified_base 1..9485: mod_base = OTHER; note = Each t is m1f
  source 1..9485: mol_type = other RNA

SEQ ID NO: 17052 - RNA, 9485 nt, synthetic construct; identical to SEQ ID NO: 15455
  modified_base 1..9485: mod_base = OTHER; note = Each t is m1f
  source 1..9485: mol_type = other RNA

SEQ ID NO: 17053 - RNA, 9485 nt, synthetic construct; identical to SEQ ID NO: 15456
  modified_base 1..9485: mod_base = OTHER; note = Each t is m1f
  source 1..9485: mol_type = other RNA

SEQ ID NO: 17054 - RNA, 9485 nt, synthetic construct; identical to SEQ ID NO: 15457
  modified_base 1..9485: mod_base = OTHER; note = Each t is m1f
  source 1..9485: mol_type = other RNA

SEQ ID NO: 17055 - RNA, 9485 nt, synthetic construct; identical to SEQ ID NO: 15458
  modified_base 1..9485: mod_base = OTHER; note = Each t is m1f
  source 1..9485: mol_type = other RNA

SEQ ID NO: 17056 - RNA, 9485 nt, synthetic construct; identical to SEQ ID NO: 15459
  modified_base 1..9485: mod_base = OTHER; note = Each t is m1f
  source 1..9485: mol_type = other RNA

SEQ ID NO: 17057 - RNA, 9479 nt, synthetic construct; identical to SEQ ID NO: 15460
  modified_base 1..9479: mod_base = OTHER; note = Each t is m1f
  source 1..9479: mol_type = other RNA

SEQ ID NO: 17058 - RNA, 9485 nt, synthetic construct; identical to SEQ ID NO: 15461
  modified_base 1..9485: mod_base = OTHER; note = Each t is m1f
  source 1..9485: mol_type = other RNA

SEQ ID NO: 17059 - RNA, 9485 nt, synthetic construct; identical to SEQ ID NO: 15462
  modified_base 1..9485: mod_base = OTHER; note = Each t is m1f
  source 1..9485: mol_type = other RNA

SEQ ID NO: 17060 - RNA, 9485 nt, synthetic construct; identical to SEQ ID NO: 15463
  modified_base 1..9485: mod_base = OTHER; note = Each t is m1f
  source 1..9485: mol_type = other RNA

SEQ ID NO: 17061 - RNA, 9485 nt, synthetic construct; identical to SEQ ID NO: 15464
  modified_base 1..9485: mod_base = OTHER; note = Each t is m1f
  source 1..9485: mol_type = other RNA

SEQ ID NO: 17062 - RNA, 9485 nt, synthetic construct; identical to SEQ ID NO: 15465
  modified_base 1..9485: mod_base = OTHER; note = Each t is m1f
  source 1..9485: mol_type = other RNA

SEQ ID NO: 17063 - RNA, 9485 nt, synthetic construct; identical to SEQ ID NO: 15466
  modified_base 1..9485: mod_base = OTHER; note = Each t is m1f
  source 1..9485: mol_type = other RNA

SEQ ID NO: 17064 - RNA, 9485 nt, synthetic construct; identical to SEQ ID NO: 15467
  modified_base 1..9485: mod_base = OTHER; note = Each t is m1f
  source 1..9485: mol_type = other RNA

SEQ ID NO: 17065 - RNA, 9485 nt, synthetic construct; identical to SEQ ID NO: 15468
  modified_base 1..9485: mod_base = OTHER; note = Each t is m1f
  source 1..9485: mol_type = other RNA

SEQ ID NO: 17066 - RNA, 9485 nt, synthetic construct; identical to SEQ ID NO: 15469
  modified_base 1..9485: mod_base = OTHER; note = Each t is m1f
  source 1..9485: mol_type = other RNA

SEQ ID NO: 17067 - RNA, 9485 nt, synthetic construct; identical to SEQ ID NO: 15470
  modified_base 1..9485: mod_base = OTHER; note = Each t is m1f
  source 1..9485: mol_type = other RNA

SEQ ID NO: 17068 - RNA, 9479 nt, synthetic construct; identical to SEQ ID NO: 15471
  modified_base 1..9479: mod_base = OTHER; note = Each t is m1f
  source 1..9479: mol_type = other RNA

SEQ ID NO: 17069 - RNA, 9485 nt, synthetic construct; identical to SEQ ID NO: 15472
  modified_base 1..9485: mod_base = OTHER; note = Each t is m1f
  source 1..9485: mol_type = other RNA

SEQ ID NO: 17070 - RNA, 9485 nt, synthetic construct; identical to SEQ ID NO: 15473
  modified_base 1..9485: mod_base = OTHER; note = Each t is m1f
  source 1..9485: mol_type = other RNA

SEQ ID NO: 17071 - RNA, 9485 nt, synthetic construct; identical to SEQ ID NO: 15474
  modified_base 1..9485: mod_base = OTHER; note = Each t is m1f
  source 1..9485: mol_type = other RNA

SEQ ID NO: 17072 - RNA, 9485 nt, synthetic construct; identical to SEQ ID NO: 15475
  modified_base 1..9485: mod_base = OTHER; note = Each t is m1f
  source 1..9485: mol_type = other RNA

SEQ ID NO: 17073 - RNA, 9485 nt, synthetic construct; identical to SEQ ID NO: 15476
  modified_base 1..9485: mod_base = OTHER; note = Each t is m1f
  source 1..9485: mol_type = other RNA

SEQ ID NO: 17074 - RNA, 9485 nt, synthetic construct; identical to SEQ ID NO: 15477
  modified_base 1..9485: mod_base = OTHER; note = Each t is m1f
  source 1..9485: mol_type = other RNA

SEQ ID NO: 17075 - RNA, 9485 nt, synthetic construct; identical to SEQ ID NO: 15478
  modified_base 1..9485: mod_base = OTHER; note = Each t is m1f
  source 1..9485: mol_type = other RNA

SEQ ID NO: 17076 - RNA, 9485 nt, synthetic construct; identical to SEQ ID NO: 15479
  modified_base 1..9485: mod_base = OTHER; note = Each t is m1f
  source 1..9485: mol_type = other RNA

SEQ ID NO: 17077 - RNA, 9485 nt, synthetic construct; identical to SEQ ID NO: 15480
  modified_base 1..9485: mod_base = OTHER; note = Each t is m1f
  source 1..9485: mol_type = other RNA

SEQ ID NO: 17078 - RNA, 9485 nt, synthetic construct; identical to SEQ ID NO: 15481
  modified_base 1..9485: mod_base = OTHER; note = Each t is m1f
  source 1..9485: mol_type = other RNA

SEQ ID NO: 17079 - RNA, 9485 nt, synthetic construct; identical to SEQ ID NO: 15482
  modified_base 1..9485: mod_base = OTHER; note = Each t is m1f
  source 1..9485: mol_type = other RNA

SEQ ID NO: 17080 - RNA, 9485 nt, synthetic construct; identical to SEQ ID NO: 15483
  modified_base 1..9485: mod_base = OTHER; note = Each t is m1f
  source 1..9485: mol_type = other RNA

SEQ ID NO: 17081 - RNA, 9485 nt, synthetic construct; identical to SEQ ID NO: 15484
  modified_base 1..9485: mod_base = OTHER; note = Each t is m1f
  source 1..9485: mol_type = other RNA

SEQ ID NO: 17082 - RNA, 9485 nt, synthetic construct; identical to SEQ ID NO: 15485
  modified_base 1..9485: mod_base = OTHER; note = Each t is m1f
  source 1..9485: mol_type = other RNA

SEQ ID NO: 17083 - RNA, 9485 nt, synthetic construct; identical to SEQ ID NO: 15486
  modified_base 1..9485: mod_base = OTHER; note = Each t is m1f
  source 1..9485: mol_type = other RNA

SEQ ID NO: 17084 - RNA, 9485 nt, synthetic construct; identical to SEQ ID NO: 15487
  modified_base 1..9485: mod_base = OTHER; note = Each t is m1f
  source 1..9485: mol_type = other RNA

SEQ ID NO: 17085 - RNA, 9485 nt, synthetic construct; identical to SEQ ID NO: 15488
  modified_base 1..9485: mod_base = OTHER; note = Each t is m1f
  source 1..9485: mol_type = other RNA

SEQ ID NO: 17086 - RNA, 9485 nt, synthetic construct; identical to SEQ ID NO: 15489
  modified_base 1..9485: mod_base = OTHER; note = Each t is m1f
  source 1..9485: mol_type = other RNA

SEQ ID NO: 17087 - RNA, 9485 nt, synthetic construct; identical to SEQ ID NO: 15490
  modified_base 1..9485: mod_base = OTHER; note = Each t is m1f
  source 1..9485: mol_type = other RNA

SEQ ID NO: 17088 - RNA, 9485 nt, synthetic construct; identical to SEQ ID NO: 15491
  modified_base 1..9485: mod_base = OTHER; note = Each t is m1f
  source 1..9485: mol_type = other RNA

SEQ ID NO: 17089 - RNA, 9485 nt, synthetic construct; identical to SEQ ID NO: 15492
  modified_base 1..9485: mod_base = OTHER; note = Each t is m1f
  source 1..9485: mol_type = other RNA

SEQ ID NO: 17090 - RNA, 9485 nt, synthetic construct; identical to SEQ ID NO: 15493
  modified_base 1..9485: mod_base = OTHER; note = Each t is m1f
  source 1..9485: mol_type = other RNA

SEQ ID NO: 17091 - RNA, 9485 nt, synthetic construct; identical to SEQ ID NO: 15494
  modified_base 1..9485: mod_base = OTHER; note = Each t is m1f
  source 1..9485: mol_type = other RNA

SEQ ID NO: 17092 - RNA, 9485 nt, synthetic construct; identical to SEQ ID NO: 15495
  modified_base 1..9485: mod_base = OTHER; note = Each t is m1f
  source 1..9485: mol_type = other RNA

SEQ ID NO: 17093 - RNA, 9485 nt, synthetic construct; identical to SEQ ID NO: 15496
  modified_base 1..9485: mod_base = OTHER; note = Each t is m1f
  source 1..9485: mol_type = other RNA

SEQ ID NO: 17094 - RNA, 9485 nt, synthetic construct; identical to SEQ ID NO: 15497
  modified_base 1..9485: mod_base = OTHER; note = Each t is m1f
  source 1..9485: mol_type = other RNA

SEQ ID NO: 17095 - RNA, 9485 nt, synthetic construct; identical to SEQ ID NO: 15498
  modified_base 1..9485: mod_base = OTHER; note = Each t is m1f
  source 1..9485: mol_type = other RNA

SEQ ID NO: 17096 - RNA, 9479 nt, synthetic construct; identical to SEQ ID NO: 15499
  modified_base 1..9479: mod_base = OTHER; note = Each t is m1f
  source 1..9479: mol_type = other RNA

SEQ ID NO: 17097 - RNA, 9485 nt, synthetic construct; identical to SEQ ID NO: 15500
  modified_base 1..9485: mod_base = OTHER; note = Each t is m1f
  source 1..9485: mol_type = other RNA

SEQ ID NO: 17098 - RNA, 9485 nt, synthetic construct; identical to SEQ ID NO: 15501
  modified_base 1..9485: mod_base = OTHER; note = Each t is m1f
  source 1..9485: mol_type = other RNA

SEQ ID NO: 17099 - RNA, 9485 nt, synthetic construct; identical to SEQ ID NO: 15502
  modified_base 1..9485: mod_base = OTHER; note = Each t is m1f
  source 1..9485: mol_type = other RNA

SEQ ID NO: 17100 - RNA, 9485 nt, synthetic construct; identical to SEQ ID NO: 15503
  modified_base 1..9485: mod_base = OTHER; note = Each t is m1f
  source 1..9485: mol_type = other RNA

SEQ ID NO: 17101 - RNA, 9485 nt, synthetic construct; identical to SEQ ID NO: 15504
  modified_base 1..9485: mod_base = OTHER; note = Each t is m1f
  source 1..9485: mol_type = other RNA

SEQ ID NO: 17102 - RNA, 9485 nt, synthetic construct; identical to SEQ ID NO: 15505
  modified_base 1..9485: mod_base = OTHER; note = Each t is m1f
  source 1..9485: mol_type = other RNA

SEQ ID NO: 17103 - RNA, 9485 nt, synthetic construct; identical to SEQ ID NO: 15506
  modified_base 1..9485: mod_base = OTHER; note = Each t is m1f
  source 1..9485: mol_type = other RNA

SEQ ID NO: 17104 - RNA, 9485 nt, synthetic construct; identical to SEQ ID NO: 15507
  modified_base 1..9485: mod_base = OTHER; note = Each t is m1f
  source 1..9485: mol_type = other RNA

SEQ ID NO: 17105 - RNA, 9485 nt, synthetic construct; identical to SEQ ID NO: 15508
  modified_base 1..9485: mod_base = OTHER; note = Each t is m1f
  source 1..9485: mol_type = other RNA

SEQ ID NO: 17106 - RNA, 9485 nt, synthetic construct; identical to SEQ ID NO: 15509
  modified_base 1..9485: mod_base = OTHER; note = Each t is m1f
  source 1..9485: mol_type = other RNA

SEQ ID NO: 17107 - RNA, 9485 nt, synthetic construct; identical to SEQ ID NO: 15510
  modified_base 1..9485: mod_base = OTHER; note = Each t is m1f
  source 1..9485: mol_type = other RNA

SEQ ID NO: 17108 - RNA, 9485 nt, synthetic construct; identical to SEQ ID NO: 15511
  modified_base 1..9485: mod_base = OTHER; note = Each t is m1f
  source 1..9485: mol_type = other RNA

SEQ ID NO: 17109 - RNA, 9485 nt, synthetic construct; identical to SEQ ID NO: 15512
  modified_base 1..9485: mod_base = OTHER; note = Each t is m1f
  source 1..9485: mol_type = other RNA

SEQ ID NO: 17110 - RNA, 9485 nt, synthetic construct; identical to SEQ ID NO: 15513
  modified_base 1..9485: mod_base = OTHER; note = Each t is m1f
  source 1..9485: mol_type = other RNA

SEQ ID NO: 17111 - RNA, 9485 nt, synthetic construct; identical to SEQ ID NO: 15514
  modified_base 1..9485: mod_base = OTHER; note = Each t is m1f
  source 1..9485: mol_type = other RNA

SEQ ID NO: 17112 - RNA, 9485 nt, synthetic construct; identical to SEQ ID NO: 15515
  modified_base 1..9485: mod_base = OTHER; note = Each t is m1f
  source 1..9485: mol_type = other RNA

SEQ ID NO: 17113 - RNA, 9485 nt, synthetic construct; identical to SEQ ID NO: 15516
  modified_base 1..9485: mod_base = OTHER; note = Each t is m1f
  source 1..9485: mol_type = other RNA

SEQ ID NO: 17114 - RNA, 9485 nt, synthetic construct; identical to SEQ ID NO: 15517
  modified_base 1..9485: mod_base = OTHER; note = Each t is m1f
  source 1..9485: mol_type = other RNA

SEQ ID NO: 17115 - RNA, 9485 nt, synthetic construct; identical to SEQ ID NO: 15518
  modified_base 1..9485: mod_base = OTHER; note = Each t is m1f
  source 1..9485: mol_type = other RNA

SEQ ID NO: 17116 - RNA, 9485 nt, synthetic construct; identical to SEQ ID NO: 15519
  modified_base 1..9485: mod_base = OTHER; note = Each t is m1f
  source 1..9485: mol_type = other RNA

SEQ ID NO: 17117 - RNA, 9485 nt, synthetic construct; identical to SEQ ID NO: 15520
  modified_base 1..9485: mod_base = OTHER; note = Each t is m1f
  source 1..9485: mol_type = other RNA

SEQ ID NO: 17118 - RNA, 9485 nt, synthetic construct; identical to SEQ ID NO: 15521
  modified_base 1..9485: mod_base = OTHER; note = Each t is m1f
  source 1..9485: mol_type = other RNA

SEQ ID NO: 17119 - RNA, 9485 nt, synthetic construct; identical to SEQ ID NO: 15522
  modified_base 1..9485: mod_base = OTHER; note = Each t is m1f
  source 1..9485: mol_type = other RNA

SEQ ID NO: 17120 - RNA, 9485 nt, synthetic construct; identical to SEQ ID NO: 15523
  modified_base 1..9485: mod_base = OTHER; note = Each t is m1f
  source 1..9485: mol_type = other RNA

SEQ ID NO: 17121 - RNA, 9485 nt, synthetic construct; identical to SEQ ID NO: 15524
  modified_base 1..9485: mod_base = OTHER; note = Each t is m1f
  source 1..9485: mol_type = other RNA

SEQ ID NO: 17122 - RNA, 9485 nt, synthetic construct; identical to SEQ ID NO: 15525
  modified_base 1..9485: mod_base = OTHER; note = Each t is m1f
  source 1..9485: mol_type = other RNA

SEQ ID NO: 17123 - RNA, 9485 nt, synthetic construct; identical to SEQ ID NO: 15526
  modified_base 1..9485: mod_base = OTHER; note = Each t is m1f
  source 1..9485: mol_type = other RNA

SEQ ID NO: 17124 - RNA, 9485 nt, synthetic construct; identical to SEQ ID NO: 15527
  modified_base 1..9485: mod_base = OTHER; note = Each t is m1f
  source 1..9485: mol_type = other RNA

SEQ ID NO: 17125 - RNA, 9485 nt, synthetic construct; identical to SEQ ID NO: 15528
  modified_base 1..9485: mod_base = OTHER; note = Each t is m1f
  source 1..9485: mol_type = other RNA

SEQ ID NO: 17126 - RNA, 9485 nt, synthetic construct; identical to SEQ ID NO: 15529
  modified_base 1..9485: mod_base = OTHER; note = Each t is m1f
  source 1..9485: mol_type = other RNA

SEQ ID NO: 17127 - RNA, 9485 nt, synthetic construct; identical to SEQ ID NO: 15530
  modified_base 1..9485: mod_base = OTHER; note = Each t is m1f
  source 1..9485: mol_type = other RNA

SEQ ID NO: 17128 - RNA, 9485 nt, synthetic construct; identical to SEQ ID NO: 15531
  modified_base 1..9485: mod_base = OTHER; note = Each t is m1f
  source 1..9485: mol_type = other RNA

SEQ ID NO: 17129 - RNA, 9485 nt, synthetic construct; identical to SEQ ID NO: 15532
  modified_base 1..9485: mod_base = OTHER; note = Each t is m1f
  source 1..9485: mol_type = other RNA

SEQ ID NO: 17130 - RNA, 9485 nt, synthetic construct; identical to SEQ ID NO: 15533
  modified_base 1..9485: mod_base = OTHER; note = Each t is m1f
  source 1..9485: mol_type = other RNA

SEQ ID NO: 17131 - RNA, 9485 nt, synthetic construct; identical to SEQ ID NO: 15534
  modified_base 1..9485: mod_base = OTHER; note = Each t is m1f
  source 1..9485: mol_type = other RNA

SEQ ID NO: 17132 - RNA, 9485 nt, synthetic construct; identical to SEQ ID NO: 15535
  modified_base 1..9485: mod_base = OTHER; note = Each t is m1f
  source 1..9485: mol_type = other RNA

SEQ ID NO: 17133 - RNA, 9485 nt, synthetic construct; identical to SEQ ID NO: 15536
  modified_base 1..9485: mod_base = OTHER; note = Each t is m1f
  source 1..9485: mol_type = other RNA

SEQ ID NO: 17134 - RNA, 9485 nt, synthetic construct; identical to SEQ ID NO: 15537
  modified_base 1..9485: mod_base = OTHER; note = Each t is m1f
  source 1..9485: mol_type = other RNA

SEQ ID NO: 17135 - RNA, 9485 nt, synthetic construct; identical to SEQ ID NO: 15538
  modified_base 1..9485: mod_base = OTHER; note = Each t is m1f
  source 1..9485: mol_type = other RNA

SEQ ID NO: 17136 - RNA, 9485 nt, synthetic construct; identical to SEQ ID NO: 15539
  modified_base 1..9485: mod_base = OTHER; note = Each t is m1f
  source 1..9485: mol_type = other RNA

SEQ ID NO: 17137 - RNA, 9485 nt, synthetic construct; identical to SEQ ID NO: 15540
  modified_base 1..9485: mod_base = OTHER; note = Each t is m1f
  source 1..9485: mol_type = other RNA

SEQ ID NO: 17138 - RNA, 9485 nt, synthetic construct; identical to SEQ ID NO: 15541
  modified_base 1..9485: mod_base = OTHER; note = Each t is m1f
  source 1..9485: mol_type = other RNA

SEQ ID NO: 17139 - RNA, 9485 nt, synthetic construct; identical to SEQ ID NO: 15542
  modified_base 1..9485: mod_base = OTHER; note = Each t is m1f
  source 1..9485: mol_type = other RNA

SEQ ID NO: 17140 - RNA, 9485 nt, synthetic construct; identical to SEQ ID NO: 15543
  modified_base 1..9485: mod_base = OTHER; note = Each t is m1f
  source 1..9485: mol_type = other RNA

SEQ ID NO: 17141 - RNA, 9485 nt, synthetic construct; identical to SEQ ID NO: 15544
  modified_base 1..9485: mod_base = OTHER; note = Each t is m1f
  source 1..9485: mol_type = other RNA

SEQ ID NO: 17142 - RNA, 9485 nt, synthetic construct; identical to SEQ ID NO: 15545
  modified_base 1..9485: mod_base = OTHER; note = Each t is m1f
  source 1..9485: mol_type = other RNA

SEQ ID NO: 17143 - RNA, 9485 nt, synthetic construct; identical to SEQ ID NO: 15546
  modified_base 1..9485: mod_base = OTHER; note = Each t is m1f
  source 1..9485: mol_type = other RNA

SEQ ID NO: 17144 - RNA, 9485 nt, synthetic construct; identical to SEQ ID NO: 15547
  modified_base 1..9485: mod_base = OTHER; note = Each t is m1f
  source 1..9485: mol_type = other RNA

SEQ ID NO: 17145 - RNA, 9485 nt, synthetic construct; identical to SEQ ID NO: 15548
  modified_base 1..9485: mod_base = OTHER; note = Each t is m1f
  source 1..9485: mol_type = other RNA

SEQ ID NO: 17146 - RNA, 9485 nt, synthetic construct; identical to SEQ ID NO: 15549
  modified_base 1..9485: mod_base = OTHER; note = Each t is m1f
  source 1..9485: mol_type = other RNA

SEQ ID NO: 17147 - RNA, 9485 nt, synthetic construct; identical to SEQ ID NO: 15550
  modified_base 1..9485: mod_base = OTHER; note = Each t is m1f
  source 1..9485: mol_type = other RNA

SEQ ID NO: 17148 - RNA, 9485 nt, synthetic construct; identical to SEQ ID NO: 15551
  modified_base 1..9485: mod_base = OTHER; note = Each t is m1f
  source 1..9485: mol_type = other RNA

SEQ ID NO: 17149 - RNA, 9503 nt, synthetic construct; identical to SEQ ID NO: 15552
  modified_base 1..9503: mod_base = OTHER; note = Each t is m1f
  source 1..9503: mol_type = other RNA

SEQ ID NO: 17150 - RNA, 9485 nt, synthetic construct; identical to SEQ ID NO: 15553
  modified_base 1..9485: mod_base = OTHER; note = Each t is m1f
  source 1..9485: mol_type = other RNA

SEQ ID NO: 17151 - RNA, 9485 nt, synthetic construct; identical to SEQ ID NO: 15554
  modified_base 1..9485: mod_base = OTHER; note = Each t is m1f
  source 1..9485: mol_type = other RNA

SEQ ID NO: 17152 - RNA, 9485 nt, synthetic construct; identical to SEQ ID NO: 15555
  modified_base 1..9485: mod_base = OTHER; note = Each t is m1f
  source 1..9485: mol_type = other RNA

SEQ ID NO: 17153 - RNA, 9485 nt, synthetic construct; identical to SEQ ID NO: 15556
  modified_base 1..9485: mod_base = OTHER; note = Each t is m1f
  source 1..9485: mol_type = other RNA

SEQ ID NO: 17154 - RNA, 9485 nt, synthetic construct; identical to SEQ ID NO: 15557
  modified_base 1..9485: mod_base = OTHER; note = Each t is m1f
  source 1..9485: mol_type = other RNA

SEQ ID NO: 17155 - RNA, 9479 nt, synthetic construct; identical to SEQ ID NO: 15558
  modified_base 1..9479: mod_base = OTHER; note = Each t is m1f
  source 1..9479: mol_type = other RNA

SEQ ID NO: 17156 - RNA, 9485 nt, synthetic construct; identical to SEQ ID NO: 15559
  modified_base 1..9485: mod_base = OTHER; note = Each t is m1f
  source 1..9485: mol_type = other RNA

SEQ ID NO: 17157 - RNA, 9485 nt, synthetic construct; identical to SEQ ID NO: 15560
  modified_base 1..9485: mod_base = OTHER; note = Each t is m1f
  source 1..9485: mol_type = other RNA

SEQ ID NO: 17158 - RNA, 9485 nt, synthetic construct; identical to SEQ ID NO: 15561
  modified_base 1..9485: mod_base = OTHER; note = Each t is m1f
  source 1..9485: mol_type = other RNA

SEQ ID NO: 17159 - RNA, 9485 nt, synthetic construct; identical to SEQ ID NO: 15562
  modified_base 1..9485: mod_base = OTHER; note = Each t is m1f
  source 1..9485: mol_type = other RNA

SEQ ID NO: 17160 - RNA, 9485 nt, synthetic construct; identical to SEQ ID NO: 15563
  modified_base 1..9485: mod_base = OTHER; note = Each t is m1f
  source 1..9485: mol_type = other RNA

SEQ ID NO: 17161 - RNA, 9485 nt, synthetic construct; identical to SEQ ID NO: 15564
  modified_base 1..9485: mod_base = OTHER; note = Each t is m1f
  source 1..9485: mol_type = other RNA

SEQ ID NO: 17162 - RNA, 9521 nt, synthetic construct; identical to SEQ ID NO: 15565
  modified_base 1..9521: mod_base = OTHER; note = Each t is m1f
  source 1..9521: mol_type = other RNA

SEQ ID NO: 17163 - RNA, 9485 nt, synthetic construct; identical to SEQ ID NO: 15566
  modified_base 1..9485: mod_base = OTHER; note = Each t is m1f
  source 1..9485: mol_type = other RNA

SEQ ID NO: 17164 - RNA, 9485 nt, synthetic construct; identical to SEQ ID NO: 15567
  modified_base 1..9485: mod_base = OTHER; note = Each t is m1f
  source 1..9485: mol_type = other RNA

SEQ ID NO: 17165 - RNA, 9485 nt, synthetic construct; identical to SEQ ID NO: 15568
  modified_base 1..9485: mod_base = OTHER; note = Each t is m1f
  source 1..9485: mol_type = other RNA

SEQ ID NO: 17166 - RNA, 9485 nt, synthetic construct; identical to SEQ ID NO: 15569
  modified_base 1..9485: mod_base = OTHER; note = Each t is m1f
  source 1..9485: mol_type = other RNA

SEQ ID NO: 17167 - RNA, 9485 nt, synthetic construct; identical to SEQ ID NO: 15570
  modified_base 1..9485: mod_base = OTHER; note = Each t is m1f
  source 1..9485: mol_type = other RNA

SEQ ID NO: 17168 - RNA, 9485 nt, synthetic construct; identical to SEQ ID NO: 15571
  modified_base 1..9485: mod_base = OTHER; note = Each t is m1f
  source 1..9485: mol_type = other RNA

SEQ ID NO: 17169 - RNA, 9485 nt, synthetic construct; identical to SEQ ID NO: 15572
  modified_base 1..9485: mod_base = OTHER; note = Each t is m1f
  source 1..9485: mol_type = other RNA

SEQ ID NO: 17170 - RNA, 9485 nt, synthetic construct; identical to SEQ ID NO: 15573
  modified_base 1..9485: mod_base = OTHER; note = Each t is m1f
  source 1..9485: mol_type = other RNA

SEQ ID NO: 17171 - RNA, 9485 nt, synthetic construct; identical to SEQ ID NO: 15574
  modified_base 1..9485: mod_base = OTHER; note = Each t is m1f
  source 1..9485: mol_type = other RNA

SEQ ID NO: 17172 - RNA, 9485 nt, synthetic construct; identical to SEQ ID NO: 15575
  modified_base 1..9485: mod_base = OTHER; note = Each t is m1f
  source 1..9485: mol_type = other RNA

SEQ ID NO: 17173 - RNA, 9485 nt, synthetic construct; identical to SEQ ID NO: 15576
  modified_base 1..9485: mod_base = OTHER; note = Each t is m1f
  source 1..9485: mol_type = other RNA

SEQ ID NO: 17174 - RNA, 9485 nt, synthetic construct; identical to SEQ ID NO: 15577
  modified_base 1..9485: mod_base = OTHER; note = Each t is m1f
  source 1..9485: mol_type = other RNA

SEQ ID NO: 17175 - RNA, 9485 nt, synthetic construct; identical to SEQ ID NO: 15578
  modified_base 1..9485: mod_base = OTHER; note = Each t is m1f
  source 1..9485: mol_type = other RNA

SEQ ID NO: 17176 - RNA, 9485 nt, synthetic construct; identical to SEQ ID NO: 15579
  modified_base 1..9485: mod_base = OTHER; note = Each t is m1f
  source 1..9485: mol_type = other RNA

SEQ ID NO: 17177 - RNA, 9485 nt, synthetic construct; identical to SEQ ID NO: 15580
  modified_base 1..9485: mod_base = OTHER; note = Each t is m1f
  source 1..9485: mol_type = other RNA

SEQ ID NO: 17178 - RNA, 9485 nt, synthetic construct; identical to SEQ ID NO: 15581
  modified_base 1..9485: mod_base = OTHER; note = Each t is m1f
  source 1..9485: mol_type = other RNA

SEQ ID NO: 17179 - RNA, 9485 nt, synthetic construct; identical to SEQ ID NO: 15582
  modified_base 1..9485: mod_base = OTHER; note = Each t is m1f
  source 1..9485: mol_type = other RNA

SEQ ID NO: 17180 - RNA, 9485 nt, synthetic construct; identical to SEQ ID NO: 15583
  modified_base 1..9485: mod_base = OTHER; note = Each t is m1f
  source 1..9485: mol_type = other RNA

SEQ ID NO: 17181 - RNA, 9485 nt, synthetic construct; identical to SEQ ID NO: 15584
  modified_base 1..9485: mod_base = OTHER; note = Each t is m1f
  source 1..9485: mol_type = other RNA

SEQ ID NO: 17182 - RNA, 9485 nt, synthetic construct; identical to SEQ ID NO: 15585
  modified_base 1..9485: mod_base = OTHER; note = Each t is m1f
  source 1..9485: mol_type = other RNA

SEQ ID NO: 17183 - RNA, 9485 nt, synthetic construct; identical to SEQ ID NO: 15586
  modified_base 1..9485: mod_base = OTHER; note = Each t is m1f
  source 1..9485: mol_type = other RNA

SEQ ID NO: 17184 - RNA, 9485 nt, synthetic construct; identical to SEQ ID NO: 15587
  modified_base 1..9485: mod_base = OTHER; note = Each t is m1f
  source 1..9485: mol_type = other RNA

SEQ ID NO: 17185 - RNA, 9485 nt, synthetic construct; identical to SEQ ID NO: 15588
  modified_base 1..9485: mod_base = OTHER; note = Each t is m1f
  source 1..9485: mol_type = other RNA

SEQ ID NO: 17186 - RNA, 9485 nt, synthetic construct; identical to SEQ ID NO: 15589
  modified_base 1..9485: mod_base = OTHER; note = Each t is m1f
  source 1..9485: mol_type = other RNA

SEQ ID NO: 17187 - RNA, 9485 nt, synthetic construct; identical to SEQ ID NO: 15590
  modified_base 1..9485: mod_base = OTHER; note = Each t is m1f
  source 1..9485: mol_type = other RNA

SEQ ID NO: 17188 - RNA, 9485 nt, synthetic construct; identical to SEQ ID NO: 15591
  modified_base 1..9485: mod_base = OTHER; note = Each t is m1f
  source 1..9485: mol_type = other RNA

SEQ ID NO: 17189 - RNA, 9485 nt, synthetic construct; identical to SEQ ID NO: 15592
  modified_base 1..9485: mod_base = OTHER; note = Each t is m1f
  source 1..9485: mol_type = other RNA

SEQ ID NO: 17190 - RNA, 9485 nt, synthetic construct; identical to SEQ ID NO: 15593
  modified_base 1..9485: mod_base = OTHER; note = Each t is m1f
  source 1..9485: mol_type = other RNA

SEQ ID NO: 17191 - RNA, 9485 nt, synthetic construct; identical to SEQ ID NO: 15594
  modified_base 1..9485: mod_base = OTHER; note = Each t is m1f
  source 1..9485: mol_type = other RNA

SEQ ID NO: 17192 - RNA, 9485 nt, synthetic construct; identical to SEQ ID NO: 15595
  modified_base 1..9485: mod_base = OTHER; note = Each t is m1f
  source 1..9485: mol_type = other RNA

SEQ ID NO: 17193 - RNA, 9485 nt, synthetic construct; identical to SEQ ID NO: 15596
  modified_base 1..9485: mod_base = OTHER; note = Each t is m1f
  source 1..9485: mol_type = other RNA

SEQ ID NO: 17194 - RNA, 9485 nt, synthetic construct; identical to SEQ ID NO: 15597
  modified_base 1..9485: mod_base = OTHER; note = Each t is m1f
  source 1..9485: mol_type = other RNA

SEQ ID NO: 17195 - RNA, 9521 nt, synthetic construct; identical to SEQ ID NO: 15598
  modified_base 1..9521: mod_base = OTHER; note = Each t is m1f
  source 1..9521: mol_type = other RNA

SEQ ID NO: 17196 - RNA, 9485 nt, synthetic construct; identical to SEQ ID NO: 15599
  modified_base 1..9485: mod_base = OTHER; note = Each t is m1f
  source 1..9485: mol_type = other RNA

SEQ ID NO: 17197 - RNA, 9485 nt, synthetic construct; identical to SEQ ID NO: 15600
  modified_base 1..9485: mod_base = OTHER; note = Each t is m1f
  source 1..9485: mol_type = other RNA

SEQ ID NO: 17198 - RNA, 9485 nt, synthetic construct; identical to SEQ ID NO: 15601
  modified_base 1..9485: mod_base = OTHER; note = Each t is m1f
  source 1..9485: mol_type = other RNA

SEQ ID NO: 17199 - RNA, 9485 nt, synthetic construct; identical to SEQ ID NO: 15602
  modified_base 1..9485: mod_base = OTHER; note = Each t is m1f
  source 1..9485: mol_type = other RNA

SEQ ID NO: 17200 - RNA, 9485 nt, synthetic construct; identical to SEQ ID NO: 15603
  modified_base 1..9485: mod_base = OTHER; note = Each t is m1f
  source 1..9485: mol_type = other RNA

SEQ ID NO: 17201 - RNA, 9485 nt, synthetic construct; identical to SEQ ID NO: 15604
  modified_base 1..9485: mod_base = OTHER; note = Each t is m1f
  source 1..9485: mol_type = other RNA

SEQ ID NO: 17202 - RNA, 9485 nt, synthetic construct; identical to SEQ ID NO: 15605
  modified_base 1..9485: mod_base = OTHER; note = Each t is m1f
  source 1..9485: mol_type = other RNA

SEQ ID NO: 17203 - RNA, 9485 nt, synthetic construct; identical to SEQ ID NO: 15606
  modified_base 1..9485: mod_base = OTHER; note = Each t is m1f
  source 1..9485: mol_type = other RNA

SEQ ID NO: 17204 - RNA, 9503 nt, synthetic construct; identical to SEQ ID NO: 15607
  modified_base 1..9503: mod_base = OTHER; note = Each t is m1f
  source 1..9503: mol_type = other RNA

SEQ ID NO: 17205 - RNA, 9485 nt, synthetic construct; identical to SEQ ID NO: 15608
  modified_base 1..9485: mod_base = OTHER; note = Each t is m1f
  source 1..9485: mol_type = other RNA

SEQ ID NO: 17206 - RNA, 9485 nt, synthetic construct; identical to SEQ ID NO: 15609
  modified_base 1..9485: mod_base = OTHER; note = Each t is m1f
  source 1..9485: mol_type = other RNA

SEQ ID NO: 17207 - RNA, 9485 nt, synthetic construct; identical to SEQ ID NO: 15610
  modified_base 1..9485: mod_base = OTHER; note = Each t is m1f
  source 1..9485: mol_type = other RNA

SEQ ID NO: 17208 - RNA, 9485 nt, synthetic construct; identical to SEQ ID NO: 15611
  modified_base 1..9485: mod_base = OTHER; note = Each t is m1f
  source 1..9485: mol_type = other RNA

SEQ ID NO: 17209 - RNA, 9485 nt, synthetic construct; identical to SEQ ID NO: 15612
  modified_base 1..9485: mod_base = OTHER; note = Each t is m1f
  source 1..9485: mol_type = other RNA

SEQ ID NO: 17210 - RNA, 9485 nt, synthetic construct; identical to SEQ ID NO: 15613
  modified_base 1..9485: mod_base = OTHER; note = Each t is m1f
  source 1..9485: mol_type = other RNA

SEQ ID NO: 17211 - RNA, 9485 nt, synthetic construct; identical to SEQ ID NO: 15614
  modified_base 1..9485: mod_base = OTHER; note = Each t is m1f
  source 1..9485: mol_type = other RNA

SEQ ID NO: 17212 - RNA, 9479 nt, synthetic construct; identical to SEQ ID NO: 15615
  modified_base 1..9479: mod_base = OTHER; note = Each t is m1f
  source 1..9479: mol_type = other RNA

SEQ ID NO: 17213 - RNA, 9485 nt, synthetic construct; identical to SEQ ID NO: 15616
  modified_base 1..9485: mod_base = OTHER; note = Each t is m1f
  source 1..9485: mol_type = other RNA

SEQ ID NO: 17214 - RNA, 9485 nt, synthetic construct; identical to SEQ ID NO: 15617
  modified_base 1..9485: mod_base = OTHER; note = Each t is m1f
  source 1..9485: mol_type = other RNA

SEQ ID NO: 17215 - RNA, 9485 nt, synthetic construct; identical to SEQ ID NO: 15618
  modified_base 1..9485: mod_base = OTHER; note = Each t is m1f
  source 1..9485: mol_type = other RNA

SEQ ID NO: 17216 - RNA, 9485 nt, synthetic construct; identical to SEQ ID NO: 15619
  modified_base 1..9485: mod_base = OTHER; note = Each t is m1f
  source 1..9485: mol_type = other RNA

SEQ ID NO: 17217 - RNA, 9485 nt, synthetic construct; identical to SEQ ID NO: 15620
  modified_base 1..9485: mod_base = OTHER; note = Each t is m1f
  source 1..9485: mol_type = other RNA

SEQ ID NO: 17218 - RNA, 9485 nt, synthetic construct; identical to SEQ ID NO: 15621
  modified_base 1..9485: mod_base = OTHER; note = Each t is m1f
  source 1..9485: mol_type = other RNA

SEQ ID NO: 17219 - RNA, 9485 nt, synthetic construct; identical to SEQ ID NO: 15622
  modified_base 1..9485: mod_base = OTHER; note = Each t is m1f
  source 1..9485: mol_type = other RNA

SEQ ID NO: 17220 - RNA, 9485 nt, synthetic construct; identical to SEQ ID NO: 15623
  modified_base 1..9485: mod_base = OTHER; note = Each t is m1f
  source 1..9485: mol_type = other RNA

SEQ ID NO: 17221 - RNA, 9485 nt, synthetic construct; identical to SEQ ID NO: 15624
  modified_base 1..9485: mod_base = OTHER; note = Each t is m1f
  source 1..9485: mol_type = other RNA

SEQ ID NO: 17222 - RNA, 9485 nt, synthetic construct; identical to SEQ ID NO: 15625
  modified_base 1..9485: mod_base = OTHER; note = Each t is m1f
  source 1..9485: mol_type = other RNA

SEQ ID NO: 17223 - RNA, 9485 nt, synthetic construct; identical to SEQ ID NO: 15626
  modified_base 1..9485: mod_base = OTHER; note = Each t is m1f
  source 1..9485: mol_type = other RNA

SEQ ID NO: 17224 - RNA, 9485 nt, synthetic construct; identical to SEQ ID NO: 15627
  modified_base 1..9485: mod_base = OTHER; note = Each t is m1f
  source 1..9485: mol_type = other RNA

SEQ ID NO: 17225 - RNA, 9485 nt, synthetic construct; identical to SEQ ID NO: 15628
  modified_base 1..9485: mod_base = OTHER; note = Each t is m1f
  source 1..9485: mol_type = other RNA

SEQ ID NO: 17226 - RNA, 9485 nt, synthetic construct; identical to SEQ ID NO: 15629
  modified_base 1..9485: mod_base = OTHER; note = Each t is m1f
  source 1..9485: mol_type = other RNA

SEQ ID NO: 17227 - RNA, 9485 nt, synthetic construct; identical to SEQ ID NO: 15630
  modified_base 1..9485: mod_base = OTHER; note = Each t is m1f
  source 1..9485: mol_type = other RNA

SEQ ID NO: 17228 - RNA, 9485 nt, synthetic construct; identical to SEQ ID NO: 15631
  modified_base 1..9485: mod_base = OTHER; note = Each t is m1f
  source 1..9485: mol_type = other RNA

SEQ ID NO: 17229 - RNA, 9485 nt, synthetic construct; identical to SEQ ID NO: 15632
  modified_base 1..9485: mod_base = OTHER; note = Each t is m1f
  source 1..9485: mol_type = other RNA

SEQ ID NO: 17230 - RNA, 9485 nt, synthetic construct; identical to SEQ ID NO: 15633
  modified_base 1..9485: mod_base = OTHER; note = Each t is m1f
  source 1..9485: mol_type = other RNA

SEQ ID NO: 17231 - RNA, 9485 nt, synthetic construct; identical to SEQ ID NO: 15634
  modified_base 1..9485: mod_base = OTHER; note = Each t is m1f
  source 1..9485: mol_type = other RNA

SEQ ID NO: 17232 - RNA, 9485 nt, synthetic construct; identical to SEQ ID NO: 15635
  modified_base 1..9485: mod_base = OTHER; note = Each t is m1f
  source 1..9485: mol_type = other RNA

SEQ ID NO: 17233 - RNA, 9485 nt, synthetic construct; identical to SEQ ID NO: 15636
  modified_base 1..9485: mod_base = OTHER; note = Each t is m1f
  source 1..9485: mol_type = other RNA

SEQ ID NO: 17234 - RNA, 9485 nt, synthetic construct; identical to SEQ ID NO: 15637
  modified_base 1..9485: mod_base = OTHER; note = Each t is m1f
  source 1..9485: mol_type = other RNA

SEQ ID NO: 17235 - RNA, 9485 nt, synthetic construct; identical to SEQ ID NO: 15638
  modified_base 1..9485: mod_base = OTHER; note = Each t is m1f
  source 1..9485: mol_type = other RNA

SEQ ID NO: 17236 - RNA, 9485 nt, synthetic construct; identical to SEQ ID NO: 15639
  modified_base 1..9485: mod_base = OTHER; note = Each t is m1f
  source 1..9485: mol_type = other RNA

SEQ ID NO: 17237 - RNA, 9485 nt, synthetic construct; identical to SEQ ID NO: 15640
  modified_base 1..9485: mod_base = OTHER; note = Each t is m1f
  source 1..9485: mol_type = other RNA

SEQ ID NO: 17238 - RNA, 9485 nt, synthetic construct; identical to SEQ ID NO: 15641
  modified_base 1..9485: mod_base = OTHER; note = Each t is m1f
  source 1..9485: mol_type = other RNA

SEQ ID NO: 17239 - RNA, 9485 nt, synthetic construct; identical to SEQ ID NO: 15642
  modified_base 1..9485: mod_base = OTHER; note = Each t is m1f
  source 1..9485: mol_type = other RNA

SEQ ID NO: 17240 - RNA, 9485 nt, synthetic construct; identical to SEQ ID NO: 15643
  modified_base 1..9485: mod_base = OTHER; note = Each t is m1f
  source 1..9485: mol_type = other RNA

SEQ ID NO: 17241 - RNA, 9485 nt, synthetic construct; identical to SEQ ID NO: 15644
  modified_base 1..9485: mod_base = OTHER; note = Each t is m1f
  source 1..9485: mol_type = other RNA

SEQ ID NO: 17242 - RNA, 9485 nt, synthetic construct; identical to SEQ ID NO: 15645
  modified_base 1..9485: mod_base = OTHER; note = Each t is m1f
  source 1..9485: mol_type = other RNA

SEQ ID NO: 17243 - RNA, 9485 nt, synthetic construct; identical to SEQ ID NO: 15646
  modified_base 1..9485: mod_base = OTHER; note = Each t is m1f
  source 1..9485: mol_type = other RNA

SEQ ID NO: 17244 - RNA, 9485 nt, synthetic construct; identical to SEQ ID NO: 15647
  modified_base 1..9485: mod_base = OTHER; note = Each t is m1f
  source 1..9485: mol_type = other RNA

SEQ ID NO: 17245 - RNA, 9485 nt, synthetic construct; identical to SEQ ID NO: 15648
  modified_base 1..9485: mod_base = OTHER; note = Each t is m1f
  source 1..9485: mol_type = other RNA

SEQ ID NO: 17246 - RNA, 9557 nt, synthetic construct; identical to SEQ ID NO: 15649
  modified_base 1..9557: mod_base = OTHER; note = Each t is m1f
  source 1..9557: mol_type = other RNA

SEQ ID NO: 17247 - RNA, 9485 nt, synthetic construct; identical to SEQ ID NO: 15650
  modified_base 1..9485: mod_base = OTHER; note = Each t is m1f
  source 1..9485: mol_type = other RNA

SEQ ID NO: 17248 - RNA, 9485 nt, synthetic construct; identical to SEQ ID NO: 15651
  modified_base 1..9485: mod_base = OTHER; note = Each t is m1f
  source 1..9485: mol_type = other RNA

SEQ ID NO: 17249 - RNA, 9485 nt, synthetic construct; identical to SEQ ID NO: 15652
  modified_base 1..9485: mod_base = OTHER; note = Each t is m1f
  source 1..9485: mol_type = other RNA

SEQ ID NO: 17250 - RNA, 9485 nt, synthetic construct; identical to SEQ ID NO: 15653
  modified_base 1..9485: mod_base = OTHER; note = Each t is m1f
  source 1..9485: mol_type = other RNA

SEQ ID NO: 17251 - RNA, 9485 nt, synthetic construct; identical to SEQ ID NO: 15654
  modified_base 1..9485: mod_base = OTHER; note = Each t is m1f
  source 1..9485: mol_type = other RNA

SEQ ID NO: 17252 - RNA, 9485 nt, synthetic construct; identical to SEQ ID NO: 15655
  modified_base 1..9485: mod_base = OTHER; note = Each t is m1f
  source 1..9485: mol_type = other RNA

SEQ ID NO: 17253 - RNA, 9485 nt, synthetic construct; identical to SEQ ID NO: 15656
  modified_base 1..9485: mod_base = OTHER; note = Each t is m1f
  source 1..9485: mol_type = other RNA

SEQ ID NO: 17254 - RNA, 9485 nt, synthetic construct; identical to SEQ ID NO: 15657
  modified_base 1..9485: mod_base = OTHER; note = Each t is m1f
  source 1..9485: mol_type = other RNA

SEQ ID NO: 17255 - RNA, 9485 nt, synthetic construct; identical to SEQ ID NO: 15658
  modified_base 1..9485: mod_base = OTHER; note = Each t is m1f
  source 1..9485: mol_type = other RNA

SEQ ID NO: 17256 - RNA, 9485 nt, synthetic construct; identical to SEQ ID NO: 15659
  modified_base 1..9485: mod_base = OTHER; note = Each t is m1f
  source 1..9485: mol_type = other RNA

SEQ ID NO: 17257 - RNA, 9485 nt, synthetic construct; identical to SEQ ID NO: 15660
  modified_base 1..9485: mod_base = OTHER; note = Each t is m1f
  source 1..9485: mol_type = other RNA

SEQ ID NO: 17258 - RNA, 9485 nt, synthetic construct; identical to SEQ ID NO: 15661
  modified_base 1..9485: mod_base = OTHER; note = Each t is m1f
  source 1..9485: mol_type = other RNA

SEQ ID NO: 17259 - RNA, 9485 nt, synthetic construct; identical to SEQ ID NO: 15662
  modified_base 1..9485: mod_base = OTHER; note = Each t is m1f
  source 1..9485: mol_type = other RNA

SEQ ID NO: 17260 - RNA, 9485 nt, synthetic construct; identical to SEQ ID NO: 15663
  modified_base 1..9485: mod_base = OTHER; note = Each t is m1f
  source 1..9485: mol_type = other RNA

SEQ ID NO: 17261 - RNA, 9485 nt, synthetic construct; identical to SEQ ID NO: 15664
  modified_base 1..9485: mod_base = OTHER; note = Each t is m1f
  source 1..9485: mol_type = other RNA

SEQ ID NO: 17262 - RNA, 9485 nt, synthetic construct; identical to SEQ ID NO: 15665
  modified_base 1..9485: mod_base = OTHER; note = Each t is m1f
  source 1..9485: mol_type = other RNA

SEQ ID NO: 17263 - RNA, 9485 nt, synthetic construct; identical to SEQ ID NO: 15666
  modified_base 1..9485: mod_base = OTHER; note = Each t is m1f
  source 1..9485: mol_type = other RNA

SEQ ID NO: 17264 - RNA, 9485 nt, synthetic construct; identical to SEQ ID NO: 15667
  modified_base 1..9485: mod_base = OTHER; note = Each t is m1f
  source 1..9485: mol_type = other RNA

SEQ ID NO: 17265 - RNA, 9485 nt, synthetic construct; identical to SEQ ID NO: 15668
  modified_base 1..9485: mod_base = OTHER; note = Each t is m1f
  source 1..9485: mol_type = other RNA

SEQ ID NO: 17266 - RNA, 9485 nt, synthetic construct; identical to SEQ ID NO: 15669
  modified_base 1..9485: mod_base = OTHER; note = Each t is m1f
  source 1..9485: mol_type = other RNA

SEQ ID NO: 17267 - RNA, 9485 nt, synthetic construct; identical to SEQ ID NO: 15670
  modified_base 1..9485: mod_base = OTHER; note = Each t is m1f
  source 1..9485: mol_type = other RNA

SEQ ID NO: 17268 - RNA, 9485 nt, synthetic construct; identical to SEQ ID NO: 15671
  modified_base 1..9485: mod_base = OTHER; note = Each t is m1f
  source 1..9485: mol_type = other RNA

SEQ ID NO: 17269 - RNA, 9485 nt, synthetic construct; identical to SEQ ID NO: 15672
  modified_base 1..9485: mod_base = OTHER; note = Each t is m1f
  source 1..9485: mol_type = other RNA

SEQ ID NO: 17270 - RNA, 9485 nt, synthetic construct; identical to SEQ ID NO: 15673
  modified_base 1..9485: mod_base = OTHER; note = Each t is m1f
  source 1..9485: mol_type = other RNA

SEQ ID NO: 17271 - RNA, 9485 nt, synthetic construct; identical to SEQ ID NO: 15674
  modified_base 1..9485: mod_base = OTHER; note = Each t is m1f
  source 1..9485: mol_type = other RNA

SEQ ID NO: 17272 - RNA, 9485 nt, synthetic construct; identical to SEQ ID NO: 15675
  modified_base 1..9485: mod_base = OTHER; note = Each t is m1f
  source 1..9485: mol_type = other RNA

SEQ ID NO: 17273 - RNA, 9485 nt, synthetic construct; identical to SEQ ID NO: 15676
  modified_base 1..9485: mod_base = OTHER; note = Each t is m1f
  source 1..9485: mol_type = other RNA

SEQ ID NO: 17274 - RNA, 9485 nt, synthetic construct; identical to SEQ ID NO: 15677
  modified_base 1..9485: mod_base = OTHER; note = Each t is m1f
  source 1..9485: mol_type = other RNA

SEQ ID NO: 17275 - RNA, 9485 nt, synthetic construct; identical to SEQ ID NO: 15678
  modified_base 1..9485: mod_base = OTHER; note = Each t is m1f
  source 1..9485: mol_type = other RNA

SEQ ID NO: 17276 - RNA, 9485 nt, synthetic construct; identical to SEQ ID NO: 15679
  modified_base 1..9485: mod_base = OTHER; note = Each t is m1f
  source 1..9485: mol_type = other RNA

SEQ ID NO: 17277 - RNA, 9485 nt, synthetic construct; identical to SEQ ID NO: 15680
  modified_base 1..9485: mod_base = OTHER; note = Each t is m1f
  source 1..9485: mol_type = other RNA

SEQ ID NO: 17278 - RNA, 9485 nt, synthetic construct; identical to SEQ ID NO: 15681
  modified_base 1..9485: mod_base = OTHER; note = Each t is m1f
  source 1..9485: mol_type = other RNA

SEQ ID NO: 17279 - RNA, 9485 nt, synthetic construct; identical to SEQ ID NO: 15682
  modified_base 1..9485: mod_base = OTHER; note = Each t is m1f
  source 1..9485: mol_type = other RNA

SEQ ID NO: 17280 - RNA, 9485 nt, synthetic construct; identical to SEQ ID NO: 15683
  modified_base 1..9485: mod_base = OTHER; note = Each t is m1f
  source 1..9485: mol_type = other RNA

SEQ ID NO: 17281 - RNA, 9485 nt, synthetic construct; identical to SEQ ID NO: 15684
  modified_base 1..9485: mod_base = OTHER; note = Each t is m1f
  source 1..9485: mol_type = other RNA

SEQ ID NO: 17282 - RNA, 9485 nt, synthetic construct; identical to SEQ ID NO: 15685
  modified_base 1..9485: mod_base = OTHER; note = Each t is m1f
  source 1..9485: mol_type = other RNA

SEQ ID NO: 17283 - RNA, 9485 nt, synthetic construct; identical to SEQ ID NO: 15686
  modified_base 1..9485: mod_base = OTHER; note = Each t is m1f
  source 1..9485: mol_type = other RNA

SEQ ID NO: 17284 - RNA, 9485 nt, synthetic construct; identical to SEQ ID NO: 15687
  modified_base 1..9485: mod_base = OTHER; note = Each t is m1f
  source 1..9485: mol_type = other RNA

SEQ ID NO: 17285 - RNA, 9485 nt, synthetic construct; identical to SEQ ID NO: 15688
  modified_base 1..9485: mod_base = OTHER; note = Each t is m1f
  source 1..9485: mol_type = other RNA

SEQ ID NO: 17286 - RNA, 9485 nt, synthetic construct; identical to SEQ ID NO: 15689
  modified_base 1..9485: mod_base = OTHER; note = Each t is m1f
  source 1..9485: mol_type = other RNA

SEQ ID NO: 17287 - RNA, 9485 nt, synthetic construct; identical to SEQ ID NO: 15690
  modified_base 1..9485: mod_base = OTHER; note = Each t is m1f
  source 1..9485: mol_type = other RNA

SEQ ID NO: 17288 - RNA, 9485 nt, synthetic construct; identical to SEQ ID NO: 15691
  modified_base 1..9485: mod_base = OTHER; note = Each t is m1f
  source 1..9485: mol_type = other RNA

SEQ ID NO: 17289 - RNA, 9485 nt, synthetic construct; identical to SEQ ID NO: 15692
  modified_base 1..9485: mod_base = OTHER; note = Each t is m1f
  source 1..9485: mol_type = other RNA

SEQ ID NO: 17290 - RNA, 9485 nt, synthetic construct; identical to SEQ ID NO: 15693
  modified_base 1..9485: mod_base = OTHER; note = Each t is m1f
  source 1..9485: mol_type = other RNA

SEQ ID NO: 17291 - RNA, 9485 nt, synthetic construct; identical to SEQ ID NO: 15694
  modified_base 1..9485: mod_base = OTHER; note = Each t is m1f
  source 1..9485: mol_type = other RNA

SEQ ID NO: 17292 - RNA, 9485 nt, synthetic construct; identical to SEQ ID NO: 15695
  modified_base 1..9485: mod_base = OTHER; note = Each t is m1f
  source 1..9485: mol_type = other RNA

SEQ ID NO: 17293 - RNA, 9503 nt, synthetic construct; identical to SEQ ID NO: 15696
  modified_base 1..9503: mod_base = OTHER; note = Each t is m1f
  source 1..9503: mol_type = other RNA

SEQ ID NO: 17294 - RNA, 9485 nt, synthetic construct; identical to SEQ ID NO: 15697
  modified_base 1..9485: mod_base = OTHER; note = Each t is m1f
  source 1..9485: mol_type = other RNA

SEQ ID NO: 17295 - RNA, 9485 nt, synthetic construct; identical to SEQ ID NO: 15698
  modified_base 1..9485: mod_base = OTHER; note = Each t is m1f
  source 1..9485: mol_type = other RNA

SEQ ID NO: 17296 - RNA, 9485 nt, synthetic construct; identical to SEQ ID NO: 15699
  modified_base 1..9485: mod_base = OTHER; note = Each t is m1f
  source 1..9485: mol_type = other RNA

SEQ ID NO: 17297 - RNA, 9485 nt, synthetic construct; identical to SEQ ID NO: 15700
  modified_base 1..9485: mod_base = OTHER; note = Each t is m1f
  source 1..9485: mol_type = other RNA

SEQ ID NO: 17298 - RNA, 9485 nt, synthetic construct; identical to SEQ ID NO: 15701
  modified_base 1..9485: mod_base = OTHER; note = Each t is m1f
  source 1..9485: mol_type = other RNA

SEQ ID NO: 17299 - RNA, 9485 nt, synthetic construct; identical to SEQ ID NO: 15702
  modified_base 1..9485: mod_base = OTHER; note = Each t is m1f
  source 1..9485: mol_type = other RNA

SEQ ID NO: 17300 - RNA, 9485 nt, synthetic construct; identical to SEQ ID NO: 15703
  modified_base 1..9485: mod_base = OTHER; note = Each t is m1f
  source 1..9485: mol_type = other RNA

SEQ ID NO: 17301 - RNA, 9485 nt, synthetic construct; identical to SEQ ID NO: 15704
  modified_base 1..9485: mod_base = OTHER; note = Each t is m1f
  source 1..9485: mol_type = other RNA

SEQ ID NO: 17302 - RNA, 9485 nt, synthetic construct; identical to SEQ ID NO: 15705
  modified_base 1..9485: mod_base = OTHER; note = Each t is m1f
  source 1..9485: mol_type = other RNA

SEQ ID NO: 17303 - RNA, 9485 nt, synthetic construct; identical to SEQ ID NO: 15706
  modified_base 1..9485: mod_base = OTHER; note = Each t is m1f
  source 1..9485: mol_type = other RNA

SEQ ID NO: 17304 - RNA, 9485 nt, synthetic construct; identical to SEQ ID NO: 15707
  modified_base 1..9485: mod_base = OTHER; note = Each t is m1f
  source 1..9485: mol_type = other RNA

SEQ ID NO: 17305 - RNA, 9485 nt, synthetic construct; identical to SEQ ID NO: 15708
  modified_base 1..9485: mod_base = OTHER; note = Each t is m1f
  source 1..9485: mol_type = other RNA

SEQ ID NO: 17306 - RNA, 9485 nt, synthetic construct; identical to SEQ ID NO: 15709
  modified_base 1..9485: mod_base = OTHER; note = Each t is m1f
  source 1..9485: mol_type = other RNA

SEQ ID NO: 17307 - RNA, 9485 nt, synthetic construct; identical to SEQ ID NO: 15710
  modified_base 1..9485: mod_base = OTHER; note = Each t is m1f
  source 1..9485: mol_type = other RNA

SEQ ID NO: 17308 - RNA, 9485 nt, synthetic construct; identical to SEQ ID NO: 15711
  modified_base 1..9485: mod_base = OTHER; note = Each t is m1f
  source 1..9485: mol_type = other RNA

SEQ ID NO: 17309 - RNA, 9485 nt, synthetic construct; identical to SEQ ID NO: 15712
  modified_base 1..9485: mod_base = OTHER; note = Each t is m1f
  source 1..9485: mol_type = other RNA

SEQ ID NO: 17310 - RNA, 9485 nt, synthetic construct; identical to SEQ ID NO: 15713
  modified_base 1..9485: mod_base = OTHER; note = Each t is m1f
  source 1..9485: mol_type = other RNA

SEQ ID NO: 17311 - RNA, 9485 nt, synthetic construct; identical to SEQ ID NO: 15714
  modified_base 1..9485: mod_base = OTHER; note = Each t is m1f
  source 1..9485: mol_type = other RNA

SEQ ID NO: 17312 - RNA, 9485 nt, synthetic construct; identical to SEQ ID NO: 15715
  modified_base 1..9485: mod_base = OTHER; note = Each t is m1f
  source 1..9485: mol_type = other RNA

SEQ ID NO: 17313 - RNA, 9485 nt, synthetic construct; identical to SEQ ID NO: 15716
  modified_base 1..9485: mod_base = OTHER; note = Each t is m1f
  source 1..9485: mol_type = other RNA

SEQ ID NO: 17314 - RNA, 9485 nt, synthetic construct; identical to SEQ ID NO: 15717
  modified_base 1..9485: mod_base = OTHER; note = Each t is m1f
  source 1..9485: mol_type = other RNA

SEQ ID NO: 17315 - RNA, 9485 nt, synthetic construct; identical to SEQ ID NO: 15718
  modified_base 1..9485: mod_base = OTHER; note = Each t is m1f
  source 1..9485: mol_type = other RNA

SEQ ID NO: 17316 - RNA, 9485 nt, synthetic construct; identical to SEQ ID NO: 15719
  modified_base 1..9485: mod_base = OTHER; note = Each t is m1f
  source 1..9485: mol_type = other RNA

SEQ ID NO: 17317 - RNA, 9485 nt, synthetic construct; identical to SEQ ID NO: 15720
  modified_base 1..9485: mod_base = OTHER; note = Each t is m1f
  source 1..9485: mol_type = other RNA

SEQ ID NO: 17318 - RNA, 9485 nt, synthetic construct; identical to SEQ ID NO: 15721
  modified_base 1..9485: mod_base = OTHER; note = Each t is m1f
  source 1..9485: mol_type = other RNA

SEQ ID NO: 17319 - RNA, 9485 nt, synthetic construct; identical to SEQ ID NO: 15722
  modified_base 1..9485: mod_base = OTHER; note = Each t is m1f
  source 1..9485: mol_type = other RNA

SEQ ID NO: 17320 - RNA, 9485 nt, synthetic construct; identical to SEQ ID NO: 15723
  modified_base 1..9485: mod_base = OTHER; note = Each t is m1f
  source 1..9485: mol_type = other RNA

SEQ ID NO: 17321 - RNA, 9485 nt, synthetic construct; identical to SEQ ID NO: 15724
  modified_base 1..9485: mod_base = OTHER; note = Each t is m1f
  source 1..9485: mol_type = other RNA

SEQ ID NO: 17322 - RNA, 9485 nt, synthetic construct; identical to SEQ ID NO: 15725
  modified_base 1..9485: mod_base = OTHER; note = Each t is m1f
  source 1..9485: mol_type = other RNA

SEQ ID NO: 17323 - RNA, 9485 nt, synthetic construct; identical to SEQ ID NO: 15726
  modified_base 1..9485: mod_base = OTHER; note = Each t is m1f
  source 1..9485: mol_type = other RNA

SEQ ID NO: 17324 - RNA, 9485 nt, synthetic construct; identical to SEQ ID NO: 15727
  modified_base 1..9485: mod_base = OTHER; note = Each t is m1f
  source 1..9485: mol_type = other RNA

SEQ ID NO: 17325 - RNA, 9485 nt, synthetic construct; identical to SEQ ID NO: 15728
  modified_base 1..9485: mod_base = OTHER; note = Each t is m1f
  source 1..9485: mol_type = other RNA

SEQ ID NO: 17326 - RNA, 9485 nt, synthetic construct; identical to SEQ ID NO: 15729
  modified_base 1..9485: mod_base = OTHER; note = Each t is m1f
  source 1..9485: mol_type = other RNA

SEQ ID NO: 17327 - RNA, 9485 nt, synthetic construct; identical to SEQ ID NO: 15730
  modified_base 1..9485: mod_base = OTHER; note = Each t is m1f
  source 1..9485: mol_type = other RNA

SEQ ID NO: 17328 - RNA, 9485 nt, synthetic construct; identical to SEQ ID NO: 15731
  modified_base 1..9485: mod_base = OTHER; note = Each t is m1f
  source 1..9485: mol_type = other RNA

SEQ ID NO: 17329 - RNA, 9485 nt, synthetic construct; identical to SEQ ID NO: 15732
  modified_base 1..9485: mod_base = OTHER; note = Each t is m1f
  source 1..9485: mol_type = other RNA

SEQ ID NO: 17330 - RNA, 9485 nt, synthetic construct; identical to SEQ ID NO: 15733
  modified_base 1..9485: mod_base = OTHER; note = Each t is m1f
  source 1..9485: mol_type = other RNA

SEQ ID NO: 17331 - RNA, 9485 nt, synthetic construct; identical to SEQ ID NO: 15734
  modified_base 1..9485: mod_base = OTHER; note = Each t is m1f
  source 1..9485: mol_type = other RNA

SEQ ID NO: 17332 - RNA, 9485 nt, synthetic construct; identical to SEQ ID NO: 15735
  modified_base 1..9485: mod_base = OTHER; note = Each t is m1f
  source 1..9485: mol_type = other RNA

SEQ ID NO: 17333 - RNA, 9485 nt, synthetic construct; identical to SEQ ID NO: 15736
  modified_base 1..9485: mod_base = OTHER; note = Each t is m1f
  source 1..9485: mol_type = other RNA

SEQ ID NO: 17334 - RNA, 9485 nt, synthetic construct; identical to SEQ ID NO: 15737
  modified_base 1..9485: mod_base = OTHER; note = Each t is m1f
  source 1..9485: mol_type = other RNA

SEQ ID NO: 17335 - RNA, 9485 nt, synthetic construct; identical to SEQ ID NO: 15738
  modified_base 1..9485: mod_base = OTHER; note = Each t is m1f
  source 1..9485: mol_type = other RNA

SEQ ID NO: 17336 - RNA, 9485 nt, synthetic construct; identical to SEQ ID NO: 15739
  modified_base 1..9485: mod_base = OTHER; note = Each t is m1f
  source 1..9485: mol_type = other RNA

SEQ ID NO: 17337 - RNA, 9485 nt, synthetic construct; identical to SEQ ID NO: 15740
  modified_base 1..9485: mod_base = OTHER; note = Each t is m1f
  source 1..9485: mol_type = other RNA

SEQ ID NO: 17338 - RNA, 9485 nt, synthetic construct; identical to SEQ ID NO: 15741
  modified_base 1..9485: mod_base = OTHER; note = Each t is m1f
  source 1..9485: mol_type = other RNA

SEQ ID NO: 17339 - RNA, 9485 nt, synthetic construct; identical to SEQ ID NO: 15742
  modified_base 1..9485: mod_base = OTHER; note = Each t is m1f
  source 1..9485: mol_type = other RNA

SEQ ID NO: 17340 - RNA, 9485 nt, synthetic construct; identical to SEQ ID NO: 15743
  modified_base 1..9485: mod_base = OTHER; note = Each t is m1f
  source 1..9485: mol_type = other RNA

SEQ ID NO: 17341 - RNA, 9485 nt, synthetic construct; identical to SEQ ID NO: 15744
  modified_base 1..9485: mod_base = OTHER; note = Each t is m1f
  source 1..9485: mol_type = other RNA

SEQ ID NO: 17342 - RNA, 9485 nt, synthetic construct; identical to SEQ ID NO: 15745
  modified_base 1..9485: mod_base = OTHER; note = Each t is m1f
  source 1..9485: mol_type = other RNA

SEQ ID NO: 17343 - RNA, 9485 nt, synthetic construct; identical to SEQ ID NO: 15746
  modified_base 1..9485: mod_base = OTHER; note = Each t is m1f
  source 1..9485: mol_type = other RNA

SEQ ID NO: 17344 - RNA, 9485 nt, synthetic construct; identical to SEQ ID NO: 15747
  modified_base 1..9485: mod_base = OTHER; note = Each t is m1f
  source 1..9485: mol_type = other RNA

SEQ ID NO: 17345 - RNA, 9485 nt, synthetic construct; identical to SEQ ID NO: 15748
  modified_base 1..9485: mod_base = OTHER; note = Each t is m1f
  source 1..9485: mol_type = other RNA

SEQ ID NO: 17346 - RNA, 9485 nt, synthetic construct; identical to SEQ ID NO: 15749
  modified_base 1..9485: mod_base = OTHER; note = Each t is m1f
  source 1..9485: mol_type = other RNA

SEQ ID NO: 17347 - RNA, 9485 nt, synthetic construct; identical to SEQ ID NO: 15750
  modified_base 1..9485: mod_base = OTHER; note = Each t is m1f
  source 1..9485: mol_type = other RNA

SEQ ID NO: 17348 - RNA, 9485 nt, synthetic construct; identical to SEQ ID NO: 15751
  modified_base 1..9485: mod_base = OTHER; note = Each t is m1f
  source 1..9485: mol_type = other RNA

SEQ ID NO: 17349 - RNA, 9485 nt, synthetic construct; identical to SEQ ID NO: 15752
  modified_base 1..9485: mod_base = OTHER; note = Each t is m1f
  source 1..9485: mol_type = other RNA

SEQ ID NO: 17350 - RNA, 9485 nt, synthetic construct; identical to SEQ ID NO: 15753
  modified_base 1..9485: mod_base = OTHER; note = Each t is m1f
  source 1..9485: mol_type = other RNA

SEQ ID NO: 17351 - RNA, 9485 nt, synthetic construct; identical to SEQ ID NO: 15754
  modified_base 1..9485: mod_base = OTHER; note = Each t is m1f
  source 1..9485: mol_type = other RNA

SEQ ID NO: 17352 - RNA, 9485 nt, synthetic construct; identical to SEQ ID NO: 15755
  modified_base 1..9485: mod_base = OTHER; note = Each t is m1f
  source 1..9485: mol_type = other RNA

SEQ ID NO: 17353 - RNA, 9485 nt, synthetic construct; identical to SEQ ID NO: 15756
  modified_base 1..9485: mod_base = OTHER; note = Each t is m1f
  source 1..9485: mol_type = other RNA

SEQ ID NO: 17354 - RNA, 9485 nt, synthetic construct; identical to SEQ ID NO: 15757
  modified_base 1..9485: mod_base = OTHER; note = Each t is m1f
  source 1..9485: mol_type = other RNA

SEQ ID NO: 17355 - RNA, 9485 nt, synthetic construct; identical to SEQ ID NO: 15758
  modified_base 1..9485: mod_base = OTHER; note = Each t is m1f
  source 1..9485: mol_type = other RNA

SEQ ID NO: 17356 - RNA, 9485 nt, synthetic construct; identical to SEQ ID NO: 15759
  modified_base 1..9485: mod_base = OTHER; note = Each t is m1f
  source 1..9485: mol_type = other RNA

SEQ ID NO: 17357 - RNA, 9485 nt, synthetic construct; identical to SEQ ID NO: 15760
  modified_base 1..9485: mod_base = OTHER; note = Each t is m1f
  source 1..9485: mol_type = other RNA

SEQ ID NO: 17358 - RNA, 9485 nt, synthetic construct; identical to SEQ ID NO: 15761
  modified_base 1..9485: mod_base = OTHER; note = Each t is m1f
  source 1..9485: mol_type = other RNA

SEQ ID NO: 17359 - RNA, 9485 nt, synthetic construct; identical to SEQ ID NO: 15762
  modified_base 1..9485: mod_base = OTHER; note = Each t is m1f
  source 1..9485: mol_type = other RNA

SEQ ID NO: 17360 - RNA, 9485 nt, synthetic construct; identical to SEQ ID NO: 15763
  modified_base 1..9485: mod_base = OTHER; note = Each t is m1f
  source 1..9485: mol_type = other RNA

SEQ ID NO: 17361 - RNA, 9485 nt, synthetic construct; identical to SEQ ID NO: 15764
  modified_base 1..9485: mod_base = OTHER; note = Each t is m1f
  source 1..9485: mol_type = other RNA

SEQ ID NO: 17362 - RNA, 9485 nt, synthetic construct; identical to SEQ ID NO: 15765
  modified_base 1..9485: mod_base = OTHER; note = Each t is m1f
  source 1..9485: mol_type = other RNA

SEQ ID NO: 17363 - RNA, 9485 nt, synthetic construct; identical to SEQ ID NO: 15766
  modified_base 1..9485: mod_base = OTHER; note = Each t is m1f
  source 1..9485: mol_type = other RNA

SEQ ID NO: 17364 - RNA, 9485 nt, synthetic construct; identical to SEQ ID NO: 15767
  modified_base 1..9485: mod_base = OTHER; note = Each t is m1f
  source 1..9485: mol_type = other RNA

SEQ ID NO: 17365 - RNA, 9485 nt, synthetic construct; identical to SEQ ID NO: 15768
  modified_base 1..9485: mod_base = OTHER; note = Each t is m1f
  source 1..9485: mol_type = other RNA

SEQ ID NO: 17366 - RNA, 9485 nt, synthetic construct; identical to SEQ ID NO: 15769
  modified_base 1..9485: mod_base = OTHER; note = Each t is m1f
  source 1..9485: mol_type = other RNA

SEQ ID NO: 17367 - RNA, 9485 nt, synthetic construct; identical to SEQ ID NO: 15770
  modified_base 1..9485: mod_base = OTHER; note = Each t is m1f
  source 1..9485: mol_type = other RNA

SEQ ID NO: 17368 - RNA, 9485 nt, synthetic construct; identical to SEQ ID NO: 15771
  modified_base 1..9485: mod_base = OTHER; note = Each t is m1f
  source 1..9485: mol_type = other RNA

SEQ ID NO: 17369 - RNA, 9485 nt, synthetic construct; identical to SEQ ID NO: 15772
  modified_base 1..9485: mod_base = OTHER; note = Each t is m1f
  source 1..9485: mol_type = other RNA

SEQ ID NO: 17370 - RNA, 9485 nt, synthetic construct; identical to SEQ ID NO: 15773
  modified_base 1..9485: mod_base = OTHER; note = Each t is m1f
  source 1..9485: mol_type = other RNA

SEQ ID NO: 17371 - RNA, 9485 nt, synthetic construct; identical to SEQ ID NO: 15774
  modified_base 1..9485: mod_base = OTHER; note = Each t is m1f
  source 1..9485: mol_type = other RNA

SEQ ID NO: 17372 - RNA, 9485 nt, synthetic construct; identical to SEQ ID NO: 15775
  modified_base 1..9485: mod_base = OTHER; note = Each t is m1f
  source 1..9485: mol_type = other RNA

SEQ ID NO: 17373 - RNA, 9485 nt, synthetic construct; identical to SEQ ID NO: 15776
  modified_base 1..9485: mod_base = OTHER; note = Each t is m1f
  source 1..9485: mol_type = other RNA

SEQ ID NO: 17374 - RNA, 9485 nt, synthetic construct; identical to SEQ ID NO: 15777
  modified_base 1..9485: mod_base = OTHER; note = Each t is m1f
  source 1..9485: mol_type = other RNA

SEQ ID NO: 17375 - RNA, 9485 nt, synthetic construct; identical to SEQ ID NO: 15778
  modified_base 1..9485: mod_base = OTHER; note = Each t is m1f
  source 1..9485: mol_type = other RNA

SEQ ID NO: 17376 - RNA, 9485 nt, synthetic construct; identical to SEQ ID NO: 15779
  modified_base 1..9485: mod_base = OTHER; note = Each t is m1f
  source 1..9485: mol_type = other RNA

SEQ ID NO: 17377 - RNA, 9485 nt, synthetic construct; identical to SEQ ID NO: 15780
  modified_base 1..9485: mod_base = OTHER; note = Each t is m1f
  source 1..9485: mol_type = other RNA

SEQ ID NO: 17378 - RNA, 9485 nt, synthetic construct; identical to SEQ ID NO: 15781
  modified_base 1..9485: mod_base = OTHER; note = Each t is m1f
  source 1..9485: mol_type = other RNA

SEQ ID NO: 17379 - RNA, 9485 nt, synthetic construct; identical to SEQ ID NO: 15782
  modified_base 1..9485: mod_base = OTHER; note = Each t is m1f
  source 1..9485: mol_type = other RNA

SEQ ID NO: 17380 - RNA, 9485 nt, synthetic construct; identical to SEQ ID NO: 15783
  modified_base 1..9485: mod_base = OTHER; note = Each t is m1f
  source 1..9485: mol_type = other RNA

SEQ ID NO: 17381 - RNA, 9485 nt, synthetic construct; identical to SEQ ID NO: 15784
  modified_base 1..9485: mod_base = OTHER; note = Each t is m1f
  source 1..9485: mol_type = other RNA

SEQ ID NO: 17382 - RNA, 9485 nt, synthetic construct; identical to SEQ ID NO: 15785
  modified_base 1..9485: mod_base = OTHER; note = Each t is m1f
  source 1..9485: mol_type = other RNA

SEQ ID NO: 17383 - RNA, 9485 nt, synthetic construct; identical to SEQ ID NO: 15786
  modified_base 1..9485: mod_base = OTHER; note = Each t is m1f
  source 1..9485: mol_type = other RNA

SEQ ID NO: 17384 - RNA, 9485 nt, synthetic construct; identical to SEQ ID NO: 15787
  modified_base 1..9485: mod_base = OTHER; note = Each t is m1f
  source 1..9485: mol_type = other RNA

SEQ ID NO: 17385 - RNA, 9485 nt, synthetic construct; identical to SEQ ID NO: 15788
  modified_base 1..9485: mod_base = OTHER; note = Each t is m1f
  source 1..9485: mol_type = other RNA

SEQ ID NO: 17386 - RNA, 9485 nt, synthetic construct; identical to SEQ ID NO: 15789
  modified_base 1..9485: mod_base = OTHER; note = Each t is m1f
  source 1..9485: mol_type = other RNA

SEQ ID NO: 17387 - RNA, 9485 nt, synthetic construct; identical to SEQ ID NO: 15790
  modified_base 1..9485: mod_base = OTHER; note = Each t is m1f
  source 1..9485: mol_type = other RNA

SEQ ID NO: 17388 - RNA, 9485 nt, synthetic construct; identical to SEQ ID NO: 15791
  modified_base 1..9485: mod_base = OTHER; note = Each t is m1f
  source 1..9485: mol_type = other RNA

SEQ ID NO: 17389 - RNA, 9485 nt, synthetic construct; identical to SEQ ID NO: 15792
  modified_base 1..9485: mod_base = OTHER; note = Each t is m1f
  source 1..9485: mol_type = other RNA

SEQ ID NO: 17390 - RNA, 9485 nt, synthetic construct; identical to SEQ ID NO: 15793
  modified_base 1..9485: mod_base = OTHER; note = Each t is m1f
  source 1..9485: mol_type = other RNA

SEQ ID NO: 17391 - RNA, 9485 nt, synthetic construct; identical to SEQ ID NO: 15794
  modified_base 1..9485: mod_base = OTHER; note = Each t is m1f
  source 1..9485: mol_type = other RNA

SEQ ID NO: 17392 - RNA, 9485 nt, synthetic construct; identical to SEQ ID NO: 15795
  modified_base 1..9485: mod_base = OTHER; note = Each t is m1f
  source 1..9485: mol_type = other RNA

SEQ ID NO: 17393 - RNA, 9485 nt, synthetic construct; identical to SEQ ID NO: 15796
  modified_base 1..9485: mod_base = OTHER; note = Each t is m1f
  source 1..9485: mol_type = other RNA

SEQ ID NO: 17394 - RNA, 9485 nt, synthetic construct; identical to SEQ ID NO: 15797
  modified_base 1..9485: mod_base = OTHER; note = Each t is m1f
  source 1..9485: mol_type = other RNA

SEQ ID NO: 17395 - RNA, 9485 nt, synthetic construct; identical to SEQ ID NO: 15798
  modified_base 1..9485: mod_base = OTHER; note = Each t is m1f
  source 1..9485: mol_type = other RNA

SEQ ID NO: 17396 - RNA, 9485 nt, synthetic construct; identical to SEQ ID NO: 15799
  modified_base 1..9485: mod_base = OTHER; note = Each t is m1f
  source 1..9485: mol_type = other RNA

SEQ ID NO: 17397 - RNA, 9485 nt, synthetic construct; identical to SEQ ID NO: 15800
  modified_base 1..9485: mod_base = OTHER; note = Each t is m1f
  source 1..9485: mol_type = other RNA

SEQ ID NO: 17398 - RNA, 9485 nt, synthetic construct; identical to SEQ ID NO: 15801
  modified_base 1..9485: mod_base = OTHER; note = Each t is m1f
  source 1..9485: mol_type = other RNA

SEQ ID NO: 17399 - RNA, 9485 nt, synthetic construct; identical to SEQ ID NO: 15802
  modified_base 1..9485: mod_base = OTHER; note = Each t is m1f
  source 1..9485: mol_type = other RNA

SEQ ID NO: 17400 - RNA, 9485 nt, synthetic construct; identical to SEQ ID NO: 15803
  modified_base 1..9485: mod_base = OTHER; note = Each t is m1f
  source 1..9485: mol_type = other RNA

SEQ ID NO: 17401 - RNA, 9485 nt, synthetic construct; identical to SEQ ID NO: 15804
  modified_base 1..9485: mod_base = OTHER; note = Each t is m1f
  source 1..9485: mol_type = other RNA

SEQ ID NO: 17402 - RNA, 9485 nt, synthetic construct; identical to SEQ ID NO: 15805
  modified_base 1..9485: mod_base = OTHER; note = Each t is m1f
  source 1..9485: mol_type = other RNA

SEQ ID NO: 17403 - RNA, 9485 nt, synthetic construct; identical to SEQ ID NO: 15806
  modified_base 1..9485: mod_base = OTHER; note = Each t is m1f
  source 1..9485: mol_type = other RNA

SEQ ID NO: 17404 - RNA, 9485 nt, synthetic construct; identical to SEQ ID NO: 15807
  modified_base 1..9485: mod_base = OTHER; note = Each t is m1f
  source 1..9485: mol_type = other RNA

SEQ ID NO: 17405 - RNA, 9485 nt, synthetic construct; identical to SEQ ID NO: 15808
  modified_base 1..9485: mod_base = OTHER; note = Each t is m1f
  source 1..9485: mol_type = other RNA

SEQ ID NO: 17406 - RNA, 9485 nt, synthetic construct; identical to SEQ ID NO: 15809
  modified_base 1..9485: mod_base = OTHER; note = Each t is m1f
  source 1..9485: mol_type = other RNA

SEQ ID NO: 17407 - RNA, 9485 nt, synthetic construct; identical to SEQ ID NO: 15810
  modified_base 1..9485: mod_base = OTHER; note = Each t is m1f
  source 1..9485: mol_type = other RNA

SEQ ID NO: 17408 - RNA, 9485 nt, synthetic construct; identical to SEQ ID NO: 15811
  modified_base 1..9485: mod_base = OTHER; note = Each t is m1f
  source 1..9485: mol_type = other RNA

SEQ ID NO: 17409 - RNA, 9485 nt, synthetic construct; identical to SEQ ID NO: 15812
  modified_base 1..9485: mod_base = OTHER; note = Each t is m1f
  source 1..9485: mol_type = other RNA

SEQ ID NO: 17410 - RNA, 9485 nt, synthetic construct; identical to SEQ ID NO: 15813
  modified_base 1..9485: mod_base = OTHER; note = Each t is m1f
  source 1..9485: mol_type = other RNA

SEQ ID NO: 17411 - RNA, 9485 nt, synthetic construct; identical to SEQ ID NO: 15814
  modified_base 1..9485: mod_base = OTHER; note = Each t is m1f
  source 1..9485: mol_type = other RNA

SEQ ID NO: 17412 - RNA, 9485 nt, synthetic construct; identical to SEQ ID NO: 15815
  modified_base 1..9485: mod_base = OTHER; note = Each t is m1f
  source 1..9485: mol_type = other RNA

SEQ ID NO: 17413 - RNA, 9479 nt, synthetic construct; identical to SEQ ID NO: 15816
  modified_base 1..9479: mod_base = OTHER; note = Each t is m1f
  source 1..9479: mol_type = other RNA

SEQ ID NO: 17414 - RNA, 9485 nt, synthetic construct; identical to SEQ ID NO: 15817
  modified_base 1..9485: mod_base = OTHER; note = Each t is m1f
  source 1..9485: mol_type = other RNA

SEQ ID NO: 17415 - RNA, 9485 nt, synthetic construct; identical to SEQ ID NO: 15818
  modified_base 1..9485: mod_base = OTHER; note = Each t is m1f
  source 1..9485: mol_type = other RNA

SEQ ID NO: 17416 - RNA, 9485 nt, synthetic construct; identical to SEQ ID NO: 15819
  modified_base 1..9485: mod_base = OTHER; note = Each t is m1f
  source 1..9485: mol_type = other RNA

SEQ ID NO: 17417 - RNA, 9485 nt, synthetic construct; identical to SEQ ID NO: 15820
  modified_base 1..9485: mod_base = OTHER; note = Each t is m1f
  source 1..9485: mol_type = other RNA

SEQ ID NO: 17418 - RNA, 9485 nt, synthetic construct; identical to SEQ ID NO: 15821
  modified_base 1..9485: mod_base = OTHER; note = Each t is m1f
  source 1..9485: mol_type = other RNA

SEQ ID NO: 17419 - RNA, 9485 nt, synthetic construct; identical to SEQ ID NO: 15822
  modified_base 1..9485: mod_base = OTHER; note = Each t is m1f
  source 1..9485: mol_type = other RNA

SEQ ID NO: 17420 - RNA, 9485 nt, synthetic construct; identical to SEQ ID NO: 15823
  modified_base 1..9485: mod_base = OTHER; note = Each t is m1f
  source 1..9485: mol_type = other RNA

SEQ ID NO: 17421 - RNA, 9485 nt, synthetic construct; identical to SEQ ID NO: 15824
  modified_base 1..9485: mod_base = OTHER; note = Each t is m1f
  source 1..9485: mol_type = other RNA

SEQ ID NO: 17422 - RNA, 9485 nt, synthetic construct; identical to SEQ ID NO: 15825
  modified_base 1..9485: mod_base = OTHER; note = Each t is m1f
  source 1..9485: mol_type = other RNA

SEQ ID NO: 17423 - RNA, 9485 nt, synthetic construct; identical to SEQ ID NO: 15826
  modified_base 1..9485: mod_base = OTHER; note = Each t is m1f
  source 1..9485: mol_type = other RNA

SEQ ID NO: 17424 - RNA, 9485 nt, synthetic construct; identical to SEQ ID NO: 15827
  modified_base 1..9485: mod_base = OTHER; note = Each t is m1f
  source 1..9485: mol_type = other RNA

SEQ ID NO: 17425 - RNA, 9485 nt, synthetic construct; identical to SEQ ID NO: 15828
  modified_base 1..9485: mod_base = OTHER; note = Each t is m1f
  source 1..9485: mol_type = other RNA

SEQ ID NO: 17426 - RNA, 9485 nt, synthetic construct; identical to SEQ ID NO: 15829
  modified_base 1..9485: mod_base = OTHER; note = Each t is m1f
  source 1..9485: mol_type = other RNA

SEQ ID NO: 17427 - RNA, 9485 nt, synthetic construct; identical to SEQ ID NO: 15830
  modified_base 1..9485: mod_base = OTHER; note = Each t is m1f
  source 1..9485: mol_type = other RNA

SEQ ID NO: 17428 - RNA, 9485 nt, synthetic construct; identical to SEQ ID NO: 15831
  modified_base 1..9485: mod_base = OTHER; note = Each t is m1f
  source 1..9485: mol_type = other RNA

SEQ ID NO: 17429 - RNA, 9485 nt, synthetic construct; identical to SEQ ID NO: 15832
  modified_base 1..9485: mod_base = OTHER; note = Each t is m1f
  source 1..9485: mol_type = other RNA

SEQ ID NO: 17430 - RNA, 9485 nt, synthetic construct; identical to SEQ ID NO: 15833
  modified_base 1..9485: mod_base = OTHER; note = Each t is m1f
  source 1..9485: mol_type = other RNA

SEQ ID NO: 17431 - RNA, 9485 nt, synthetic construct; identical to SEQ ID NO: 15834
  modified_base 1..9485: mod_base = OTHER; note = Each t is m1f
  source 1..9485: mol_type = other RNA

SEQ ID NO: 17432 - RNA, 9485 nt, synthetic construct; identical to SEQ ID NO: 15835
  modified_base 1..9485: mod_base = OTHER; note = Each t is m1f
  source 1..9485: mol_type = other RNA

SEQ ID NO: 17433 - RNA, 9485 nt, synthetic construct; identical to SEQ ID NO: 15836
  modified_base 1..9485: mod_base = OTHER; note = Each t is m1f
  source 1..9485: mol_type = other RNA

SEQ ID NO: 17434 - RNA, 9485 nt, synthetic construct; identical to SEQ ID NO: 15837
  modified_base 1..9485: mod_base = OTHER; note = Each t is m1f
  source 1..9485: mol_type = other RNA

SEQ ID NO: 17435 - RNA, 9485 nt, synthetic construct; identical to SEQ ID NO: 15838
  modified_base 1..9485: mod_base = OTHER; note = Each t is m1f
  source 1..9485: mol_type = other RNA

SEQ ID NO: 17436 - RNA, 9485 nt, synthetic construct; identical to SEQ ID NO: 15839
  modified_base 1..9485: mod_base = OTHER; note = Each t is m1f
  source 1..9485: mol_type = other RNA

SEQ ID NO: 17437 - RNA, 9485 nt, synthetic construct; identical to SEQ ID NO: 15840
  modified_base 1..9485: mod_base = OTHER; note = Each t is m1f
  source 1..9485: mol_type = other RNA

SEQ ID NO: 17438 - RNA, 9485 nt, synthetic construct; identical to SEQ ID NO: 15841
  modified_base 1..9485: mod_base = OTHER; note = Each t is m1f
  source 1..9485: mol_type = other RNA

SEQ ID NO: 17439 - RNA, 9485 nt, synthetic construct; identical to SEQ ID NO: 15842
  modified_base 1..9485: mod_base = OTHER; note = Each t is m1f
  source 1..9485: mol_type = other RNA

SEQ ID NO: 17440 - RNA, 9485 nt, synthetic construct; identical to SEQ ID NO: 15843
  modified_base 1..9485: mod_base = OTHER; note = Each t is m1f
  source 1..9485: mol_type = other RNA

SEQ ID NO: 17441 - RNA, 9485 nt, synthetic construct; identical to SEQ ID NO: 15844
  modified_base 1..9485: mod_base = OTHER; note = Each t is m1f
  source 1..9485: mol_type = other RNA

SEQ ID NO: 17442 - RNA, 9485 nt, synthetic construct; identical to SEQ ID NO: 15845
  modified_base 1..9485: mod_base = OTHER; note = Each t is m1f
  source 1..9485: mol_type = other RNA

SEQ ID NO: 17443 - RNA, 9485 nt, synthetic construct; identical to SEQ ID NO: 15846
  modified_base 1..9485: mod_base = OTHER; note = Each t is m1f
  source 1..9485: mol_type = other RNA

SEQ ID NO: 17444 - RNA, 9485 nt, synthetic construct; identical to SEQ ID NO: 15847
  modified_base 1..9485: mod_base = OTHER; note = Each t is m1f
  source 1..9485: mol_type = other RNA

SEQ ID NO: 17445 - RNA, 9485 nt, synthetic construct; identical to SEQ ID NO: 15848
  modified_base 1..9485: mod_base = OTHER; note = Each t is m1f
  source 1..9485: mol_type = other RNA

SEQ ID NO: 17446 - RNA, 9485 nt, synthetic construct; identical to SEQ ID NO: 15849
  modified_base 1..9485: mod_base = OTHER; note = Each t is m1f
  source 1..9485: mol_type = other RNA

SEQ ID NO: 17447 - RNA, 9485 nt, synthetic construct; identical to SEQ ID NO: 15850
  modified_base 1..9485: mod_base = OTHER; note = Each t is m1f
  source 1..9485: mol_type = other RNA

SEQ ID NO: 17448 - RNA, 9485 nt, synthetic construct; identical to SEQ ID NO: 15851
  modified_base 1..9485: mod_base = OTHER; note = Each t is m1f
  source 1..9485: mol_type = other RNA

SEQ ID NO: 17449 - RNA, 9485 nt, synthetic construct; identical to SEQ ID NO: 15852
  modified_base 1..9485: mod_base = OTHER; note = Each t is m1f
  source 1..9485: mol_type = other RNA

SEQ ID NO: 17450 - RNA, 9485 nt, synthetic construct; identical to SEQ ID NO: 15853
  modified_base 1..9485: mod_base = OTHER; note = Each t is m1f
  source 1..9485: mol_type = other RNA

SEQ ID NO: 17451 - RNA, 9485 nt, synthetic construct; identical to SEQ ID NO: 15854
  modified_base 1..9485: mod_base = OTHER; note = Each t is m1f
  source 1..9485: mol_type = other RNA

SEQ ID NO: 17452 - RNA, 9485 nt, synthetic construct; identical to SEQ ID NO: 15855
  modified_base 1..9485: mod_base = OTHER; note = Each t is m1f
  source 1..9485: mol_type = other RNA

SEQ ID NO: 17453 - RNA, 9485 nt, synthetic construct; identical to SEQ ID NO: 15856
  modified_base 1..9485: mod_base = OTHER; note = Each t is m1f
  source 1..9485: mol_type = other RNA

SEQ ID NO: 17454 - RNA, 9485 nt, synthetic construct; identical to SEQ ID NO: 15857
  modified_base 1..9485: mod_base = OTHER; note = Each t is m1f
  source 1..9485: mol_type = other RNA

SEQ ID NO: 17455 - RNA, 9485 nt, synthetic construct; identical to SEQ ID NO: 15858
  modified_base 1..9485: mod_base = OTHER; note = Each t is m1f
  source 1..9485: mol_type = other RNA

SEQ ID NO: 17456 - RNA, 9485 nt, synthetic construct; identical to SEQ ID NO: 15859
  modified_base 1..9485: mod_base = OTHER; note = Each t is m1f
  source 1..9485: mol_type = other RNA

SEQ ID NO: 17457 - RNA, 9485 nt, synthetic construct; identical to SEQ ID NO: 15860
  modified_base 1..9485: mod_base = OTHER; note = Each t is m1f
  source 1..9485: mol_type = other RNA

SEQ ID NO: 17458 - RNA, 9485 nt, synthetic construct; identical to SEQ ID NO: 15861
  modified_base 1..9485: mod_base = OTHER; note = Each t is m1f
  source 1..9485: mol_type = other RNA

SEQ ID NO: 17459 - RNA, 9485 nt, synthetic construct; identical to SEQ ID NO: 15862
  modified_base 1..9485: mod_base = OTHER; note = Each t is m1f
  source 1..9485: mol_type = other RNA

SEQ ID NO: 17460 - RNA, 9485 nt, synthetic construct; identical to SEQ ID NO: 15863
  modified_base 1..9485: mod_base = OTHER; note = Each t is m1f
  source 1..9485: mol_type = other RNA

SEQ ID NO: 17461 - RNA, 9485 nt, synthetic construct; identical to SEQ ID NO: 15864
  modified_base 1..9485: mod_base = OTHER; note = Each t is m1f
  source 1..9485: mol_type = other RNA

SEQ ID NO: 17462 - RNA, 9485 nt, synthetic construct; identical to SEQ ID NO: 15865
  modified_base 1..9485: mod_base = OTHER; note = Each t is m1f
  source 1..9485: mol_type = other RNA

SEQ ID NO: 17463 - RNA, 9485 nt, synthetic construct; identical to SEQ ID NO: 15866
  modified_base 1..9485: mod_base = OTHER; note = Each t is m1f
  source 1..9485: mol_type = other RNA

SEQ ID NO: 17464 - RNA, 9485 nt, synthetic construct; identical to SEQ ID NO: 15867
  modified_base 1..9485: mod_base = OTHER; note = Each t is m1f
  source 1..9485: mol_type = other RNA

SEQ ID NO: 17465 - RNA, 9485 nt, synthetic construct; identical to SEQ ID NO: 15868
  modified_base 1..9485: mod_base = OTHER; note = Each t is m1f
  source 1..9485: mol_type = other RNA

SEQ ID NO: 17466 - RNA, 9485 nt, synthetic construct; identical to SEQ ID NO: 15869
  modified_base 1..9485: mod_base = OTHER; note = Each t is m1f
  source 1..9485: mol_type = other RNA

SEQ ID NO: 17467 - RNA, 9485 nt, synthetic construct; identical to SEQ ID NO: 15870
  modified_base 1..9485: mod_base = OTHER; note = Each t is m1f
  source 1..9485: mol_type = other RNA

SEQ ID NO: 17468 - RNA, 9485 nt, synthetic construct; identical to SEQ ID NO: 15871
  modified_base 1..9485: mod_base = OTHER; note = Each t is m1f
  source 1..9485: mol_type = other RNA

SEQ ID NO: 17469 - RNA, 9485 nt, synthetic construct; identical to SEQ ID NO: 15872
  modified_base 1..9485: mod_base = OTHER; note = Each t is m1f
  source 1..9485: mol_type = other RNA

SEQ ID NO: 17470 - RNA, 9485 nt, synthetic construct; identical to SEQ ID NO: 15873
  modified_base 1..9485: mod_base = OTHER; note = Each t is m1f
  source 1..9485: mol_type = other RNA

SEQ ID NO: 17471 - RNA, 9485 nt, synthetic construct; identical to SEQ ID NO: 15874
  modified_base 1..9485: mod_base = OTHER; note = Each t is m1f
  source 1..9485: mol_type = other RNA

SEQ ID NO: 17472 - RNA, 9485 nt, synthetic construct; identical to SEQ ID NO: 15875
  modified_base 1..9485: mod_base = OTHER; note = Each t is m1f
  source 1..9485: mol_type = other RNA

SEQ ID NO: 17473 - RNA, 9485 nt, synthetic construct; identical to SEQ ID NO: 15876
  modified_base 1..9485: mod_base = OTHER; note = Each t is m1f
  source 1..9485: mol_type = other RNA

SEQ ID NO: 17474 - RNA, 9485 nt, synthetic construct; identical to SEQ ID NO: 15877
  modified_base 1..9485: mod_base = OTHER; note = Each t is m1f
  source 1..9485: mol_type = other RNA

SEQ ID NO: 17475 - RNA, 9485 nt, synthetic construct; identical to SEQ ID NO: 15878
  modified_base 1..9485: mod_base = OTHER; note = Each t is m1f
  source 1..9485: mol_type = other RNA

SEQ ID NO: 17476 - RNA, 9485 nt, synthetic construct; identical to SEQ ID NO: 15879
  modified_base 1..9485: mod_base = OTHER; note = Each t is m1f
  source 1..9485: mol_type = other RNA

SEQ ID NO: 17477 - RNA, 9485 nt, synthetic construct; identical to SEQ ID NO: 15880
  modified_base 1..9485: mod_base = OTHER; note = Each t is m1f
  source 1..9485: mol_type = other RNA

SEQ ID NO: 17478 - RNA, 9485 nt, synthetic construct; identical to SEQ ID NO: 15881
  modified_base 1..9485: mod_base = OTHER; note = Each t is m1f
  source 1..9485: mol_type = other RNA

SEQ ID NO: 17479 - RNA, 9485 nt, synthetic construct; identical to SEQ ID NO: 15882
  modified_base 1..9485: mod_base = OTHER; note = Each t is m1f
  source 1..9485: mol_type = other RNA

SEQ ID NO: 17480 - RNA, 9485 nt, synthetic construct; identical to SEQ ID NO: 15883
  modified_base 1..9485: mod_base = OTHER; note = Each t is m1f
  source 1..9485: mol_type = other RNA

SEQ ID NO: 17481 - RNA, 9485 nt, synthetic construct; identical to SEQ ID NO: 15884
  modified_base 1..9485: mod_base = OTHER; note = Each t is m1f
  source 1..9485: mol_type = other RNA

SEQ ID NO: 17482 - RNA, 9551 nt, synthetic construct; identical to SEQ ID NO: 15885
  modified_base 1..9551: mod_base = OTHER; note = Each t is m1f
  source 1..9551: mol_type = other RNA

SEQ ID NO: 17483 - RNA, 9485 nt, synthetic construct; identical to SEQ ID NO: 15886
  modified_base 1..9485: mod_base = OTHER; note = Each t is m1f
  source 1..9485: mol_type = other RNA

SEQ ID NO: 17484 - RNA, 9485 nt, synthetic construct; identical to SEQ ID NO: 15887
  modified_base 1..9485: mod_base = OTHER; note = Each t is m1f
  source 1..9485: mol_type = other RNA

SEQ ID NO: 17485 - RNA, 9485 nt, synthetic construct; identical to SEQ ID NO: 15888
  modified_base 1..9485: mod_base = OTHER; note = Each t is m1f
  source 1..9485: mol_type = other RNA

SEQ ID NO: 17486 - RNA, 9485 nt, synthetic construct; identical to SEQ ID NO: 15889
  modified_base 1..9485: mod_base = OTHER; note = Each t is m1f
  source 1..9485: mol_type = other RNA

SEQ ID NO: 17487 - RNA, 9485 nt, synthetic construct; identical to SEQ ID NO: 15890
  modified_base 1..9485: mod_base = OTHER; note = Each t is m1f
  source 1..9485: mol_type = other RNA

SEQ ID NO: 17488 - RNA, 9485 nt, synthetic construct; identical to SEQ ID NO: 15891
  modified_base 1..9485: mod_base = OTHER; note = Each t is m1f
  source 1..9485: mol_type = other RNA

SEQ ID NO: 17489 - RNA, 9485 nt, synthetic construct; identical to SEQ ID NO: 15892
  modified_base 1..9485: mod_base = OTHER; note = Each t is m1f
  source 1..9485: mol_type = other RNA

SEQ ID NO: 17490 - RNA, 9485 nt, synthetic construct; identical to SEQ ID NO: 15893
  modified_base 1..9485: mod_base = OTHER; note = Each t is m1f
  source 1..9485: mol_type = other RNA

SEQ ID NO: 17491 - RNA, 9485 nt, synthetic construct; identical to SEQ ID NO: 15894
  modified_base 1..9485: mod_base = OTHER; note = Each t is m1f
  source 1..9485: mol_type = other RNA

SEQ ID NO: 17492 - RNA, 9485 nt, synthetic construct; identical to SEQ ID NO: 15895
  modified_base 1..9485: mod_base = OTHER; note = Each t is m1f
  source 1..9485: mol_type = other RNA

SEQ ID NO: 17493 - RNA, 9485 nt, synthetic construct; identical to SEQ ID NO: 15896
  modified_base 1..9485: mod_base = OTHER; note = Each t is m1f
  source 1..9485: mol_type = other RNA

SEQ ID NO: 17494 - RNA, 9485 nt, synthetic construct; identical to SEQ ID NO: 15897
  modified_base 1..9485: mod_base = OTHER; note = Each t is m1f
  source 1..9485: mol_type = other RNA

SEQ ID NO: 17495 - RNA, 9485 nt, synthetic construct; identical to SEQ ID NO: 15898
  modified_base 1..9485: mod_base = OTHER; note = Each t is m1f
  source 1..9485: mol_type = other RNA

SEQ ID NO: 17496 - RNA, 9485 nt, synthetic construct; identical to SEQ ID NO: 15899
  modified_base 1..9485: mod_base = OTHER; note = Each t is m1f
  source 1..9485: mol_type = other RNA

SEQ ID NO: 17497 - RNA, 9485 nt, synthetic construct; identical to SEQ ID NO: 15900
  modified_base 1..9485: mod_base = OTHER; note = Each t is m1f
  source 1..9485: mol_type = other RNA

SEQ ID NO: 17498 - RNA, 9485 nt, synthetic construct; identical to SEQ ID NO: 15901
  modified_base 1..9485: mod_base = OTHER; note = Each t is m1f
  source 1..9485: mol_type = other RNA

SEQ ID NO: 17499 - RNA, 9485 nt, synthetic construct; identical to SEQ ID NO: 15902
  modified_base 1..9485: mod_base = OTHER; note = Each t is m1f
  source 1..9485: mol_type = other RNA

SEQ ID NO: 17500 - RNA, 9485 nt, synthetic construct; identical to SEQ ID NO: 15903
  modified_base 1..9485: mod_base = OTHER; note = Each t is m1f
  source 1..9485: mol_type = other RNA

SEQ ID NO: 17501 - RNA, 9485 nt, synthetic construct; identical to SEQ ID NO: 15904
  modified_base 1..9485: mod_base = OTHER; note = Each t is m1f
  source 1..9485: mol_type = other RNA

SEQ ID NO: 17502 - RNA, 9485 nt, synthetic construct; identical to SEQ ID NO: 15905
  modified_base 1..9485: mod_base = OTHER; note = Each t is m1f
  source 1..9485: mol_type = other RNA

SEQ ID NO: 17503 - RNA, 9485 nt, synthetic construct; identical to SEQ ID NO: 15906
  modified_base 1..9485: mod_base = OTHER; note = Each t is m1f
  source 1..9485: mol_type = other RNA

SEQ ID NO: 17504 - RNA, 9485 nt, synthetic construct; identical to SEQ ID NO: 15907
  modified_base 1..9485: mod_base = OTHER; note = Each t is m1f
  source 1..9485: mol_type = other RNA

SEQ ID NO: 17505 - RNA, 9485 nt, synthetic construct; identical to SEQ ID NO: 15908
  modified_base 1..9485: mod_base = OTHER; note = Each t is m1f
  source 1..9485: mol_type = other RNA

SEQ ID NO: 17506 - RNA, 9485 nt, synthetic construct; identical to SEQ ID NO: 15909
  modified_base 1..9485: mod_base = OTHER; note = Each t is m1f
  source 1..9485: mol_type = other RNA

SEQ ID NO: 17507 - RNA, 9485 nt, synthetic construct; identical to SEQ ID NO: 15910
  modified_base 1..9485: mod_base = OTHER; note = Each t is m1f
  source 1..9485: mol_type = other RNA

SEQ ID NO: 17508 - RNA, 9485 nt, synthetic construct; identical to SEQ ID NO: 15911
  modified_base 1..9485: mod_base = OTHER; note = Each t is m1f
  source 1..9485: mol_type = other RNA

SEQ ID NO: 17509 - RNA, 9485 nt, synthetic construct; identical to SEQ ID NO: 15912
  modified_base 1..9485: mod_base = OTHER; note = Each t is m1f
  source 1..9485: mol_type = other RNA

SEQ ID NO: 17510 - RNA, 9485 nt, synthetic construct; identical to SEQ ID NO: 15913
  modified_base 1..9485: mod_base = OTHER; note = Each t is m1f
  source 1..9485: mol_type = other RNA

SEQ ID NO: 17511 - RNA, 9485 nt, synthetic construct; identical to SEQ ID NO: 15914
  modified_base 1..9485: mod_base = OTHER; note = Each t is m1f
  source 1..9485: mol_type = other RNA

SEQ ID NO: 17512 - RNA, 9485 nt, synthetic construct; identical to SEQ ID NO: 15915
  modified_base 1..9485: mod_base = OTHER; note = Each t is m1f
  source 1..9485: mol_type = other RNA

SEQ ID NO: 17513 - RNA, 9485 nt, synthetic construct; identical to SEQ ID NO: 15916
  modified_base 1..9485: mod_base = OTHER; note = Each t is m1f
  source 1..9485: mol_type = other RNA

SEQ ID NO: 17514 - RNA, 9485 nt, synthetic construct; identical to SEQ ID NO: 15917
  modified_base 1..9485: mod_base = OTHER; note = Each t is m1f
  source 1..9485: mol_type = other RNA

SEQ ID NO: 17515 - RNA, 9485 nt, synthetic construct; identical to SEQ ID NO: 15918
  modified_base 1..9485: mod_base = OTHER; note = Each t is m1f
  source 1..9485: mol_type = other RNA

SEQ ID NO: 17516 - RNA, 9485 nt, synthetic construct; identical to SEQ ID NO: 15919
  modified_base 1..9485: mod_base = OTHER; note = Each t is m1f
  source 1..9485: mol_type = other RNA

SEQ ID NO: 17517 - RNA, 9485 nt, synthetic construct; identical to SEQ ID NO: 15920
  modified_base 1..9485: mod_base = OTHER; note = Each t is m1f
  source 1..9485: mol_type = other RNA

SEQ ID NO: 17518 - RNA, 9485 nt, synthetic construct; identical to SEQ ID NO: 15921
  modified_base 1..9485: mod_base = OTHER; note = Each t is m1f
  source 1..9485: mol_type = other RNA

SEQ ID NO: 17519 - RNA, 9485 nt, synthetic construct; identical to SEQ ID NO: 15922
  modified_base 1..9485: mod_base = OTHER; note = Each t is m1f
  source 1..9485: mol_type = other RNA

SEQ ID NO: 17520 - RNA, 9485 nt, synthetic construct; identical to SEQ ID NO: 15923
  modified_base 1..9485: mod_base = OTHER; note = Each t is m1f
  source 1..9485: mol_type = other RNA

SEQ ID NO: 17521 - RNA, 9485 nt, synthetic construct; identical to SEQ ID NO: 15924
  modified_base 1..9485: mod_base = OTHER; note = Each t is m1f
  source 1..9485: mol_type = other RNA

SEQ ID NO: 17522 - RNA, 9485 nt, synthetic construct; identical to SEQ ID NO: 15925
  modified_base 1..9485: mod_base = OTHER; note = Each t is m1f
  source 1..9485: mol_type = other RNA

SEQ ID NO: 17523 - RNA, 9485 nt, synthetic construct; identical to SEQ ID NO: 15926
  modified_base 1..9485: mod_base = OTHER; note = Each t is m1f
  source 1..9485: mol_type = other RNA

SEQ ID NO: 17524 - RNA, 9485 nt, synthetic construct; identical to SEQ ID NO: 15927
  modified_base 1..9485: mod_base = OTHER; note = Each t is m1f
  source 1..9485: mol_type = other RNA

SEQ ID NO: 17525 - RNA, 9485 nt, synthetic construct; identical to SEQ ID NO: 15928
  modified_base 1..9485: mod_base = OTHER; note = Each t is m1f
  source 1..9485: mol_type = other RNA

SEQ ID NO: 17526 - RNA, 9485 nt, synthetic construct; identical to SEQ ID NO: 15929
  modified_base 1..9485: mod_base = OTHER; note = Each t is m1f
  source 1..9485: mol_type = other RNA

SEQ ID NO: 17527 - RNA, 9485 nt, synthetic construct; identical to SEQ ID NO: 15930
  modified_base 1..9485: mod_base = OTHER; note = Each t is m1f
  source 1..9485: mol_type = other RNA

SEQ ID NO: 17528 - RNA, 9485 nt, synthetic construct; identical to SEQ ID NO: 15931
  modified_base 1..9485: mod_base = OTHER; note = Each t is m1f
  source 1..9485: mol_type = other RNA

SEQ ID NO: 17529 - RNA, 9485 nt, synthetic construct; identical to SEQ ID NO: 15932
  modified_base 1..9485: mod_base = OTHER; note = Each t is m1f
  source 1..9485: mol_type = other RNA

SEQ ID NO: 17530 - RNA, 9485 nt, synthetic construct; identical to SEQ ID NO: 15933
  modified_base 1..9485: mod_base = OTHER; note = Each t is m1f
  source 1..9485: mol_type = other RNA

SEQ ID NO: 17531 - RNA, 9485 nt, synthetic construct; identical to SEQ ID NO: 15934
  modified_base 1..9485: mod_base = OTHER; note = Each t is m1f
  source 1..9485: mol_type = other RNA

SEQ ID NO: 17532 - RNA, 9485 nt, synthetic construct; identical to SEQ ID NO: 15935
  modified_base 1..9485: mod_base = OTHER; note = Each t is m1f
  source 1..9485: mol_type = other RNA

SEQ ID NO: 17533 - RNA, 9485 nt, synthetic construct; identical to SEQ ID NO: 15936
  modified_base 1..9485: mod_base = OTHER; note = Each t is m1f
  source 1..9485: mol_type = other RNA

SEQ ID NO: 17534 - RNA, 9485 nt, synthetic construct; identical to SEQ ID NO: 15937
  modified_base 1..9485: mod_base = OTHER; note = Each t is m1f
  source 1..9485: mol_type = other RNA

SEQ ID NO: 17535 - RNA, 9485 nt, synthetic construct; identical to SEQ ID NO: 15938
  modified_base 1..9485: mod_base = OTHER; note = Each t is m1f
  source 1..9485: mol_type = other RNA

SEQ ID NO: 17536 - RNA, 9485 nt, synthetic construct; identical to SEQ ID NO: 15939
  modified_base 1..9485: mod_base = OTHER; note = Each t is m1f
  source 1..9485: mol_type = other RNA

SEQ ID NO: 17537 - RNA, 9485 nt, synthetic construct; identical to SEQ ID NO: 15940
  modified_base 1..9485: mod_base = OTHER; note = Each t is m1f
  source 1..9485: mol_type = other RNA

SEQ ID NO: 17538 - RNA, 9485 nt, synthetic construct; identical to SEQ ID NO: 15941
  modified_base 1..9485: mod_base = OTHER; note = Each t is m1f
  source 1..9485: mol_type = other RNA

SEQ ID NO: 17539 - RNA, 9485 nt, synthetic construct; identical to SEQ ID NO: 15942
  modified_base 1..9485: mod_base = OTHER; note = Each t is m1f
  source 1..9485: mol_type = other RNA

SEQ ID NO: 17540 - RNA, 9485 nt, synthetic construct; identical to SEQ ID NO: 15943
  modified_base 1..9485: mod_base = OTHER; note = Each t is m1f
  source 1..9485: mol_type = other RNA

SEQ ID NO: 17541 - RNA, 9485 nt, synthetic construct; identical to SEQ ID NO: 15944
  modified_base 1..9485: mod_base = OTHER; note = Each t is m1f
  source 1..9485: mol_type = other RNA

SEQ ID NO: 17542 - RNA, 9485 nt, synthetic construct; identical to SEQ ID NO: 15945
  modified_base 1..9485: mod_base = OTHER; note = Each t is m1f
  source 1..9485: mol_type = other RNA

SEQ ID NO: 17543 - RNA, 9485 nt, synthetic construct; identical to SEQ ID NO: 15946
  modified_base 1..9485: mod_base = OTHER; note = Each t is m1f
  source 1..9485: mol_type = other RNA

SEQ ID NO: 17544 - RNA, 9485 nt, synthetic construct; identical to SEQ ID NO: 15947
  modified_base 1..9485: mod_base = OTHER; note = Each t is m1f
  source 1..9485: mol_type = other RNA

SEQ ID NO: 17545 - RNA, 9485 nt, synthetic construct; identical to SEQ ID NO: 15948
  modified_base 1..9485: mod_base = OTHER; note = Each t is m1f
  source 1..9485: mol_type = other RNA

SEQ ID NO: 17546 - RNA, 9485 nt, synthetic construct; identical to SEQ ID NO: 15949
  modified_base 1..9485: mod_base = OTHER; note = Each t is m1f
  source 1..9485: mol_type = other RNA

SEQ ID NO: 17547 - RNA, 9485 nt, synthetic construct; identical to SEQ ID NO: 15950
  modified_base 1..9485: mod_base = OTHER; note = Each t is m1f
  source 1..9485: mol_type = other RNA

SEQ ID NO: 17548 - RNA, 9485 nt, synthetic construct; identical to SEQ ID NO: 15951
  modified_base 1..9485: mod_base = OTHER; note = Each t is m1f
  source 1..9485: mol_type = other RNA

SEQ ID NO: 17549 - RNA, 9485 nt, synthetic construct; identical to SEQ ID NO: 15952
  modified_base 1..9485: mod_base = OTHER; note = Each t is m1f
  source 1..9485: mol_type = other RNA

SEQ ID NO: 17550 - RNA, 9485 nt, synthetic construct; identical to SEQ ID NO: 15953
  modified_base 1..9485: mod_base = OTHER; note = Each t is m1f
  source 1..9485: mol_type = other RNA

SEQ ID NO: 17551 - RNA, 9485 nt, synthetic construct; identical to SEQ ID NO: 15954
  modified_base 1..9485: mod_base = OTHER; note = Each t is m1f
  source 1..9485: mol_type = other RNA

SEQ ID NO: 17552 - RNA, 9503 nt, synthetic construct; identical to SEQ ID NO: 15955
  modified_base 1..9503: mod_base = OTHER; note = Each t is m1f
  source 1..9503: mol_type = other RNA

SEQ ID NO: 17553 - RNA, 9503 nt, synthetic construct; identical to SEQ ID NO: 15956
  modified_base 1..9503: mod_base = OTHER; note = Each t is m1f
  source 1..9503: mol_type = other RNA

SEQ ID NO: 17554 - RNA, 9485 nt, synthetic construct; identical to SEQ ID NO: 15957
  modified_base 1..9485: mod_base = OTHER; note = Each t is m1f
  source 1..9485: mol_type = other RNA

SEQ ID NO: 17555 - RNA, 9485 nt, synthetic construct; identical to SEQ ID NO: 15958
  modified_base 1..9485: mod_base = OTHER; note = Each t is m1f
  source 1..9485: mol_type = other RNA

SEQ ID NO: 17556 - RNA, 9485 nt, synthetic construct; identical to SEQ ID NO: 15959
  modified_base 1..9485: mod_base = OTHER; note = Each t is m1f
  source 1..9485: mol_type = other RNA

SEQ ID NO: 17557 - RNA, 9485 nt, synthetic construct; identical to SEQ ID NO: 15960
  modified_base 1..9485: mod_base = OTHER; note = Each t is m1f
  source 1..9485: mol_type = other RNA

SEQ ID NO: 17558 - RNA, 9485 nt, synthetic construct; identical to SEQ ID NO: 15961
  modified_base 1..9485: mod_base = OTHER; note = Each t is m1f
  source 1..9485: mol_type = other RNA

SEQ ID NO: 17559 - RNA, 9485 nt, synthetic construct; identical to SEQ ID NO: 15962
  modified_base 1..9485: mod_base = OTHER; note = Each t is m1f
  source 1..9485: mol_type = other RNA

SEQ ID NO: 17560 - RNA, 9485 nt, synthetic construct; identical to SEQ ID NO: 15963
  modified_base 1..9485: mod_base = OTHER; note = Each t is m1f
  source 1..9485: mol_type = other RNA

SEQ ID NO: 17561 - RNA, 9485 nt, synthetic construct; identical to SEQ ID NO: 15964
  modified_base 1..9485: mod_base = OTHER; note = Each t is m1f
  source 1..9485: mol_type = other RNA

SEQ ID NO: 17562 - RNA, 9485 nt, synthetic construct; identical to SEQ ID NO: 15965
  modified_base 1..9485: mod_base = OTHER; note = Each t is m1f
  source 1..9485: mol_type = other RNA

SEQ ID NO: 17563 - RNA, 9485 nt, synthetic construct; identical to SEQ ID NO: 15966
  modified_base 1..9485: mod_base = OTHER; note = Each t is m1f
  source 1..9485: mol_type = other RNA

SEQ ID NO: 17564 - RNA, 9485 nt, synthetic construct; identical to SEQ ID NO: 15967
  modified_base 1..9485: mod_base = OTHER; note = Each t is m1f
  source 1..9485: mol_type = other RNA

SEQ ID NO: 17565 - RNA, 9485 nt, synthetic construct; identical to SEQ ID NO: 15968
  modified_base 1..9485: mod_base = OTHER; note = Each t is m1f
  source 1..9485: mol_type = other RNA

SEQ ID NO: 17566 - RNA, 9485 nt, synthetic construct; identical to SEQ ID NO: 15969
  modified_base 1..9485: mod_base = OTHER; note = Each t is m1f
  source 1..9485: mol_type = other RNA

SEQ ID NO: 17567 - RNA, 9485 nt, synthetic construct; identical to SEQ ID NO: 15970
  modified_base 1..9485: mod_base = OTHER; note = Each t is m1f
  source 1..9485: mol_type = other RNA

SEQ ID NO: 17568 - RNA, 9485 nt, synthetic construct; identical to SEQ ID NO: 15971
  modified_base 1..9485: mod_base = OTHER; note = Each t is m1f
  source 1..9485: mol_type = other RNA

SEQ ID NO: 17569 - RNA, 9485 nt, synthetic construct; identical to SEQ ID NO: 15972
  modified_base 1..9485: mod_base = OTHER; note = Each t is m1f
  source 1..9485: mol_type = other RNA

SEQ ID NO: 17570 - RNA, 9485 nt, synthetic construct; identical to SEQ ID NO: 15973
  modified_base 1..9485: mod_base = OTHER; note = Each t is m1f
  source 1..9485: mol_type = other RNA

SEQ ID NO: 17571 - RNA, 9485 nt, synthetic construct; identical to SEQ ID NO: 15974
  modified_base 1..9485: mod_base = OTHER; note = Each t is m1f
  source 1..9485: mol_type = other RNA

SEQ ID NO: 17572 - RNA, 9485 nt, synthetic construct; identical to SEQ ID NO: 15975
  modified_base 1..9485: mod_base = OTHER; note = Each t is m1f
  source 1..9485: mol_type = other RNA

SEQ ID NO: 17573 - RNA, 9485 nt, synthetic construct; identical to SEQ ID NO: 15976
  modified_base 1..9485: mod_base = OTHER; note = Each t is m1f
  source 1..9485: mol_type = other RNA

SEQ ID NO: 17574 - RNA, 9485 nt, synthetic construct; identical to SEQ ID NO: 15977
  modified_base 1..9485: mod_base = OTHER; note = Each t is m1f
  source 1..9485: mol_type = other RNA

SEQ ID NO: 17575 - RNA, 9485 nt, synthetic construct; identical to SEQ ID NO: 15978
  modified_base 1..9485: mod_base = OTHER; note = Each t is m1f
  source 1..9485: mol_type = other RNA

SEQ ID NO: 17576 - RNA, 9485 nt, synthetic construct; identical to SEQ ID NO: 15979
  modified_base 1..9485: mod_base = OTHER; note = Each t is m1f
  source 1..9485: mol_type = other RNA

SEQ ID NO: 17577 - RNA, 9485 nt, synthetic construct; identical to SEQ ID NO: 15980
  modified_base 1..9485: mod_base = OTHER; note = Each t is m1f
  source 1..9485: mol_type = other RNA

SEQ ID NO: 17578 - RNA, 9485 nt, synthetic construct; identical to SEQ ID NO: 15981
  modified_base 1..9485: mod_base = OTHER; note = Each t is m1f
  source 1..9485: mol_type = other RNA

SEQ ID NO: 17579 - RNA, 9485 nt, synthetic construct; identical to SEQ ID NO: 15982
  modified_base 1..9485: mod_base = OTHER; note = Each t is m1f
  source 1..9485: mol_type = other RNA

SEQ ID NO: 17580 - RNA, 9485 nt, synthetic construct; identical to SEQ ID NO: 15983
  modified_base 1..9485: mod_base = OTHER; note = Each t is m1f
  source 1..9485: mol_type = other RNA

SEQ ID NO: 17581 - RNA, 9485 nt, synthetic construct; identical to SEQ ID NO: 15984
  modified_base 1..9485: mod_base = OTHER; note = Each t is m1f
  source 1..9485: mol_type = other RNA

SEQ ID NO: 17582 - RNA, 9485 nt, synthetic construct; identical to SEQ ID NO: 15985
  modified_base 1..9485: mod_base = OTHER; note = Each t is m1f
  source 1..9485: mol_type = other RNA

SEQ ID NO: 17583 - RNA, 9485 nt, synthetic construct; identical to SEQ ID NO: 15986
  modified_base 1..9485: mod_base = OTHER; note = Each t is m1f
  source 1..9485: mol_type = other RNA

SEQ ID NO: 17584 - RNA, 9485 nt, synthetic construct; identical to SEQ ID NO: 15987
  modified_base 1..9485: mod_base = OTHER; note = Each t is m1f
  source 1..9485: mol_type = other RNA

SEQ ID NO: 17585 - RNA, 9485 nt, synthetic construct; identical to SEQ ID NO: 15988
  modified_base 1..9485: mod_base = OTHER; note = Each t is m1f
  source 1..9485: mol_type = other RNA

SEQ ID NO: 17586 - RNA, 9485 nt, synthetic construct; identical to SEQ ID NO: 15989
  modified_base 1..9485: mod_base = OTHER; note = Each t is m1f
  source 1..9485: mol_type = other RNA

SEQ ID NO: 17587 - RNA, 9485 nt, synthetic construct; identical to SEQ ID NO: 15990
  modified_base 1..9485: mod_base = OTHER; note = Each t is m1f
  source 1..9485: mol_type = other RNA

SEQ ID NO: 17588 - RNA, 9485 nt, synthetic construct; identical to SEQ ID NO: 15991
  modified_base 1..9485: mod_base = OTHER; note = Each t is m1f
  source 1..9485: mol_type = other RNA

SEQ ID NO: 17589 - RNA, 9485 nt, synthetic construct; identical to SEQ ID NO: 15992
  modified_base 1..9485: mod_base = OTHER; note = Each t is m1f
  source 1..9485: mol_type = other RNA

SEQ ID NO: 17590 - RNA, 9485 nt, synthetic construct; identical to SEQ ID NO: 15993
  modified_base 1..9485: mod_base = OTHER; note = Each t is m1f
  source 1..9485: mol_type = other RNA

SEQ ID NO: 17591 - RNA, 9485 nt, synthetic construct; identical to SEQ ID NO: 15994
  modified_base 1..9485: mod_base = OTHER; note = Each t is m1f
  source 1..9485: mol_type = other RNA

SEQ ID NO: 17592 - RNA, 9485 nt, synthetic construct; identical to SEQ ID NO: 15995
  modified_base 1..9485: mod_base = OTHER; note = Each t is m1f
  source 1..9485: mol_type = other RNA

SEQ ID NO: 17593 - RNA, 9485 nt, synthetic construct; identical to SEQ ID NO: 15996
  modified_base 1..9485: mod_base = OTHER; note = Each t is m1f
  source 1..9485: mol_type = other RNA

SEQ ID NO: 17594 - RNA, 9485 nt, synthetic construct; identical to SEQ ID NO: 15997
  modified_base 1..9485: mod_base = OTHER; note = Each t is m1f
  source 1..9485: mol_type = other RNA

SEQ ID NO: 17595 - RNA, 9485 nt, synthetic construct; identical to SEQ ID NO: 15998
  modified_base 1..9485: mod_base = OTHER; note = Each t is m1f
  source 1..9485: mol_type = other RNA

SEQ ID NO: 17596 - RNA, 9485 nt, synthetic construct; identical to SEQ ID NO: 15999
  modified_base 1..9485: mod_base = OTHER; note = Each t is m1f
  source 1..9485: mol_type = other RNA

SEQ ID NO: 17597 - RNA, 9485 nt, synthetic construct; identical to SEQ ID NO: 16000
  modified_base 1..9485: mod_base = OTHER; note = Each t is m1f
  source 1..9485: mol_type = other RNA

SEQ ID NO: 17598 - RNA, 9485 nt, synthetic construct; identical to SEQ ID NO: 16001
  modified_base 1..9485: mod_base = OTHER; note = Each t is m1f
  source 1..9485: mol_type = other RNA

SEQ ID NO: 17599 - RNA, 9539 nt, synthetic construct; identical to SEQ ID NO: 16002
  modified_base 1..9539: mod_base = OTHER; note = Each t is m1f
  source 1..9539: mol_type = other RNA

SEQ ID NO: 17600 - RNA, 9485 nt, synthetic construct; identical to SEQ ID NO: 16003
  modified_base 1..9485: mod_base = OTHER; note = Each t is m1f
  source 1..9485: mol_type = other RNA

SEQ ID NO: 17601 - RNA, 9485 nt, synthetic construct; identical to SEQ ID NO: 16004
  modified_base 1..9485: mod_base = OTHER; note = Each t is m1f
  source 1..9485: mol_type = other RNA

SEQ ID NO: 17602 - RNA, 9485 nt, synthetic construct; identical to SEQ ID NO: 16005
  modified_base 1..9485: mod_base = OTHER; note = Each t is m1f
  source 1..9485: mol_type = other RNA

SEQ ID NO: 17603 - RNA, 9485 nt, synthetic construct; identical to SEQ ID NO: 16006
  modified_base 1..9485: mod_base = OTHER; note = Each t is m1f
  source 1..9485: mol_type = other RNA

SEQ ID NO: 17604 - RNA, 9485 nt, synthetic construct; identical to SEQ ID NO: 16007
  modified_base 1..9485: mod_base = OTHER; note = Each t is m1f
  source 1..9485: mol_type = other RNA

SEQ ID NO: 17605 - RNA, 9485 nt, synthetic construct; identical to SEQ ID NO: 16008
  modified_base 1..9485: mod_base = OTHER; note = Each t is m1f
  source 1..9485: mol_type = other RNA

SEQ ID NO: 17606 - RNA, 9485 nt, synthetic construct; identical to SEQ ID NO: 16009
  modified_base 1..9485: mod_base = OTHER; note = Each t is m1f
  source 1..9485: mol_type = other RNA

SEQ ID NO: 17607 - RNA, 9485 nt, synthetic construct; identical to SEQ ID NO: 16010
  modified_base 1..9485: mod_base = OTHER; note = Each t is m1f
  source 1..9485: mol_type = other RNA

SEQ ID NO: 17608 - RNA, 9485 nt, synthetic construct; identical to SEQ ID NO: 16011
  modified_base 1..9485: mod_base = OTHER; note = Each t is m1f
  source 1..9485: mol_type = other RNA

SEQ ID NO: 17609 - RNA, 9485 nt, synthetic construct; identical to SEQ ID NO: 16012
  modified_base 1..9485: mod_base = OTHER; note = Each t is m1f
  source 1..9485: mol_type = other RNA

SEQ ID NO: 17610 - RNA, 9485 nt, synthetic construct; identical to SEQ ID NO: 16013
  modified_base 1..9485: mod_base = OTHER; note = Each t is m1f
  source 1..9485: mol_type = other RNA

SEQ ID NO: 17611 - RNA, 9485 nt, synthetic construct; identical to SEQ ID NO: 16014
  modified_base 1..9485: mod_base = OTHER; note = Each t is m1f
  source 1..9485: mol_type = other RNA

SEQ ID NO: 17612 - RNA, 9485 nt, synthetic construct; identical to SEQ ID NO: 16015
  modified_base 1..9485: mod_base = OTHER; note = Each t is m1f
  source 1..9485: mol_type = other RNA

SEQ ID NO: 17613 - RNA, 9485 nt, synthetic construct; identical to SEQ ID NO: 16016
  modified_base 1..9485: mod_base = OTHER; note = Each t is m1f
  source 1..9485: mol_type = other RNA

SEQ ID NO: 17614 - RNA, 9485 nt, synthetic construct; identical to SEQ ID NO: 16017
  modified_base 1..9485: mod_base = OTHER; note = Each t is m1f
  source 1..9485: mol_type = other RNA

SEQ ID NO: 17615 - RNA, 9485 nt, synthetic construct; identical to SEQ ID NO: 16018
  modified_base 1..9485: mod_base = OTHER; note = Each t is m1f
  source 1..9485: mol_type = other RNA

SEQ ID NO: 17616 - RNA, 9485 nt, synthetic construct; identical to SEQ ID NO: 16019
  modified_base 1..9485: mod_base = OTHER; note = Each t is m1f
  source 1..9485: mol_type = other RNA

SEQ ID NO: 17617 - RNA, 9485 nt, synthetic construct; identical to SEQ ID NO: 16020
  modified_base 1..9485: mod_base = OTHER; note = Each t is m1f
  source 1..9485: mol_type = other RNA

SEQ ID NO: 17618 - RNA, 9485 nt, synthetic construct; identical to SEQ ID NO: 16021
  modified_base 1..9485: mod_base = OTHER; note = Each t is m1f
  source 1..9485: mol_type = other RNA

SEQ ID NO: 17619 - RNA, 9485 nt, synthetic construct; identical to SEQ ID NO: 16022
  modified_base 1..9485: mod_base = OTHER; note = Each t is m1f
  source 1..9485: mol_type = other RNA

SEQ ID NO: 17620 - RNA, 9485 nt, synthetic construct; identical to SEQ ID NO: 16023
  modified_base 1..9485: mod_base = OTHER; note = Each t is m1f
  source 1..9485: mol_type = other RNA

SEQ ID NO: 17621 - RNA, 9485 nt, synthetic construct; identical to SEQ ID NO: 16024
  modified_base 1..9485: mod_base = OTHER; note = Each t is m1f
  source 1..9485: mol_type = other RNA

SEQ ID NO: 17622 - RNA, 9485 nt, synthetic construct; identical to SEQ ID NO: 16025
  modified_base 1..9485: mod_base = OTHER; note = Each t is m1f
  source 1..9485: mol_type = other RNA

SEQ ID NO: 17623 - RNA, 9485 nt, synthetic construct; identical to SEQ ID NO: 16026
  modified_base 1..9485: mod_base = OTHER; note = Each t is m1f
  source 1..9485: mol_type = other RNA

SEQ ID NO: 17624 - RNA, 9485 nt, synthetic construct; identical to SEQ ID NO: 16027
  modified_base 1..9485: mod_base = OTHER; note = Each t is m1f
  source 1..9485: mol_type = other RNA

SEQ ID NO: 17625 - RNA, 9485 nt, synthetic construct; identical to SEQ ID NO: 16028
  modified_base 1..9485: mod_base = OTHER; note = Each t is m1f
  source 1..9485: mol_type = other RNA

SEQ ID NO: 17626 - RNA, 9557 nt, synthetic construct; identical to SEQ ID NO: 16029
  modified_base 1..9557: mod_base = OTHER; note = Each t is m1f
  source 1..9557: mol_type = other RNA

SEQ ID NO: 17627 - RNA, 9485 nt, synthetic construct; identical to SEQ ID NO: 16030
  modified_base 1..9485: mod_base = OTHER; note = Each t is m1f
  source 1..9485: mol_type = other RNA

SEQ ID NO: 17628 - RNA, 9485 nt, synthetic construct; identical to SEQ ID NO: 16031
  modified_base 1..9485: mod_base = OTHER; note = Each t is m1f
  source 1..9485: mol_type = other RNA

SEQ ID NO: 17629 - RNA, 9485 nt, synthetic construct; identical to SEQ ID NO: 16032
  modified_base 1..9485: mod_base = OTHER; note = Each t is m1f
  source 1..9485: mol_type = other RNA

SEQ ID NO: 17630 - RNA, 9485 nt, synthetic construct; identical to SEQ ID NO: 16033
  modified_base 1..9485: mod_base = OTHER; note = Each t is m1f
  source 1..9485: mol_type = other RNA

SEQ ID NO: 17631 - RNA, 9485 nt, synthetic construct; identical to SEQ ID NO: 16034
  modified_base 1..9485: mod_base = OTHER; note = Each t is m1f
  source 1..9485: mol_type = other RNA

SEQ ID NO: 17632 - RNA, 9485 nt, synthetic construct; identical to SEQ ID NO: 16035
  modified_base 1..9485: mod_base = OTHER; note = Each t is m1f
  source 1..9485: mol_type = other RNA

SEQ ID NO: 17633 - RNA, 9485 nt, synthetic construct; identical to SEQ ID NO: 16036
  modified_base 1..9485: mod_base = OTHER; note = Each t is m1f
  source 1..9485: mol_type = other RNA

SEQ ID NO: 17634 - RNA, 9485 nt, synthetic construct; identical to SEQ ID NO: 16037
  modified_base 1..9485: mod_base = OTHER; note = Each t is m1f
  source 1..9485: mol_type = other RNA

SEQ ID NO: 17635 - RNA, 9485 nt, synthetic construct; identical to SEQ ID NO: 16038
  modified_base 1..9485: mod_base = OTHER; note = Each t is m1f
  source 1..9485: mol_type = other RNA

SEQ ID NO: 17636 - RNA, 9485 nt, synthetic construct; identical to SEQ ID NO: 16039
  modified_base 1..9485: mod_base = OTHER; note = Each t is m1f
  source 1..9485: mol_type = other RNA

SEQ ID NO: 17637 - RNA, 9485 nt, synthetic construct; identical to SEQ ID NO: 16040
  modified_base 1..9485: mod_base = OTHER; note = Each t is m1f
  source 1..9485: mol_type = other RNA

SEQ ID NO: 17638 - RNA, 9485 nt, synthetic construct; identical to SEQ ID NO: 16041
  modified_base 1..9485: mod_base = OTHER; note = Each t is m1f
  source 1..9485: mol_type = other RNA

SEQ ID NO: 17639 - RNA, 9485 nt, synthetic construct; identical to SEQ ID NO: 16042
  modified_base 1..9485: mod_base = OTHER; note = Each t is m1f
  source 1..9485: mol_type = other RNA

SEQ ID NO: 17640 - RNA, 9485 nt, synthetic construct; identical to SEQ ID NO: 16043
  modified_base 1..9485: mod_base = OTHER; note = Each t is m1f
  source 1..9485: mol_type = other RNA

SEQ ID NO: 17641 - RNA, 9485 nt, synthetic construct; identical to SEQ ID NO: 16044
  modified_base 1..9485: mod_base = OTHER; note = Each t is m1f
  source 1..9485: mol_type = other RNA

SEQ ID NO: 17642 - RNA, 9485 nt, synthetic construct; identical to SEQ ID NO: 16045
  modified_base 1..9485: mod_base = OTHER; note = Each t is m1f
  source 1..9485: mol_type = other RNA

SEQ ID NO: 17643 - RNA, 9485 nt, synthetic construct; identical to SEQ ID NO: 16046
  modified_base 1..9485: mod_base = OTHER; note = Each t is m1f
  source 1..9485: mol_type = other RNA

SEQ ID NO: 17644 - RNA, 9485 nt, synthetic construct; identical to SEQ ID NO: 16047
  modified_base 1..9485: mod_base = OTHER; note = Each t is m1f
  source 1..9485: mol_type = other RNA

SEQ ID NO: 17645 - RNA, 9485 nt, synthetic construct; identical to SEQ ID NO: 16048
  modified_base 1..9485: mod_base = OTHER; note = Each t is m1f
  source 1..9485: mol_type = other RNA

SEQ ID NO: 17646 - RNA, 9485 nt, synthetic construct; identical to SEQ ID NO: 16049
  modified_base 1..9485: mod_base = OTHER; note = Each t is m1f
  source 1..9485: mol_type = other RNA

SEQ ID NO: 17647 - RNA, 9485 nt, synthetic construct; identical to SEQ ID NO: 16050
  modified_base 1..9485: mod_base = OTHER; note = Each t is m1f
  source 1..9485: mol_type = other RNA

SEQ ID NO: 17648 - RNA, 9485 nt, synthetic construct; identical to SEQ ID NO: 16051
  modified_base 1..9485: mod_base = OTHER; note = Each t is m1f
  source 1..9485: mol_type = other RNA

SEQ ID NO: 17649 - RNA, 9485 nt, synthetic construct; identical to SEQ ID NO: 16052
  modified_base 1..9485: mod_base = OTHER; note = Each t is m1f
  source 1..9485: mol_type = other RNA

SEQ ID NO: 17650 - RNA, 9485 nt, synthetic construct; identical to SEQ ID NO: 16053
  modified_base 1..9485: mod_base = OTHER; note = Each t is m1f
  source 1..9485: mol_type = other RNA

SEQ ID NO: 17651 - RNA, 9485 nt, synthetic construct; identical to SEQ ID NO: 16054
  modified_base 1..9485: mod_base = OTHER; note = Each t is m1f
  source 1..9485: mol_type = other RNA

SEQ ID NO: 17652 - RNA, 9485 nt, synthetic construct; identical to SEQ ID NO: 16055
  modified_base 1..9485: mod_base = OTHER; note = Each t is m1f
  source 1..9485: mol_type = other RNA

SEQ ID NO: 17653 - RNA, 9485 nt, synthetic construct; identical to SEQ ID NO: 16056
  modified_base 1..9485: mod_base = OTHER; note = Each t is m1f
  source 1..9485: mol_type = other RNA

SEQ ID NO: 17654 - RNA, 9485 nt, synthetic construct; identical to SEQ ID NO: 16057
  modified_base 1..9485: mod_base = OTHER; note = Each t is m1f
  source 1..9485: mol_type = other RNA

SEQ ID NO: 17655 - RNA, 9485 nt, synthetic construct; identical to SEQ ID NO: 16058
  modified_base 1..9485: mod_base = OTHER; note = Each t is m1f
  source 1..9485: mol_type = other RNA

SEQ ID NO: 17656 - RNA, 9485 nt, synthetic construct; identical to SEQ ID NO: 16059
  modified_base 1..9485: mod_base = OTHER; note = Each t is m1f
  source 1..9485: mol_type = other RNA

SEQ ID NO: 17657 - RNA, 9485 nt, synthetic construct; identical to SEQ ID NO: 16060
  modified_base 1..9485: mod_base = OTHER; note = Each t is m1f
  source 1..9485: mol_type = other RNA

SEQ ID NO: 17658 - RNA, 9485 nt, synthetic construct; identical to SEQ ID NO: 16061
  modified_base 1..9485: mod_base = OTHER; note = Each t is m1f
  source 1..9485: mol_type = other RNA

SEQ ID NO: 17659 - RNA, 9485 nt, synthetic construct; identical to SEQ ID NO: 16062
  modified_base 1..9485: mod_base = OTHER; note = Each t is m1f
  source 1..9485: mol_type = other RNA

SEQ ID NO: 17660 - RNA, 9485 nt, synthetic construct; identical to SEQ ID NO: 16063
  modified_base 1..9485: mod_base = OTHER; note = Each t is m1f
  source 1..9485: mol_type = other RNA

SEQ ID NO: 17661 - RNA, 9485 nt, synthetic construct; identical to SEQ ID NO: 16064
  modified_base 1..9485: mod_base = OTHER; note = Each t is m1f
  source 1..9485: mol_type = other RNA

SEQ ID NO: 17662 - RNA, 9485 nt, synthetic construct; identical to SEQ ID NO: 16065
  modified_base 1..9485: mod_base = OTHER; note = Each t is m1f
  source 1..9485: mol_type = other RNA

SEQ ID NO: 17663 - RNA, 9485 nt, synthetic construct; identical to SEQ ID NO: 16066
  modified_base 1..9485: mod_base = OTHER; note = Each t is m1f
  source 1..9485: mol_type = other RNA

SEQ ID NO: 17664 - RNA, 9485 nt, synthetic construct; identical to SEQ ID NO: 16067
  modified_base 1..9485: mod_base = OTHER; note = Each t is m1f
  source 1..9485: mol_type = other RNA

SEQ ID NO: 17665 - RNA, 9485 nt, synthetic construct; identical to SEQ ID NO: 16068
  modified_base 1..9485: mod_base = OTHER; note = Each t is m1f
  source 1..9485: mol_type = other RNA

SEQ ID NO: 17666 - RNA, 9485 nt, synthetic construct; identical to SEQ ID NO: 16069
  modified_base 1..9485: mod_base = OTHER; note = Each t is m1f
  source 1..9485: mol_type = other RNA

SEQ ID NO: 17667 - RNA, 9485 nt, synthetic construct; identical to SEQ ID NO: 16070
  modified_base 1..9485: mod_base = OTHER; note = Each t is m1f
  source 1..9485: mol_type = other RNA

SEQ ID NO: 17668 - RNA, 9485 nt, synthetic construct; identical to SEQ ID NO: 16071
  modified_base 1..9485: mod_base = OTHER; note = Each t is m1f
  source 1..9485: mol_type = other RNA

SEQ ID NO: 17669 - RNA, 9485 nt, synthetic construct; identical to SEQ ID NO: 16072
  modified_base 1..9485: mod_base = OTHER; note = Each t is m1f
  source 1..9485: mol_type = other RNA

SEQ ID NO: 17670 - RNA, 9485 nt, synthetic construct; identical to SEQ ID NO: 16073
  modified_base 1..9485: mod_base = OTHER; note = Each t is m1f
  source 1..9485: mol_type = other RNA

SEQ ID NO: 17671 - RNA, 9485 nt, synthetic construct; identical to SEQ ID NO: 16074
  modified_base 1..9485: mod_base = OTHER; note = Each t is m1f
  source 1..9485: mol_type = other RNA

SEQ ID NO: 17672 - RNA, 9485 nt, synthetic construct; identical to SEQ ID NO: 16075
  modified_base 1..9485: mod_base = OTHER; note = Each t is m1f
  source 1..9485: mol_type = other RNA

SEQ ID NO: 17673 - RNA, 9485 nt, synthetic construct; identical to SEQ ID NO: 16076
  modified_base 1..9485: mod_base = OTHER; note = Each t is m1f
  source 1..9485: mol_type = other RNA

SEQ ID NO: 17674 - RNA, 9485 nt, synthetic construct; identical to SEQ ID NO: 16077
  modified_base 1..9485: mod_base = OTHER; note = Each t is m1f
  source 1..9485: mol_type = other RNA

SEQ ID NO: 17675 - RNA, 9485 nt, synthetic construct; identical to SEQ ID NO: 16078
  modified_base 1..9485: mod_base = OTHER; note = Each t is m1f
  source 1..9485: mol_type = other RNA

SEQ ID NO: 17676 - RNA, 9485 nt, synthetic construct; identical to SEQ ID NO: 16079
  modified_base 1..9485: mod_base = OTHER; note = Each t is m1f
  source 1..9485: mol_type = other RNA

SEQ ID NO: 17677 - RNA, 9485 nt, synthetic construct; identical to SEQ ID NO: 16080
  modified_base 1..9485: mod_base = OTHER; note = Each t is m1f
  source 1..9485: mol_type = other RNA

SEQ ID NO: 17678 - RNA, 9485 nt, synthetic construct; identical to SEQ ID NO: 16081
  modified_base 1..9485: mod_base = OTHER; note = Each t is m1f
  source 1..9485: mol_type = other RNA

SEQ ID NO: 17679 - RNA, 9485 nt, synthetic construct; identical to SEQ ID NO: 16082
  modified_base 1..9485: mod_base = OTHER; note = Each t is m1f
  source 1..9485: mol_type = other RNA

SEQ ID NO: 17680 - RNA, 9485 nt, synthetic construct; identical to SEQ ID NO: 16083
  modified_base 1..9485: mod_base = OTHER; note = Each t is m1f
  source 1..9485: mol_type = other RNA

SEQ ID NO: 17681 - RNA, 9485 nt, synthetic construct; identical to SEQ ID NO: 16084
  modified_base 1..9485: mod_base = OTHER; note = Each t is m1f
  source 1..9485: mol_type = other RNA

SEQ ID NO: 17682 - RNA, 9485 nt, synthetic construct; identical to SEQ ID NO: 16085
  modified_base 1..9485: mod_base = OTHER; note = Each t is m1f
  source 1..9485: mol_type = other RNA

SEQ ID NO: 17683 - RNA, 9485 nt, synthetic construct; identical to SEQ ID NO: 16086
  modified_base 1..9485: mod_base = OTHER; note = Each t is m1f
  source 1..9485: mol_type = other RNA

SEQ ID NO: 17684 - RNA, 9485 nt, synthetic construct; identical to SEQ ID NO: 16087
  modified_base 1..9485: mod_base = OTHER; note = Each t is m1f
  source 1..9485: mol_type = other RNA

SEQ ID NO: 17685 - RNA, 9485 nt, synthetic construct; identical to SEQ ID NO: 16088
  modified_base 1..9485: mod_base = OTHER; note = Each t is m1f
  source 1..9485: mol_type = other RNA

SEQ ID NO: 17686 - RNA, 9485 nt, synthetic construct; identical to SEQ ID NO: 16089
  modified_base 1..9485: mod_base = OTHER; note = Each t is m1f
  source 1..9485: mol_type = other RNA

SEQ ID NO: 17687 - RNA, 9479 nt, synthetic construct; identical to SEQ ID NO: 16090
  modified_base 1..9479: mod_base = OTHER; note = Each t is m1f
  source 1..9479: mol_type = other RNA

SEQ ID NO: 17688 - RNA, 9485 nt, synthetic construct; identical to SEQ ID NO: 16091
  modified_base 1..9485: mod_base = OTHER; note = Each t is m1f
  source 1..9485: mol_type = other RNA

SEQ ID NO: 17689 - RNA, 9485 nt, synthetic construct; identical to SEQ ID NO: 16092
  modified_base 1..9485: mod_base = OTHER; note = Each t is m1f
  source 1..9485: mol_type = other RNA

SEQ ID NO: 17690 - RNA, 9485 nt, synthetic construct; identical to SEQ ID NO: 16093
  modified_base 1..9485: mod_base = OTHER; note = Each t is m1f
  source 1..9485: mol_type = other RNA

SEQ ID NO: 17691 - RNA, 9479 nt, synthetic construct; identical to SEQ ID NO: 16094
  modified_base 1..9479: mod_base = OTHER; note = Each t is m1f
  source 1..9479: mol_type = other RNA

SEQ ID NO: 17692 - RNA, 9485 nt, synthetic construct; identical to SEQ ID NO: 16095
  modified_base 1..9485: mod_base = OTHER; note = Each t is m1f
  source 1..9485: mol_type = other RNA

SEQ ID NO: 17693 - RNA, 9485 nt, synthetic construct; identical to SEQ ID NO: 16096
  modified_base 1..9485: mod_base = OTHER; note = Each t is m1f
  source 1..9485: mol_type = other RNA

SEQ ID NO: 17694 - RNA, 9485 nt, synthetic construct; identical to SEQ ID NO: 16097
  modified_base 1..9485: mod_base = OTHER; note = Each t is m1f
  source 1..9485: mol_type = other RNA

SEQ ID NO: 17695 - RNA, 9485 nt, synthetic construct; identical to SEQ ID NO: 16098
  modified_base 1..9485: mod_base = OTHER; note = Each t is m1f
  source 1..9485: mol_type = other RNA

SEQ ID NO: 17696 - RNA, 9485 nt, synthetic construct; identical to SEQ ID NO: 16099
  modified_base 1..9485: mod_base = OTHER; note = Each t is m1f
  source 1..9485: mol_type = other RNA

SEQ ID NO: 17697 - RNA, 9485 nt, synthetic construct; identical to SEQ ID NO: 16100
  modified_base 1..9485: mod_base = OTHER; note = Each t is m1f
  source 1..9485: mol_type = other RNA

SEQ ID NO: 17698 - RNA, 9485 nt, synthetic construct; identical to SEQ ID NO: 16101
  modified_base 1..9485: mod_base = OTHER; note = Each t is m1f
  source 1..9485: mol_type = other RNA

SEQ ID NO: 17699 - RNA, 9485 nt, synthetic construct; identical to SEQ ID NO: 16102
  modified_base 1..9485: mod_base = OTHER; note = Each t is m1f
  source 1..9485: mol_type = other RNA

SEQ ID NO: 17700 - RNA, 9485 nt, synthetic construct; identical to SEQ ID NO: 16103
  modified_base 1..9485: mod_base = OTHER; note = Each t is m1f
  source 1..9485: mol_type = other RNA

SEQ ID NO: 17701 - RNA, 9485 nt, synthetic construct; identical to SEQ ID NO: 16104
  modified_base 1..9485: mod_base = OTHER; note = Each t is m1f
  source 1..9485: mol_type = other RNA

SEQ ID NO: 17702 - RNA, 9485 nt, synthetic construct; identical to SEQ ID NO: 16105
  modified_base 1..9485: mod_base = OTHER; note = Each t is m1f
  source 1..9485: mol_type = other RNA

SEQ ID NO: 17703 - RNA, 9485 nt, synthetic construct; identical to SEQ ID NO: 16106
  modified_base 1..9485: mod_base = OTHER; note = Each t is m1f
  source 1..9485: mol_type = other RNA

SEQ ID NO: 17704 - RNA, 9485 nt, synthetic construct; identical to SEQ ID NO: 16107
  modified_base 1..9485: mod_base = OTHER; note = Each t is m1f
  source 1..9485: mol_type = other RNA

SEQ ID NO: 17705 - RNA, 9485 nt, synthetic construct; identical to SEQ ID NO: 16108
  modified_base 1..9485: mod_base = OTHER; note = Each t is m1f
  source 1..9485: mol_type = other RNA

SEQ ID NO: 17706 - RNA, 9479 nt, synthetic construct; identical to SEQ ID NO: 16109
  modified_base 1..9479: mod_base = OTHER; note = Each t is m1f
  source 1..9479: mol_type = other RNA

SEQ ID NO: 17707 - RNA, 9485 nt, synthetic construct; identical to SEQ ID NO: 16110
  modified_base 1..9485: mod_base = OTHER; note = Each t is m1f
  source 1..9485: mol_type = other RNA

SEQ ID NO: 17708 - RNA, 9485 nt, synthetic construct; identical to SEQ ID NO: 16111
  modified_base 1..9485: mod_base = OTHER; note = Each t is m1f
  source 1..9485: mol_type = other RNA

SEQ ID NO: 17709 - RNA, 9485 nt, synthetic construct; identical to SEQ ID NO: 16112
  modified_base 1..9485: mod_base = OTHER; note = Each t is m1f
  source 1..9485: mol_type = other RNA

SEQ ID NO: 17710 - RNA, 9485 nt, synthetic construct; identical to SEQ ID NO: 16113
  modified_base 1..9485: mod_base = OTHER; note = Each t is m1f
  source 1..9485: mol_type = other RNA

SEQ ID NO: 17711 - RNA, 9485 nt, synthetic construct; identical to SEQ ID NO: 16114
  modified_base 1..9485: mod_base = OTHER; note = Each t is m1f
  source 1..9485: mol_type = other RNA

SEQ ID NO: 17712 - RNA, 9485 nt, synthetic construct; identical to SEQ ID NO: 16115
  modified_base 1..9485: mod_base = OTHER; note = Each t is m1f
  source 1..9485: mol_type = other RNA

SEQ ID NO: 17713 - RNA, 9485 nt, synthetic construct; identical to SEQ ID NO: 16116
  modified_base 1..9485: mod_base = OTHER; note = Each t is m1f
  source 1..9485: mol_type = other RNA

SEQ ID NO: 17714 - RNA, 9485 nt, synthetic construct; identical to SEQ ID NO: 16117
  modified_base 1..9485: mod_base = OTHER; note = Each t is m1f
  source 1..9485: mol_type = other RNA

SEQ ID NO: 17715 - RNA, 9485 nt, synthetic construct; identical to SEQ ID NO: 16118
  modified_base 1..9485: mod_base = OTHER; note = Each t is m1f
  source 1..9485: mol_type = other RNA

SEQ ID NO: 17716 - RNA, 9485 nt, synthetic construct; identical to SEQ ID NO: 16119
  modified_base 1..9485: mod_base = OTHER; note = Each t is m1f
  source 1..9485: mol_type = other RNA

SEQ ID NO: 17717 - RNA, 9485 nt, synthetic construct; identical to SEQ ID NO: 16120
  modified_base 1..9485: mod_base = OTHER; note = Each t is m1f
  source 1..9485: mol_type = other RNA

SEQ ID NO: 17718 - RNA, 9485 nt, synthetic construct; identical to SEQ ID NO: 16121
  modified_base 1..9485: mod_base = OTHER; note = Each t is m1f
  source 1..9485: mol_type = other RNA

SEQ ID NO: 17719 - RNA, 9485 nt, synthetic construct; identical to SEQ ID NO: 16122
  modified_base 1..9485: mod_base = OTHER; note = Each t is m1f
  source 1..9485: mol_type = other RNA

SEQ ID NO: 17720 - RNA, 9485 nt, synthetic construct; identical to SEQ ID NO: 16123
  modified_base 1..9485: mod_base = OTHER; note = Each t is m1f
  source 1..9485: mol_type = other RNA

SEQ ID NO: 17721 - RNA, 9485 nt, synthetic construct; identical to SEQ ID NO: 16124
  modified_base 1..9485: mod_base = OTHER; note = Each t is m1f
  source 1..9485: mol_type = other RNA

SEQ ID NO: 17722 - RNA, 9497 nt, synthetic construct; identical to SEQ ID NO: 16125
  modified_base 1..9497: mod_base = OTHER; note = Each t is m1f
  source 1..9497: mol_type = other RNA

SEQ ID NO: 17723 - RNA, 9485 nt, synthetic construct; identical to SEQ ID NO: 16126
  modified_base 1..9485: mod_base = OTHER; note = Each t is m1f
  source 1..9485: mol_type = other RNA

SEQ ID NO: 17724 - RNA, 9485 nt, synthetic construct; identical to SEQ ID NO: 16127
  modified_base 1..9485: mod_base = OTHER; note = Each t is m1f
  source 1..9485: mol_type = other RNA

SEQ ID NO: 17725 - RNA, 9485 nt, synthetic construct; identical to SEQ ID NO: 16128
  modified_base 1..9485: mod_base = OTHER; note = Each t is m1f
  source 1..9485: mol_type = other RNA

SEQ ID NO: 17726 - RNA, 9485 nt, synthetic construct; identical to SEQ ID NO: 16129
  modified_base 1..9485: mod_base = OTHER; note = Each t is m1f
  source 1..9485: mol_type = other RNA

SEQ ID NO: 17727 - RNA, 9485 nt, synthetic construct; identical to SEQ ID NO: 16130
  modified_base 1..9485: mod_base = OTHER; note = Each t is m1f
  source 1..9485: mol_type = other RNA

SEQ ID NO: 17728 - RNA, 9485 nt, synthetic construct; identical to SEQ ID NO: 16131
  modified_base 1..9485: mod_base = OTHER; note = Each t is m1f
  source 1..9485: mol_type = other RNA

SEQ ID NO: 17729 - RNA, 9485 nt, synthetic construct; identical to SEQ ID NO: 16132
  modified_base 1..9485: mod_base = OTHER; note = Each t is m1f
  source 1..9485: mol_type = other RNA

SEQ ID NO: 17730 - RNA, 9485 nt, synthetic construct; identical to SEQ ID NO: 16133
  modified_base 1..9485: mod_base = OTHER; note = Each t is m1f
  source 1..9485: mol_type = other RNA

SEQ ID NO: 17731 - RNA, 9485 nt, synthetic construct; identical to SEQ ID NO: 16134
  modified_base 1..9485: mod_base = OTHER; note = Each t is m1f
  source 1..9485: mol_type = other RNA

SEQ ID NO: 17732 - RNA, 9485 nt, synthetic construct; identical to SEQ ID NO: 16135
  modified_base 1..9485: mod_base = OTHER; note = Each t is m1f
  source 1..9485: mol_type = other RNA

SEQ ID NO: 17733 - RNA, 9485 nt, synthetic construct; identical to SEQ ID NO: 16136
  modified_base 1..9485: mod_base = OTHER; note = Each t is m1f
  source 1..9485: mol_type = other RNA

SEQ ID NO: 17734 - RNA, 9485 nt, synthetic construct; identical to SEQ ID NO: 16137
  modified_base 1..9485: mod_base = OTHER; note = Each t is m1f
  source 1..9485: mol_type = other RNA

SEQ ID NO: 17735 - RNA, 9485 nt, synthetic construct; identical to SEQ ID NO: 16138
  modified_base 1..9485: mod_base = OTHER; note = Each t is m1f
  source 1..9485: mol_type = other RNA

SEQ ID NO: 17736 - RNA, 9485 nt, synthetic construct; identical to SEQ ID NO: 16139
  modified_base 1..9485: mod_base = OTHER; note = Each t is m1f
  source 1..9485: mol_type = other RNA

SEQ ID NO: 17737 - RNA, 9485 nt, synthetic construct; identical to SEQ ID NO: 16140
  modified_base 1..9485: mod_base = OTHER; note = Each t is m1f
  source 1..9485: mol_type = other RNA

SEQ ID NO: 17738 - RNA, 9485 nt, synthetic construct; identical to SEQ ID NO: 16141
  modified_base 1..9485: mod_base = OTHER; note = Each t is m1f
  source 1..9485: mol_type = other RNA

SEQ ID NO: 17739 - RNA, 9485 nt, synthetic construct; identical to SEQ ID NO: 16142
  modified_base 1..9485: mod_base = OTHER; note = Each t is m1f
  source 1..9485: mol_type = other RNA

SEQ ID NO: 17740 - RNA, 9485 nt, synthetic construct; identical to SEQ ID NO: 16143
  modified_base 1..9485: mod_base = OTHER; note = Each t is m1f
  source 1..9485: mol_type = other RNA

SEQ ID NO: 17741 - RNA, 9485 nt, synthetic construct; identical to SEQ ID NO: 16144
  modified_base 1..9485: mod_base = OTHER; note = Each t is m1f
  source 1..9485: mol_type = other RNA

SEQ ID NO: 17742 - RNA, 9485 nt, synthetic construct; identical to SEQ ID NO: 16145
  modified_base 1..9485: mod_base = OTHER; note = Each t is m1f
  source 1..9485: mol_type = other RNA

SEQ ID NO: 17743 - RNA, 9485 nt, synthetic construct; identical to SEQ ID NO: 16146
  modified_base 1..9485: mod_base = OTHER; note = Each t is m1f
  source 1..9485: mol_type = other RNA

SEQ ID NO: 17744 - RNA, 9485 nt, synthetic construct; identical to SEQ ID NO: 16147
  modified_base 1..9485: mod_base = OTHER; note = Each t is m1f
  source 1..9485: mol_type = other RNA

SEQ ID NO: 17745 - RNA, 9485 nt, synthetic construct; identical to SEQ ID NO: 16148
  modified_base 1..9485: mod_base = OTHER; note = Each t is m1f
  source 1..9485: mol_type = other RNA

SEQ ID NO: 17746 - RNA, 9485 nt, synthetic construct; identical to SEQ ID NO: 16149
  modified_base 1..9485: mod_base = OTHER; note = Each t is m1f
  source 1..9485: mol_type = other RNA

SEQ ID NO: 17747 - RNA, 9485 nt, synthetic construct; identical to SEQ ID NO: 16150
  modified_base 1..9485: mod_base = OTHER; note = Each t is m1f
  source 1..9485: mol_type = other RNA

SEQ ID NO: 17748 - RNA, 9485 nt, synthetic construct; identical to SEQ ID NO: 16151
  modified_base 1..9485: mod_base = OTHER; note = Each t is m1f
  source 1..9485: mol_type = other RNA

SEQ ID NO: 17749 - RNA, 9485 nt, synthetic construct; identical to SEQ ID NO: 16152
  modified_base 1..9485: mod_base = OTHER; note = Each t is m1f
  source 1..9485: mol_type = other RNA

SEQ ID NO: 17750 - RNA, 9485 nt, synthetic construct; identical to SEQ ID NO: 16153
  modified_base 1..9485: mod_base = OTHER; note = Each t is m1f
  source 1..9485: mol_type = other RNA

SEQ ID NO: 17751 - RNA, 9485 nt, synthetic construct; identical to SEQ ID NO: 16154
  modified_base 1..9485: mod_base = OTHER; note = Each t is m1f
  source 1..9485: mol_type = other RNA

SEQ ID NO: 17752 - RNA, 9485 nt, synthetic construct; identical to SEQ ID NO: 16155
  modified_base 1..9485: mod_base = OTHER; note = Each t is m1f
  source 1..9485: mol_type = other RNA

SEQ ID NO: 17753 - RNA, 9485 nt, synthetic construct; identical to SEQ ID NO: 16156
  modified_base 1..9485: mod_base = OTHER; note = Each t is m1f
  source 1..9485: mol_type = other RNA

SEQ ID NO: 17754 - RNA, 9485 nt, synthetic construct; identical to SEQ ID NO: 16157
  modified_base 1..9485: mod_base = OTHER; note = Each t is m1f
  source 1..9485: mol_type = other RNA

SEQ ID NO: 17755 - RNA, 9485 nt, synthetic construct; identical to SEQ ID NO: 16158
  modified_base 1..9485: mod_base = OTHER; note = Each t is m1f
  source 1..9485: mol_type = other RNA

SEQ ID NO: 17756 - RNA, 9485 nt, synthetic construct; identical to SEQ ID NO: 16159
  modified_base 1..9485: mod_base = OTHER; note = Each t is m1f
  source 1..9485: mol_type = other RNA

SEQ ID NO: 17757 - RNA, 9485 nt, synthetic construct; identical to SEQ ID NO: 16160
  modified_base 1..9485: mod_base = OTHER; note = Each t is m1f
  source 1..9485: mol_type = other RNA

SEQ ID NO: 17758 - RNA, 9485 nt, synthetic construct; identical to SEQ ID NO: 16161
  modified_base 1..9485: mod_base = OTHER; note = Each t is m1f
  source 1..9485: mol_type = other RNA

SEQ ID NO: 17759 - RNA, 9485 nt, synthetic construct; identical to SEQ ID NO: 16162
  modified_base 1..9485: mod_base = OTHER; note = Each t is m1f
  source 1..9485: mol_type = other RNA

SEQ ID NO: 17760 - RNA, 9485 nt, synthetic construct; identical to SEQ ID NO: 16163
  modified_base 1..9485: mod_base = OTHER; note = Each t is m1f
  source 1..9485: mol_type = other RNA

SEQ ID NO: 17761 - RNA, 9485 nt, synthetic construct; identical to SEQ ID NO: 16164
  modified_base 1..9485: mod_base = OTHER; note = Each t is m1f
  source 1..9485: mol_type = other RNA

SEQ ID NO: 17762 - RNA, 9485 nt, synthetic construct; identical to SEQ ID NO: 16165
  modified_base 1..9485: mod_base = OTHER; note = Each t is m1f
  source 1..9485: mol_type = other RNA

SEQ ID NO: 17763 - RNA, 9485 nt, synthetic construct; identical to SEQ ID NO: 16166
  modified_base 1..9485: mod_base = OTHER; note = Each t is m1f
  source 1..9485: mol_type = other RNA

SEQ ID NO: 17764 - RNA, 9485 nt, synthetic construct; identical to SEQ ID NO: 16167
  modified_base 1..9485: mod_base = OTHER; note = Each t is m1f
  source 1..9485: mol_type = other RNA

SEQ ID NO: 17765 - RNA, 9485 nt, synthetic construct; identical to SEQ ID NO: 16168
  modified_base 1..9485: mod_base = OTHER; note = Each t is m1f
  source 1..9485: mol_type = other RNA

SEQ ID NO: 17766 - RNA, 9485 nt, synthetic construct; identical to SEQ ID NO: 16169
  modified_base 1..9485: mod_base = OTHER; note = Each t is m1f
  source 1..9485: mol_type = other RNA

SEQ ID NO: 17767 - RNA, 9485 nt, synthetic construct; identical to SEQ ID NO: 16170
  modified_base 1..9485: mod_base = OTHER; note = Each t is m1f
  source 1..9485: mol_type = other RNA

SEQ ID NO: 17768 - RNA, 9485 nt, synthetic construct; identical to SEQ ID NO: 16171
  modified_base 1..9485: mod_base = OTHER; note = Each t is m1f
  source 1..9485: mol_type = other RNA

SEQ ID NO: 17769 - RNA, 9485 nt, synthetic construct; identical to SEQ ID NO: 16172
  modified_base 1..9485: mod_base = OTHER; note = Each t is m1f
  source 1..9485: mol_type = other RNA

SEQ ID NO: 17770 - RNA, 9551 nt, synthetic construct; identical to SEQ ID NO: 16173
  modified_base 1..9551: mod_base = OTHER; note = Each t is m1f
  source 1..9551: mol_type = other RNA

SEQ ID NO: 17771 - RNA, 9485 nt, synthetic construct; identical to SEQ ID NO: 16174
  modified_base 1..9485: mod_base = OTHER; note = Each t is m1f
  source 1..9485: mol_type = other RNA

SEQ ID NO: 17772 - RNA, 9485 nt, synthetic construct; identical to SEQ ID NO: 16175
  modified_base 1..9485: mod_base = OTHER; note = Each t is m1f
  source 1..9485: mol_type = other RNA

SEQ ID NO: 17773 - RNA, 9485 nt, synthetic construct; identical to SEQ ID NO: 16176
  modified_base 1..9485: mod_base = OTHER; note = Each t is m1f
  source 1..9485: mol_type = other RNA

SEQ ID NO: 17774 - RNA, 9485 nt, synthetic construct; identical to SEQ ID NO: 16177
  modified_base 1..9485: mod_base = OTHER; note = Each t is m1f
  source 1..9485: mol_type = other RNA

SEQ ID NO: 17775 - RNA, 9485 nt, synthetic construct; identical to SEQ ID NO: 16178
  modified_base 1..9485: mod_base = OTHER; note = Each t is m1f
  source 1..9485: mol_type = other RNA

SEQ ID NO: 17776 - RNA, 9485 nt, synthetic construct; identical to SEQ ID NO: 16179
  modified_base 1..9485: mod_base = OTHER; note = Each t is m1f
  source 1..9485: mol_type = other RNA

SEQ ID NO: 17777 - RNA, 9485 nt, synthetic construct; identical to SEQ ID NO: 16180
  modified_base 1..9485: mod_base = OTHER; note = Each t is m1f
  source 1..9485: mol_type = other RNA

SEQ ID NO: 17778 - RNA, 9485 nt, synthetic construct; identical to SEQ ID NO: 16181
  modified_base 1..9485: mod_base = OTHER; note = Each t is m1f
  source 1..9485: mol_type = other RNA

SEQ ID NO: 17779 - RNA, 9485 nt, synthetic construct; identical to SEQ ID NO: 16182
  modified_base 1..9485: mod_base = OTHER; note = Each t is m1f
  source 1..9485: mol_type = other RNA

SEQ ID NO: 17780 - RNA, 9485 nt, synthetic construct; identical to SEQ ID NO: 16183
  modified_base 1..9485: mod_base = OTHER; note = Each t is m1f
  source 1..9485: mol_type = other RNA

SEQ ID NO: 17781 - RNA, 9485 nt, synthetic construct; identical to SEQ ID NO: 16184
  modified_base 1..9485: mod_base = OTHER; note = Each t is m1f
  source 1..9485: mol_type = other RNA

SEQ ID NO: 17782 - RNA, 9485 nt, synthetic construct; identical to SEQ ID NO: 16185
  modified_base 1..9485: mod_base = OTHER; note = Each t is m1f
  source 1..9485: mol_type = other RNA

SEQ ID NO: 17783 - RNA, 9485 nt, synthetic construct; identical to SEQ ID NO: 16186
  modified_base 1..9485: mod_base = OTHER; note = Each t is m1f
  source 1..9485: mol_type = other RNA

SEQ ID NO: 17784 - RNA, 9485 nt, synthetic construct; identical to SEQ ID NO: 16187
  modified_base 1..9485: mod_base = OTHER; note = Each t is m1f
  source 1..9485: mol_type = other RNA

SEQ ID NO: 17785 - RNA, 9485 nt, synthetic construct; identical to SEQ ID NO: 16188
  modified_base 1..9485: mod_base = OTHER; note = Each t is m1f
  source 1..9485: mol_type = other RNA

SEQ ID NO: 17786 - RNA, 9485 nt, synthetic construct; identical to SEQ ID NO: 16189
  modified_base 1..9485: mod_base = OTHER; note = Each t is m1f
  source 1..9485: mol_type = other RNA

SEQ ID NO: 17787 - RNA, 9485 nt, synthetic construct; identical to SEQ ID NO: 16190
  modified_base 1..9485: mod_base = OTHER; note = Each t is m1f
  source 1..9485: mol_type = other RNA

SEQ ID NO: 17788 - RNA, 9485 nt, synthetic construct; identical to SEQ ID NO: 16191
  modified_base 1..9485: mod_base = OTHER; note = Each t is m1f
  source 1..9485: mol_type = other RNA

SEQ ID NO: 17789 - RNA, 9503 nt, synthetic construct; identical to SEQ ID NO: 16192
  modified_base 1..9503: mod_base = OTHER; note = Each t is m1f
  source 1..9503: mol_type = other RNA

SEQ ID NO: 17790 - RNA, 9485 nt, synthetic construct; identical to SEQ ID NO: 16193
  modified_base 1..9485: mod_base = OTHER; note = Each t is m1f
  source 1..9485: mol_type = other RNA

SEQ ID NO: 17791 - RNA, 9485 nt, synthetic construct; identical to SEQ ID NO: 16194
  modified_base 1..9485: mod_base = OTHER; note = Each t is m1f
  source 1..9485: mol_type = other RNA

SEQ ID NO: 17792 - RNA, 9485 nt, synthetic construct; identical to SEQ ID NO: 16195
  modified_base 1..9485: mod_base = OTHER; note = Each t is m1f
  source 1..9485: mol_type = other RNA

SEQ ID NO: 17793 - RNA, 9485 nt, synthetic construct; identical to SEQ ID NO: 16196
  modified_base 1..9485: mod_base = OTHER; note = Each t is m1f
  source 1..9485: mol_type = other RNA

SEQ ID NO: 17794 - RNA, 9485 nt, synthetic construct; identical to SEQ ID NO: 16197
  modified_base 1..9485: mod_base = OTHER; note = Each t is m1f
  source 1..9485: mol_type = other RNA

SEQ ID NO: 17795 - RNA, 9485 nt, synthetic construct; identical to SEQ ID NO: 16198
  modified_base 1..9485: mod_base = OTHER; note = Each t is m1f
  source 1..9485: mol_type = other RNA

SEQ ID NO: 17796 - RNA, 9485 nt, synthetic construct; identical to SEQ ID NO: 16199
  modified_base 1..9485: mod_base = OTHER; note = Each t is m1f
  source 1..9485: mol_type = other RNA

SEQ ID NO: 17797 - RNA, 9485 nt, synthetic construct; identical to SEQ ID NO: 16200
  modified_base 1..9485: mod_base = OTHER; note = Each t is m1f
  source 1..9485: mol_type = other RNA

SEQ ID NO: 17798 - RNA, 9485 nt, synthetic construct; identical to SEQ ID NO: 16201
  modified_base 1..9485: mod_base = OTHER; note = Each t is m1f
  source 1..9485: mol_type = other RNA

SEQ ID NO: 17799 - RNA, 9485 nt, synthetic construct; identical to SEQ ID NO: 16202
  modified_base 1..9485: mod_base = OTHER; note = Each t is m1f
  source 1..9485: mol_type = other RNA

SEQ ID NO: 17800 - RNA, 9485 nt, synthetic construct; identical to SEQ ID NO: 16203
  modified_base 1..9485: mod_base = OTHER; note = Each t is m1f
  source 1..9485: mol_type = other RNA

SEQ ID NO: 17801 - RNA, 9485 nt, synthetic construct; identical to SEQ ID NO: 16204
  modified_base 1..9485: mod_base = OTHER; note = Each t is m1f
  source 1..9485: mol_type = other RNA

SEQ ID NO: 17802 - RNA, 9485 nt, synthetic construct; identical to SEQ ID NO: 16205
  modified_base 1..9485: mod_base = OTHER; note = Each t is m1f
  source 1..9485: mol_type = other RNA

SEQ ID NO: 17803 - RNA, 9485 nt, synthetic construct; identical to SEQ ID NO: 16206
  modified_base 1..9485: mod_base = OTHER; note = Each t is m1f
  source 1..9485: mol_type = other RNA

SEQ ID NO: 17804 - RNA, 9479 nt, synthetic construct; identical to SEQ ID NO: 16207
  modified_base 1..9479: mod_base = OTHER; note = Each t is m1f
  source 1..9479: mol_type = other RNA

SEQ ID NO: 17805 - RNA, 9485 nt, synthetic construct; identical to SEQ ID NO: 16208
  modified_base 1..9485: mod_base = OTHER; note = Each t is m1f
  source 1..9485: mol_type = other RNA

SEQ ID NO: 17806 - RNA, 9485 nt, synthetic construct; identical to SEQ ID NO: 16209
  modified_base 1..9485: mod_base = OTHER; note = Each t is m1f
  source 1..9485: mol_type = other RNA

SEQ ID NO: 17807 - RNA, 9485 nt, synthetic construct; identical to SEQ ID NO: 16210
  modified_base 1..9485: mod_base = OTHER; note = Each t is m1f
  source 1..9485: mol_type = other RNA

SEQ ID NO: 17808 - RNA, 9485 nt, synthetic construct; identical to SEQ ID NO: 16211
  modified_base 1..9485: mod_base = OTHER; note = Each t is m1f
  source 1..9485: mol_type = other RNA

SEQ ID NO: 17809 - RNA, 9485 nt, synthetic construct; identical to SEQ ID NO: 16212
  modified_base 1..9485: mod_base = OTHER; note = Each t is m1f
  source 1..9485: mol_type = other RNA

SEQ ID NO: 17810 - RNA, 9485 nt, synthetic construct; identical to SEQ ID NO: 16213
  modified_base 1..9485: mod_base = OTHER; note = Each t is m1f
  source 1..9485: mol_type = other RNA

SEQ ID NO: 17811 - RNA, 9485 nt, synthetic construct; identical to SEQ ID NO: 16214
  modified_base 1..9485: mod_base = OTHER; note = Each t is m1f
  source 1..9485: mol_type = other RNA

SEQ ID NO: 17812 - RNA, 9485 nt, synthetic construct; identical to SEQ ID NO: 16215
  modified_base 1..9485: mod_base = OTHER; note = Each t is m1f
  source 1..9485: mol_type = other RNA

SEQ ID NO: 17813 - RNA, 9485 nt, synthetic construct; identical to SEQ ID NO: 16216
  modified_base 1..9485: mod_base = OTHER; note = Each t is m1f
  source 1..9485: mol_type = other RNA

SEQ ID NO: 17814 - RNA, 9485 nt, synthetic construct; identical to SEQ ID NO: 16217
  modified_base 1..9485: mod_base = OTHER; note = Each t is m1f
  source 1..9485: mol_type = other RNA

SEQ ID NO: 17815 - RNA, 9485 nt, synthetic construct; identical to SEQ ID NO: 16218
  modified_base 1..9485: mod_base = OTHER; note = Each t is m1f
  source 1..9485: mol_type = other RNA

SEQ ID NO: 17816 - RNA, 9485 nt, synthetic construct; identical to SEQ ID NO: 16219
  modified_base 1..9485: mod_base = OTHER; note = Each t is m1f
  source 1..9485: mol_type = other RNA

SEQ ID NO: 17817 - RNA, 9557 nt, synthetic construct; identical to SEQ ID NO: 16220
  modified_base 1..9557: mod_base = OTHER; note = Each t is m1f
  source 1..9557: mol_type = other RNA

SEQ ID NO: 17818 - RNA, 9485 nt, synthetic construct; identical to SEQ ID NO: 16221
  modified_base 1..9485: mod_base = OTHER; note = Each t is m1f
  source 1..9485: mol_type = other RNA

SEQ ID NO: 17819 - RNA, 9485 nt, synthetic construct; identical to SEQ ID NO: 16222
  modified_base 1..9485: mod_base = OTHER; note = Each t is m1f
  source 1..9485: mol_type = other RNA

SEQ ID NO: 17820 - RNA, 9485 nt, synthetic construct; identical to SEQ ID NO: 16223
  modified_base 1..9485: mod_base = OTHER; note = Each t is m1f
  source 1..9485: mol_type = other RNA

SEQ ID NO: 17821 - RNA, 9485 nt, synthetic construct; identical to SEQ ID NO: 16224
  modified_base 1..9485: mod_base = OTHER; note = Each t is m1f
  source 1..9485: mol_type = other RNA

SEQ ID NO: 17822 - RNA, 9485 nt, synthetic construct; identical to SEQ ID NO: 16225
  modified_base 1..9485: mod_base = OTHER; note = Each t is m1f
  source 1..9485: mol_type = other RNA

SEQ ID NO: 17823 - RNA, 9485 nt, synthetic construct; identical to SEQ ID NO: 16226
  modified_base 1..9485: mod_base = OTHER; note = Each t is m1f
  source 1..9485: mol_type = other RNA

SEQ ID NO: 17824 - RNA, 9485 nt, synthetic construct; identical to SEQ ID NO: 16227
  modified_base 1..9485: mod_base = OTHER; note = Each t is m1f
  source 1..9485: mol_type = other RNA

SEQ ID NO: 17825 - RNA, 9485 nt, synthetic construct; identical to SEQ ID NO: 16228
  modified_base 1..9485: mod_base = OTHER; note = Each t is m1f
  source 1..9485: mol_type = other RNA

SEQ ID NO: 17826 - RNA, 9485 nt, synthetic construct; identical to SEQ ID NO: 16229
  modified_base 1..9485: mod_base = OTHER; note = Each t is m1f
  source 1..9485: mol_type = other RNA

SEQ ID NO: 17827 - RNA, 9485 nt, synthetic construct; identical to SEQ ID NO: 16230
  modified_base 1..9485: mod_base = OTHER; note = Each t is m1f
  source 1..9485: mol_type = other RNA

SEQ ID NO: 17828 - RNA, 9485 nt, synthetic construct; identical to SEQ ID NO: 16231
  modified_base 1..9485: mod_base = OTHER; note = Each t is m1f
  source 1..9485: mol_type = other RNA

SEQ ID NO: 17829 - RNA, 9485 nt, synthetic construct; identical to SEQ ID NO: 16232
  modified_base 1..9485: mod_base = OTHER; note = Each t is m1f
  source 1..9485: mol_type = other RNA

SEQ ID NO: 17830 - RNA, 9485 nt, synthetic construct; identical to SEQ ID NO: 16233
  modified_base 1..9485: mod_base = OTHER; note = Each t is m1f
  source 1..9485: mol_type = other RNA

SEQ ID NO: 17831 - RNA, 9485 nt, synthetic construct; identical to SEQ ID NO: 16234
  modified_base 1..9485: mod_base = OTHER; note = Each t is m1f
  source 1..9485: mol_type = other RNA

SEQ ID NO: 17832 - RNA, 9485 nt, synthetic construct; identical to SEQ ID NO: 16235
  modified_base 1..9485: mod_base = OTHER; note = Each t is m1f
  source 1..9485: mol_type = other RNA

SEQ ID NO: 17833 - RNA, 9485 nt, synthetic construct; identical to SEQ ID NO: 16236
  modified_base 1..9485: mod_base = OTHER; note = Each t is m1f
  source 1..9485: mol_type = other RNA

SEQ ID NO: 17834 - RNA, 9485 nt, synthetic construct; identical to SEQ ID NO: 16237
  modified_base 1..9485: mod_base = OTHER; note = Each t is m1f
  source 1..9485: mol_type = other RNA

SEQ ID NO: 17835 - RNA, 9485 nt, synthetic construct; identical to SEQ ID NO: 16238
  modified_base 1..9485: mod_base = OTHER; note = Each t is m1f
  source 1..9485: mol_type = other RNA

SEQ ID NO: 17836 - RNA, 9485 nt, synthetic construct; identical to SEQ ID NO: 16239
  modified_base 1..9485: mod_base = OTHER; note = Each t is m1f
  source 1..9485: mol_type = other RNA

SEQ ID NO: 17837 - RNA, 9485 nt, synthetic construct; identical to SEQ ID NO: 16240
  modified_base 1..9485: mod_base = OTHER; note = Each t is m1f
  source 1..9485: mol_type = other RNA

SEQ ID NO: 17838 - RNA, 9485 nt, synthetic construct; identical to SEQ ID NO: 16241
  modified_base 1..9485: mod_base = OTHER; note = Each t is m1f
  source 1..9485: mol_type = other RNA

SEQ ID NO: 17839 - RNA, 9485 nt, synthetic construct; identical to SEQ ID NO: 16242
  modified_base 1..9485: mod_base = OTHER; note = Each t is m1f
  source 1..9485: mol_type = other RNA

SEQ ID NO: 17840 - RNA, 9485 nt, synthetic construct; identical to SEQ ID NO: 16243
  modified_base 1..9485: mod_base = OTHER; note = Each t is m1f
  source 1..9485: mol_type = other RNA

SEQ ID NO: 17841 - RNA, 9485 nt, synthetic construct; identical to SEQ ID NO: 16244
  modified_base 1..9485: mod_base = OTHER; note = Each t is m1f
  source 1..9485: mol_type = other RNA

SEQ ID NO: 17842 - RNA, 9485 nt, synthetic construct; identical to SEQ ID NO: 16245
  modified_base 1..9485: mod_base = OTHER; note = Each t is m1f
  source 1..9485: mol_type = other RNA

SEQ ID NO: 17843 - RNA, 9485 nt, synthetic construct; identical to SEQ ID NO: 16246
  modified_base 1..9485: mod_base = OTHER; note = Each t is m1f
  source 1..9485: mol_type = other RNA

SEQ ID NO: 17844 - RNA, 9485 nt, synthetic construct; identical to SEQ ID NO: 16247
  modified_base 1..9485: mod_base = OTHER; note = Each t is m1f
  source 1..9485: mol_type = other RNA

SEQ ID NO: 17845 - RNA, 9485 nt, synthetic construct; identical to SEQ ID NO: 16248
  modified_base 1..9485: mod_base = OTHER; note = Each t is m1f
  source 1..9485: mol_type = other RNA

SEQ ID NO: 17846 - RNA, 9485 nt, synthetic construct; identical to SEQ ID NO: 16249
  modified_base 1..9485: mod_base = OTHER; note = Each t is m1f
  source 1..9485: mol_type = other RNA

SEQ ID NO: 17847 - RNA, 9485 nt, synthetic construct; identical to SEQ ID NO: 16250
  modified_base 1..9485: mod_base = OTHER; note = Each t is m1f
  source 1..9485: mol_type = other RNA

SEQ ID NO: 17848 - RNA, 9485 nt, synthetic construct; identical to SEQ ID NO: 16251
  modified_base 1..9485: mod_base = OTHER; note = Each t is m1f
  source 1..9485: mol_type = other RNA

SEQ ID NO: 17849 - RNA, 9485 nt, synthetic construct; identical to SEQ ID NO: 16252
  modified_base 1..9485: mod_base = OTHER; note = Each t is m1f
  source 1..9485: mol_type = other RNA

SEQ ID NO: 17850 - RNA, 9485 nt, synthetic construct; identical to SEQ ID NO: 16253
  modified_base 1..9485: mod_base = OTHER; note = Each t is m1f
  source 1..9485: mol_type = other RNA

SEQ ID NO: 17851 - RNA, 9485 nt, synthetic construct; identical to SEQ ID NO: 16254
  modified_base 1..9485: mod_base = OTHER; note = Each t is m1f
  source 1..9485: mol_type = other RNA

SEQ ID NO: 17852 - RNA, 9485 nt, synthetic construct; identical to SEQ ID NO: 16255
  modified_base 1..9485: mod_base = OTHER; note = Each t is m1f
  source 1..9485: mol_type = other RNA

SEQ ID NO: 17853 - RNA, 9485 nt, synthetic construct; identical to SEQ ID NO: 16256
  modified_base 1..9485: mod_base = OTHER; note = Each t is m1f
  source 1..9485: mol_type = other RNA

SEQ ID NO: 17854 - RNA, 9485 nt, synthetic construct; identical to SEQ ID NO: 16257
  modified_base 1..9485: mod_base = OTHER; note = Each t is m1f
  source 1..9485: mol_type = other RNA

SEQ ID NO: 17855 - RNA, 9485 nt, synthetic construct; identical to SEQ ID NO: 16258
  modified_base 1..9485: mod_base = OTHER; note = Each t is m1f
  source 1..9485: mol_type = other RNA

SEQ ID NO: 17856 - RNA, 9485 nt, synthetic construct; identical to SEQ ID NO: 16259
  modified_base 1..9485: mod_base = OTHER; note = Each t is m1f
  source 1..9485: mol_type = other RNA

SEQ ID NO: 17857 - RNA, 9485 nt, synthetic construct; identical to SEQ ID NO: 16260
  modified_base 1..9485: mod_base = OTHER; note = Each t is m1f
  source 1..9485: mol_type = other RNA

SEQ ID NO: 17858 - RNA, 9485 nt, synthetic construct; identical to SEQ ID NO: 16261
  modified_base 1..9485: mod_base = OTHER; note = Each t is m1f
  source 1..9485: mol_type = other RNA

SEQ ID NO: 17859 - RNA, 9485 nt, synthetic construct; identical to SEQ ID NO: 16262
  modified_base 1..9485: mod_base = OTHER; note = Each t is m1f
  source 1..9485: mol_type = other RNA

SEQ ID NO: 17860 - RNA, 9485 nt, synthetic construct; identical to SEQ ID NO: 16263
  modified_base 1..9485: mod_base = OTHER; note = Each t is m1f
  source 1..9485: mol_type = other RNA

SEQ ID NO: 17861 - RNA, 9485 nt, synthetic construct; identical to SEQ ID NO: 16264
  modified_base 1..9485: mod_base = OTHER; note = Each t is m1f
  source 1..9485: mol_type = other RNA

SEQ ID NO: 17862 - RNA, 9485 nt, synthetic construct; identical to SEQ ID NO: 16265
  modified_base 1..9485: mod_base = OTHER; note = Each t is m1f
  source 1..9485: mol_type = other RNA

SEQ ID NO: 17863 - RNA, 9485 nt, synthetic construct; identical to SEQ ID NO: 16266
  modified_base 1..9485: mod_base = OTHER; note = Each t is m1f
  source 1..9485: mol_type = other RNA

SEQ ID NO: 17864 - RNA, 9485 nt, synthetic construct; identical to SEQ ID NO: 16267
  modified_base 1..9485: mod_base = OTHER; note = Each t is m1f
  source 1..9485: mol_type = other RNA

SEQ ID NO: 17865 - RNA, 9485 nt, synthetic construct; identical to SEQ ID NO: 16268
  modified_base 1..9485: mod_base = OTHER; note = Each t is m1f
  source 1..9485: mol_type = other RNA

SEQ ID NO: 17866 - RNA, 9485 nt, synthetic construct; identical to SEQ ID NO: 16269
  modified_base 1..9485: mod_base = OTHER; note = Each t is m1f
  source 1..9485: mol_type = other RNA

SEQ ID NO: 17867 - RNA, 9485 nt, synthetic construct; identical to SEQ ID NO: 16270
  modified_base 1..9485: mod_base = OTHER; note = Each t is m1f
  source 1..9485: mol_type = other RNA

SEQ ID NO: 17868 - RNA, 9485 nt, synthetic construct; identical to SEQ ID NO: 16271
  modified_base 1..9485: mod_base = OTHER; note = Each t is m1f
  source 1..9485: mol_type = other RNA

SEQ ID NO: 17869 - RNA, 9485 nt, synthetic construct; identical to SEQ ID NO: 16272
  modified_base 1..9485: mod_base = OTHER; note = Each t is m1f
  source 1..9485: mol_type = other RNA

SEQ ID NO: 17870 - RNA, 9485 nt, synthetic construct; identical to SEQ ID NO: 16273
  modified_base 1..9485: mod_base = OTHER; note = Each t is m1f
  source 1..9485: mol_type = other RNA

SEQ ID NO: 17871 - RNA, 9485 nt, synthetic construct; identical to SEQ ID NO: 16274
  modified_base 1..9485: mod_base = OTHER; note = Each t is m1f
  source 1..9485: mol_type = other RNA

SEQ ID NO: 17872 - RNA, 9485 nt, synthetic construct; identical to SEQ ID NO: 16275
  modified_base 1..9485: mod_base = OTHER; note = Each t is m1f
  source 1..9485: mol_type = other RNA

SEQ ID NO: 17873 - RNA, 9485 nt, synthetic construct; identical to SEQ ID NO: 16276
  modified_base 1..9485: mod_base = OTHER; note = Each t is m1f
  source 1..9485: mol_type = other RNA

SEQ ID NO: 17874 - RNA, 9485 nt, synthetic construct; identical to SEQ ID NO: 16277
  modified_base 1..9485: mod_base = OTHER; note = Each t is m1f
  source 1..9485: mol_type = other RNA

SEQ ID NO: 17875 - RNA, 9485 nt, synthetic construct; identical to SEQ ID NO: 16278
  modified_base 1..9485: mod_base = OTHER; note = Each t is m1f
  source 1..9485: mol_type = other RNA

SEQ ID NO: 17876 - RNA, 9485 nt, synthetic construct; identical to SEQ ID NO: 16279
  modified_base 1..9485: mod_base = OTHER; note = Each t is m1f
  source 1..9485: mol_type = other RNA

SEQ ID NO: 17877 - RNA, 9485 nt, synthetic construct; identical to SEQ ID NO: 16280
  modified_base 1..9485: mod_base = OTHER; note = Each t is m1f
  source 1..9485: mol_type = other RNA

SEQ ID NO: 17878 - RNA, 9485 nt, synthetic construct; identical to SEQ ID NO: 16281
  modified_base 1..9485: mod_base = OTHER; note = Each t is m1f
  source 1..9485: mol_type = other RNA

SEQ ID NO: 17879 - RNA, 9485 nt, synthetic construct; identical to SEQ ID NO: 16282
  modified_base 1..9485: mod_base = OTHER; note = Each t is m1f
  source 1..9485: mol_type = other RNA

SEQ ID NO: 17880 - RNA, 9485 nt, synthetic construct; identical to SEQ ID NO: 16283
  modified_base 1..9485: mod_base = OTHER; note = Each t is m1f
  source 1..9485: mol_type = other RNA

SEQ ID NO: 17881 - RNA, 9485 nt, synthetic construct; identical to SEQ ID NO: 16284
  modified_base 1..9485: mod_base = OTHER; note = Each t is m1f
  source 1..9485: mol_type = other RNA

SEQ ID NO: 17882 - RNA, 9485 nt, synthetic construct; identical to SEQ ID NO: 16285
  modified_base 1..9485: mod_base = OTHER; note = Each t is m1f
  source 1..9485: mol_type = other RNA

SEQ ID NO: 17883 - RNA, 9485 nt, synthetic construct; identical to SEQ ID NO: 16286
  modified_base 1..9485: mod_base = OTHER; note = Each t is m1f
  source 1..9485: mol_type = other RNA

SEQ ID NO: 17884 - RNA, 9485 nt, synthetic construct; identical to SEQ ID NO: 16287
  modified_base 1..9485: mod_base = OTHER; note = Each t is m1f
  source 1..9485: mol_type = other RNA

SEQ ID NO: 17885 - RNA, 9485 nt, synthetic construct; identical to SEQ ID NO: 16288
  modified_base 1..9485: mod_base = OTHER; note = Each t is m1f
  source 1..9485: mol_type = other RNA

SEQ ID NO: 17886 - RNA, 9485 nt, synthetic construct; identical to SEQ ID NO: 16289
  modified_base 1..9485: mod_base = OTHER; note = Each t is m1f
  source 1..9485: mol_type = other RNA

SEQ ID NO: 17887 - RNA, 9485 nt, synthetic construct; identical to SEQ ID NO: 16290
  modified_base 1..9485: mod_base = OTHER; note = Each t is m1f
  source 1..9485: mol_type = other RNA

SEQ ID NO: 17888 - RNA, 9485 nt, synthetic construct; identical to SEQ ID NO: 16291
  modified_base 1..9485: mod_base = OTHER; note = Each t is m1f
  source 1..9485: mol_type = other RNA

SEQ ID NO: 17889 - RNA, 9485 nt, synthetic construct; identical to SEQ ID NO: 16292
  modified_base 1..9485: mod_base = OTHER; note = Each t is m1f
  source 1..9485: mol_type = other RNA

SEQ ID NO: 17890 - RNA, 9485 nt, synthetic construct; identical to SEQ ID NO: 16293
  modified_base 1..9485: mod_base = OTHER; note = Each t is m1f
  source 1..9485: mol_type = other RNA

SEQ ID NO: 17891 - RNA, 9485 nt, synthetic construct; identical to SEQ ID NO: 16294
  modified_base 1..9485: mod_base = OTHER; note = Each t is m1f
  source 1..9485: mol_type = other RNA

SEQ ID NO: 17892 - RNA, 9485 nt, synthetic construct; identical to SEQ ID NO: 16295
  modified_base 1..9485: mod_base = OTHER; note = Each t is m1f
  source 1..9485: mol_type = other RNA

SEQ ID NO: 17893 - RNA, 9485 nt, synthetic construct; identical to SEQ ID NO: 16296
  modified_base 1..9485: mod_base = OTHER; note = Each t is m1f
  source 1..9485: mol_type = other RNA

SEQ ID NO: 17894 - RNA, 9485 nt, synthetic construct; identical to SEQ ID NO: 16297
  modified_base 1..9485: mod_base = OTHER; note = Each t is m1f
  source 1..9485: mol_type = other RNA

SEQ ID NO: 17895 - RNA, 9485 nt, synthetic construct; identical to SEQ ID NO: 16298
  modified_base 1..9485: mod_base = OTHER; note = Each t is m1f
  source 1..9485: mol_type = other RNA

SEQ ID NO: 17896 - RNA, 9485 nt, synthetic construct; identical to SEQ ID NO: 16299
  modified_base 1..9485: mod_base = OTHER; note = Each t is m1f
  source 1..9485: mol_type = other RNA

SEQ ID NO: 17897 - RNA, 9485 nt, synthetic construct; identical to SEQ ID NO: 16300
  modified_base 1..9485: mod_base = OTHER; note = Each t is m1f
  source 1..9485: mol_type = other RNA

SEQ ID NO: 17898 - RNA, 9485 nt, synthetic construct; identical to SEQ ID NO: 16301
  modified_base 1..9485: mod_base = OTHER; note = Each t is m1f
  source 1..9485: mol_type = other RNA

SEQ ID NO: 17899 - RNA, 9485 nt, synthetic construct; identical to SEQ ID NO: 16302
  modified_base 1..9485: mod_base = OTHER; note = Each t is m1f
  source 1..9485: mol_type = other RNA

SEQ ID NO: 17900 - RNA, 9485 nt, synthetic construct; identical to SEQ ID NO: 16303
  modified_base 1..9485: mod_base = OTHER; note = Each t is m1f
  source 1..9485: mol_type = other RNA

SEQ ID NO: 17901 - RNA, 9485 nt, synthetic construct; identical to SEQ ID NO: 16304
  modified_base 1..9485: mod_base = OTHER; note = Each t is m1f
  source 1..9485: mol_type = other RNA

SEQ ID NO: 17902 - RNA, 9485 nt, synthetic construct; identical to SEQ ID NO: 16305
  modified_base 1..9485: mod_base = OTHER; note = Each t is m1f
  source 1..9485: mol_type = other RNA

SEQ ID NO: 17903 - RNA, 9485 nt, synthetic construct; identical to SEQ ID NO: 16306
  modified_base 1..9485: mod_base = OTHER; note = Each t is m1f
  source 1..9485: mol_type = other RNA

SEQ ID NO: 17904 - RNA, 9485 nt, synthetic construct; identical to SEQ ID NO: 16307
  modified_base 1..9485: mod_base = OTHER; note = Each t is m1f
  source 1..9485: mol_type = other RNA

SEQ ID NO: 17905 - RNA, 9485 nt, synthetic construct; identical to SEQ ID NO: 16308
  modified_base 1..9485: mod_base = OTHER; note = Each t is m1f
  source 1..9485: mol_type = other RNA

SEQ ID NO: 17906 - RNA, 9485 nt, synthetic construct; identical to SEQ ID NO: 16309
  modified_base 1..9485: mod_base = OTHER; note = Each t is m1f
  source 1..9485: mol_type = other RNA

SEQ ID NO: 17907 - RNA, 9485 nt, synthetic construct; identical to SEQ ID NO: 16310
  modified_base 1..9485: mod_base = OTHER; note = Each t is m1f
  source 1..9485: mol_type = other RNA

SEQ ID NO: 17908 - RNA, 9485 nt, synthetic construct; identical to SEQ ID NO: 16311
  modified_base 1..9485: mod_base = OTHER; note = Each t is m1f
  source 1..9485: mol_type = other RNA

SEQ ID NO: 17909 - RNA, 9485 nt, synthetic construct; identical to SEQ ID NO: 16312
  modified_base 1..9485: mod_base = OTHER; note = Each t is m1f
  source 1..9485: mol_type = other RNA

SEQ ID NO: 17910 - RNA, 9485 nt, synthetic construct; identical to SEQ ID NO: 16313
  modified_base 1..9485: mod_base = OTHER; note = Each t is m1f
  source 1..9485: mol_type = other RNA

SEQ ID NO: 17911 - RNA, 9485 nt, synthetic construct; identical to SEQ ID NO: 16314
  modified_base 1..9485: mod_base = OTHER; note = Each t is m1f
  source 1..9485: mol_type = other RNA

SEQ ID NO: 17912 - RNA, 9485 nt, synthetic construct; identical to SEQ ID NO: 16315
  modified_base 1..9485: mod_base = OTHER; note = Each t is m1f
  source 1..9485: mol_type = other RNA

SEQ ID NO: 17913 - RNA, 9497 nt, synthetic construct; identical to SEQ ID NO: 16316
  modified_base 1..9497: mod_base = OTHER; note = Each t is m1f
  source 1..9497: mol_type = other RNA

SEQ ID NO: 17914 - RNA, 9485 nt, synthetic construct; identical to SEQ ID NO: 16317
  modified_base 1..9485: mod_base = OTHER; note = Each t is m1f
  source 1..9485: mol_type = other RNA

SEQ ID NO: 17915 - RNA, 9485 nt, synthetic construct; identical to SEQ ID NO: 16318
  modified_base 1..9485: mod_base = OTHER; note = Each t is m1f
  source 1..9485: mol_type = other RNA

SEQ ID NO: 17916 - RNA, 9485 nt, synthetic construct; identical to SEQ ID NO: 16319
  modified_base 1..9485: mod_base = OTHER; note = Each t is m1f
  source 1..9485: mol_type = other RNA

SEQ ID NO: 17917 - RNA, 9485 nt, synthetic construct; identical to SEQ ID NO: 16320
  modified_base 1..9485: mod_base = OTHER; note = Each t is m1f
  source 1..9485: mol_type = other RNA

SEQ ID NO: 17918 - RNA, 9485 nt, synthetic construct; identical to SEQ ID NO: 16321
  modified_base 1..9485: mod_base = OTHER; note = Each t is m1f
  source 1..9485: mol_type = other RNA

SEQ ID NO: 17919 - RNA, 9485 nt, synthetic construct; identical to SEQ ID NO: 16322
  modified_base 1..9485: mod_base = OTHER; note = Each t is m1f
  source 1..9485: mol_type = other RNA

SEQ ID NO: 17920 - RNA, 9485 nt, synthetic construct; identical to SEQ ID NO: 16323
  modified_base 1..9485: mod_base = OTHER; note = Each t is m1f
  source 1..9485: mol_type = other RNA

SEQ ID NO: 17921 - RNA, 9485 nt, synthetic construct; identical to SEQ ID NO: 16324
  modified_base 1..9485: mod_base = OTHER; note = Each t is m1f
  source 1..9485: mol_type = other RNA

SEQ ID NO: 17922 - RNA, 9485 nt, synthetic construct; identical to SEQ ID NO: 16325
  modified_base 1..9485: mod_base = OTHER; note = Each t is m1f
  source 1..9485: mol_type = other RNA

SEQ ID NO: 17923 - RNA, 9485 nt, synthetic construct; identical to SEQ ID NO: 16326
  modified_base 1..9485: mod_base = OTHER; note = Each t is m1f
  source 1..9485: mol_type = other RNA

SEQ ID NO: 17924 - RNA, 9485 nt, synthetic construct; identical to SEQ ID NO: 16327
  modified_base 1..9485: mod_base = OTHER; note = Each t is m1f
  source 1..9485: mol_type = other RNA

SEQ ID NO: 17925 - RNA, 9485 nt, synthetic construct; identical to SEQ ID NO: 16328
  modified_base 1..9485: mod_base = OTHER; note = Each t is m1f
  source 1..9485: mol_type = other RNA

SEQ ID NO: 17926 - RNA, 9485 nt, synthetic construct; identical to SEQ ID NO: 16329
  modified_base 1..9485: mod_base = OTHER; note = Each t is m1f
  source 1..9485: mol_type = other RNA

SEQ ID NO: 17927 - RNA, 9485 nt, synthetic construct; identical to SEQ ID NO: 16330
  modified_base 1..9485: mod_base = OTHER; note = Each t is m1f
  source 1..9485: mol_type = other RNA

SEQ ID NO: 17928 - RNA, 9485 nt, synthetic construct; identical to SEQ ID NO: 16331
  modified_base 1..9485: mod_base = OTHER; note = Each t is m1f
  source 1..9485: mol_type = other RNA

SEQ ID NO: 17929 - RNA, 9485 nt, synthetic construct; identical to SEQ ID NO: 16332
  modified_base 1..9485: mod_base = OTHER; note = Each t is m1f
  source 1..9485: mol_type = other RNA

SEQ ID NO: 17930 - RNA, 9485 nt, synthetic construct; identical to SEQ ID NO: 16333
  modified_base 1..9485: mod_base = OTHER; note = Each t is m1f
  source 1..9485: mol_type = other RNA

SEQ ID NO: 17931 - RNA, 9485 nt, synthetic construct; identical to SEQ ID NO: 16334
  modified_base 1..9485: mod_base = OTHER; note = Each t is m1f
  source 1..9485: mol_type = other RNA

SEQ ID NO: 17932 - RNA, 9485 nt, synthetic construct; identical to SEQ ID NO: 16335
  modified_base 1..9485: mod_base = OTHER; note = Each t is m1f
  source 1..9485: mol_type = other RNA

SEQ ID NO: 17933 - RNA, 9485 nt, synthetic construct; identical to SEQ ID NO: 16336
  modified_base 1..9485: mod_base = OTHER; note = Each t is m1f
  source 1..9485: mol_type = other RNA

SEQ ID NO: 17934 - RNA, 9485 nt, synthetic construct; identical to SEQ ID NO: 16337
  modified_base 1..9485: mod_base = OTHER; note = Each t is m1f
  source 1..9485: mol_type = other RNA

SEQ ID NO: 17935 - RNA, 9485 nt, synthetic construct; identical to SEQ ID NO: 16338
  modified_base 1..9485: mod_base = OTHER; note = Each t is m1f
  source 1..9485: mol_type = other RNA

SEQ ID NO: 17936 - RNA, 9485 nt, synthetic construct; identical to SEQ ID NO: 16339
  modified_base 1..9485: mod_base = OTHER; note = Each t is m1f
  source 1..9485: mol_type = other RNA

SEQ ID NO: 17937 - RNA, 9485 nt, synthetic construct; identical to SEQ ID NO: 16340
  modified_base 1..9485: mod_base = OTHER; note = Each t is m1f
  source 1..9485: mol_type = other RNA

SEQ ID NO: 17938 - RNA, 9485 nt, synthetic construct; identical to SEQ ID NO: 16341
  modified_base 1..9485: mod_base = OTHER; note = Each t is m1f
  source 1..9485: mol_type = other RNA

SEQ ID NO: 17939 - RNA, 9533 nt, synthetic construct; identical to SEQ ID NO: 16342
  modified_base 1..9533: mod_base = OTHER; note = Each t is m1f
  source 1..9533: mol_type = other RNA

SEQ ID NO: 17940 - RNA, 9485 nt, synthetic construct; identical to SEQ ID NO: 16343
  modified_base 1..9485: mod_base = OTHER; note = Each t is m1f
  source 1..9485: mol_type = other RNA

SEQ ID NO: 17941 - RNA, 9485 nt, synthetic construct; identical to SEQ ID NO: 16344
  modified_base 1..9485: mod_base = OTHER; note = Each t is m1f
  source 1..9485: mol_type = other RNA

SEQ ID NO: 17942 - RNA, 9485 nt, synthetic construct; identical to SEQ ID NO: 16345
  modified_base 1..9485: mod_base = OTHER; note = Each t is m1f
  source 1..9485: mol_type = other RNA

SEQ ID NO: 17943 - RNA, 9485 nt, synthetic construct; identical to SEQ ID NO: 16346
  modified_base 1..9485: mod_base = OTHER; note = Each t is m1f
  source 1..9485: mol_type = other RNA

SEQ ID NO: 17944 - RNA, 9479 nt, synthetic construct; identical to SEQ ID NO: 16347
  modified_base 1..9479: mod_base = OTHER; note = Each t is m1f
  source 1..9479: mol_type = other RNA

SEQ ID NO: 17945 - RNA, 9485 nt, synthetic construct; identical to SEQ ID NO: 16348
  modified_base 1..9485: mod_base = OTHER; note = Each t is m1f
  source 1..9485: mol_type = other RNA

SEQ ID NO: 17946 - RNA, 9485 nt, synthetic construct; identical to SEQ ID NO: 16349
  modified_base 1..9485: mod_base = OTHER; note = Each t is m1f
  source 1..9485: mol_type = other RNA

SEQ ID NO: 17947 - RNA, 9485 nt, synthetic construct; identical to SEQ ID NO: 16350
  modified_base 1..9485: mod_base = OTHER; note = Each t is m1f
  source 1..9485: mol_type = other RNA

SEQ ID NO: 17948 - RNA, 9485 nt, synthetic construct; identical to SEQ ID NO: 16351
  modified_base 1..9485: mod_base = OTHER; note = Each t is m1f
  source 1..9485: mol_type = other RNA

SEQ ID NO: 17949 - RNA, 9485 nt, synthetic construct; identical to SEQ ID NO: 16352
  modified_base 1..9485: mod_base = OTHER; note = Each t is m1f
  source 1..9485: mol_type = other RNA

SEQ ID NO: 17950 - RNA, 9485 nt, synthetic construct; identical to SEQ ID NO: 16353
  modified_base 1..9485: mod_base = OTHER; note = Each t is m1f
  source 1..9485: mol_type = other RNA

SEQ ID NO: 17951 - RNA, 9485 nt, synthetic construct; identical to SEQ ID NO: 16354
  modified_base 1..9485: mod_base = OTHER; note = Each t is m1f
  source 1..9485: mol_type = other RNA

SEQ ID NO: 17952 - RNA, 9485 nt, synthetic construct; identical to SEQ ID NO: 16355
  modified_base 1..9485: mod_base = OTHER; note = Each t is m1f
  source 1..9485: mol_type = other RNA

SEQ ID NO: 17953 - RNA, 9485 nt, synthetic construct; identical to SEQ ID NO: 16356
  modified_base 1..9485: mod_base = OTHER; note = Each t is m1f
  source 1..9485: mol_type = other RNA

SEQ ID NO: 17954 - RNA, 9485 nt, synthetic construct; identical to SEQ ID NO: 16357
  modified_base 1..9485: mod_base = OTHER; note = Each t is m1f
  source 1..9485: mol_type = other RNA

SEQ ID NO: 17955 - RNA, 9485 nt, synthetic construct; identical to SEQ ID NO: 16358
  modified_base 1..9485: mod_base = OTHER; note = Each t is m1f
  source 1..9485: mol_type = other RNA

SEQ ID NO: 17956 - RNA, 9485 nt, synthetic construct; identical to SEQ ID NO: 16359
  modified_base 1..9485: mod_base = OTHER; note = Each t is m1f
  source 1..9485: mol_type = other RNA

SEQ ID NO: 17957 - RNA, 9485 nt, synthetic construct; identical to SEQ ID NO: 16360
  modified_base 1..9485: mod_base = OTHER; note = Each t is m1f
  source 1..9485: mol_type = other RNA

SEQ ID NO: 17958 - RNA, 9485 nt, synthetic construct; identical to SEQ ID NO: 16361
  modified_base 1..9485: mod_base = OTHER; note = Each t is m1f
  source 1..9485: mol_type = other RNA

SEQ ID NO: 17959 - RNA, 9485 nt, synthetic construct; identical to SEQ ID NO: 16362
  modified_base 1..9485: mod_base = OTHER; note = Each t is m1f
  source 1..9485: mol_type = other RNA

SEQ ID NO: 17960 - RNA, 9485 nt, synthetic construct; identical to SEQ ID NO: 16363
  modified_base 1..9485: mod_base = OTHER; note = Each t is m1f
  source 1..9485: mol_type = other RNA

SEQ ID NO: 17961 - RNA, 9485 nt, synthetic construct; identical to SEQ ID NO: 16364
  modified_base 1..9485: mod_base = OTHER; note = Each t is m1f
  source 1..9485: mol_type = other RNA

SEQ ID NO: 17962 - RNA, 9485 nt, synthetic construct; identical to SEQ ID NO: 16365
  modified_base 1..9485: mod_base = OTHER; note = Each t is m1f
  source 1..9485: mol_type = other RNA

SEQ ID NO: 17963 - RNA, 9485 nt, synthetic construct; identical to SEQ ID NO: 16366
  modified_base 1..9485: mod_base = OTHER; note = Each t is m1f
  source 1..9485: mol_type = other RNA

SEQ ID NO: 17964 - RNA, 9485 nt, synthetic construct; identical to SEQ ID NO: 16367
  modified_base 1..9485: mod_base = OTHER; note = Each t is m1f
  source 1..9485: mol_type = other RNA

SEQ ID NO: 17965 - RNA, 9485 nt, synthetic construct; identical to SEQ ID NO: 16368
  modified_base 1..9485: mod_base = OTHER; note = Each t is m1f
  source 1..9485: mol_type = other RNA

SEQ ID NO: 17966 - RNA, 9485 nt, synthetic construct; identical to SEQ ID NO: 16369
  modified_base 1..9485: mod_base = OTHER; note = Each t is m1f
  source 1..9485: mol_type = other RNA

SEQ ID NO: 17967 - RNA, 9485 nt, synthetic construct; identical to SEQ ID NO: 16370
  modified_base 1..9485: mod_base = OTHER; note = Each t is m1f
  source 1..9485: mol_type = other RNA

SEQ ID NO: 17968 - RNA, 9485 nt, synthetic construct; identical to SEQ ID NO: 16371
  modified_base 1..9485: mod_base = OTHER; note = Each t is m1f
  source 1..9485: mol_type = other RNA

SEQ ID NO: 17969 - RNA, 9485 nt, synthetic construct; identical to SEQ ID NO: 16372
  modified_base 1..9485: mod_base = OTHER; note = Each t is m1f
  source 1..9485: mol_type = other RNA

SEQ ID NO: 17970 - RNA, 9485 nt, synthetic construct; identical to SEQ ID NO: 16373
  modified_base 1..9485: mod_base = OTHER; note = Each t is m1f
  source 1..9485: mol_type = other RNA

SEQ ID NO: 17971 - RNA, 9485 nt, synthetic construct; identical to SEQ ID NO: 16374
  modified_base 1..9485: mod_base = OTHER; note = Each t is m1f
  source 1..9485: mol_type = other RNA

SEQ ID NO: 17972 - RNA, 9485 nt, synthetic construct; identical to SEQ ID NO: 16375
  modified_base 1..9485: mod_base = OTHER; note = Each t is m1f
  source 1..9485: mol_type = other RNA

SEQ ID NO: 17973 - RNA, 9485 nt, synthetic construct; identical to SEQ ID NO: 16376
  modified_base 1..9485: mod_base = OTHER; note = Each t is m1f
  source 1..9485: mol_type = other RNA

SEQ ID NO: 17974 - RNA, 9485 nt, synthetic construct; identical to SEQ ID NO: 16377
  modified_base 1..9485: mod_base = OTHER; note = Each t is m1f
  source 1..9485: mol_type = other RNA

SEQ ID NO: 17975 - RNA, 9485 nt, synthetic construct; identical to SEQ ID NO: 16378
  modified_base 1..9485: mod_base = OTHER; note = Each t is m1f
  source 1..9485: mol_type = other RNA

SEQ ID NO: 17976 - RNA, 9485 nt, synthetic construct; identical to SEQ ID NO: 16379
  modified_base 1..9485: mod_base = OTHER; note = Each t is m1f
  source 1..9485: mol_type = other RNA

SEQ ID NO: 17977 - RNA, 9485 nt, synthetic construct; identical to SEQ ID NO: 16380
  modified_base 1..9485: mod_base = OTHER; note = Each t is m1f
  source 1..9485: mol_type = other RNA

SEQ ID NO: 17978 - RNA, 9485 nt, synthetic construct; identical to SEQ ID NO: 16381
  modified_base 1..9485: mod_base = OTHER; note = Each t is m1f
  source 1..9485: mol_type = other RNA

SEQ ID NO: 17979 - RNA, 9485 nt, synthetic construct; identical to SEQ ID NO: 16382
  modified_base 1..9485: mod_base = OTHER; note = Each t is m1f
  source 1..9485: mol_type = other RNA

SEQ ID NO: 17980 - RNA, 9485 nt, synthetic construct; identical to SEQ ID NO: 16383
  modified_base 1..9485: mod_base = OTHER; note = Each t is m1f
  source 1..9485: mol_type = other RNA

SEQ ID NO: 17981 - RNA, 9485 nt, synthetic construct; identical to SEQ ID NO: 16384
  modified_base 1..9485: mod_base = OTHER; note = Each t is m1f
  source 1..9485: mol_type = other RNA

SEQ ID NO: 17982 - RNA, 9485 nt, synthetic construct; identical to SEQ ID NO: 16385
  modified_base 1..9485: mod_base = OTHER; note = Each t is m1f
  source 1..9485: mol_type = other RNA

SEQ ID NO: 17983 - RNA, 9485 nt, synthetic construct; identical to SEQ ID NO: 16386
  modified_base 1..9485: mod_base = OTHER; note = Each t is m1f
  source 1..9485: mol_type = other RNA

SEQ ID NO: 17984 - RNA, 9485 nt, synthetic construct; identical to SEQ ID NO: 16387
  modified_base 1..9485: mod_base = OTHER; note = Each t is m1f
  source 1..9485: mol_type = other RNA

SEQ ID NO: 17985 - RNA, 9485 nt, synthetic construct; identical to SEQ ID NO: 16388
  modified_base 1..9485: mod_base = OTHER; note = Each t is m1f
  source 1..9485: mol_type = other RNA

SEQ ID NO: 17986 - RNA, 9485 nt, synthetic construct; identical to SEQ ID NO: 16389
  modified_base 1..9485: mod_base = OTHER; note = Each t is m1f
  source 1..9485: mol_type = other RNA

SEQ ID NO: 17987 - RNA, 9485 nt, synthetic construct; identical to SEQ ID NO: 16390
  modified_base 1..9485: mod_base = OTHER; note = Each t is m1f
  source 1..9485: mol_type = other RNA

SEQ ID NO: 17988 - RNA, 9485 nt, synthetic construct; identical to SEQ ID NO: 16391
  modified_base 1..9485: mod_base = OTHER; note = Each t is m1f
  source 1..9485: mol_type = other RNA

SEQ ID NO: 17989 - RNA, 9485 nt, synthetic construct; identical to SEQ ID NO: 16392
  modified_base 1..9485: mod_base = OTHER; note = Each t is m1f
  source 1..9485: mol_type = other RNA

SEQ ID NO: 17990 - RNA, 9485 nt, synthetic construct; identical to SEQ ID NO: 16393
  modified_base 1..9485: mod_base = OTHER; note = Each t is m1f
  source 1..9485: mol_type = other RNA

SEQ ID NO: 17991 - RNA, 9485 nt, synthetic construct; identical to SEQ ID NO: 16394
  modified_base 1..9485: mod_base = OTHER; note = Each t is m1f
  source 1..9485: mol_type = other RNA

SEQ ID NO: 17992 - RNA, 9485 nt, synthetic construct; identical to SEQ ID NO: 16395
  modified_base 1..9485: mod_base = OTHER; note = Each t is m1f
  source 1..9485: mol_type = other RNA

SEQ ID NO: 17993 - RNA, 9485 nt, synthetic construct; identical to SEQ ID NO: 16396
  modified_base 1..9485: mod_base = OTHER; note = Each t is m1f
  source 1..9485: mol_type = other RNA

SEQ ID NO: 17994 - RNA, 9485 nt, synthetic construct; identical to SEQ ID NO: 16397
  modified_base 1..9485: mod_base = OTHER; note = Each t is m1f
  source 1..9485: mol_type = other RNA

SEQ ID NO: 17995 - RNA, 9485 nt, synthetic construct; identical to SEQ ID NO: 16398
  modified_base 1..9485: mod_base = OTHER; note = Each t is m1f
  source 1..9485: mol_type = other RNA

SEQ ID NO: 17996 - RNA, 9485 nt, synthetic construct; identical to SEQ ID NO: 16399
  modified_base 1..9485: mod_base = OTHER; note = Each t is m1f
  source 1..9485: mol_type = other RNA

SEQ ID NO: 17997 - RNA, 9485 nt, synthetic construct; identical to SEQ ID NO: 16400
  modified_base 1..9485: mod_base = OTHER; note = Each t is m1f
  source 1..9485: mol_type = other RNA

SEQ ID NO: 17998 - RNA, 9485 nt, synthetic construct; identical to SEQ ID NO: 16401
  modified_base 1..9485: mod_base = OTHER; note = Each t is m1f
  source 1..9485: mol_type = other RNA

SEQ ID NO: 17999 - RNA, 9485 nt, synthetic construct; identical to SEQ ID NO: 16402
  modified_base 1..9485: mod_base = OTHER; note = Each t is m1f
  source 1..9485: mol_type = other RNA

SEQ ID NO: 18000 - RNA, 9485 nt, synthetic construct; identical to SEQ ID NO: 16403
  modified_base 1..9485: mod_base = OTHER; note = Each t is m1f
  source 1..9485: mol_type = other RNA

SEQ ID NO: 18001 - RNA, 9485 nt, synthetic construct; identical to SEQ ID NO: 16404
  modified_base 1..9485: mod_base = OTHER; note = Each t is m1f
  source 1..9485: mol_type = other RNA

SEQ ID NO: 18002 - RNA, 9485 nt, synthetic construct; identical to SEQ ID NO: 16405
  modified_base 1..9485: mod_base = OTHER; note = Each t is m1f
  source 1..9485: mol_type = other RNA

SEQ ID NO: 18003 - RNA, 9485 nt, synthetic construct; identical to SEQ ID NO: 16406
  modified_base 1..9485: mod_base = OTHER; note = Each t is m1f
  source 1..9485: mol_type = other RNA

SEQ ID NO: 18004 - RNA, 9485 nt, synthetic construct; identical to SEQ ID NO: 16407
  modified_base 1..9485: mod_base = OTHER; note = Each t is m1f
  source 1..9485: mol_type = other RNA

SEQ ID NO: 18005 - RNA, 9485 nt, synthetic construct; identical to SEQ ID NO: 16408
  modified_base 1..9485: mod_base = OTHER; note = Each t is m1f
  source 1..9485: mol_type = other RNA

SEQ ID NO: 18006 - RNA, 9485 nt, synthetic construct; identical to SEQ ID NO: 16409
  modified_base 1..9485: mod_base = OTHER; note = Each t is m1f
  source 1..9485: mol_type = other RNA

SEQ ID NO: 18007 - RNA, 9485 nt, synthetic construct; identical to SEQ ID NO: 16410
  modified_base 1..9485: mod_base = OTHER; note = Each t is m1f
  source 1..9485: mol_type = other RNA

SEQ ID NO: 18008 - RNA, 9485 nt, synthetic construct; identical to SEQ ID NO: 16411
  modified_base 1..9485: mod_base = OTHER; note = Each t is m1f
  source 1..9485: mol_type = other RNA

SEQ ID NO: 18009 - RNA, 9485 nt, synthetic construct; identical to SEQ ID NO: 16412
  modified_base 1..9485: mod_base = OTHER; note = Each t is m1f
  source 1..9485: mol_type = other RNA

SEQ ID NO: 18010 - RNA, 9485 nt, synthetic construct; identical to SEQ ID NO: 16413
  modified_base 1..9485: mod_base = OTHER; note = Each t is m1f
  source 1..9485: mol_type = other RNA

SEQ ID NO: 18011 - RNA, 9485 nt, synthetic construct; identical to SEQ ID NO: 16414
  modified_base 1..9485: mod_base = OTHER; note = Each t is m1f
  source 1..9485: mol_type = other RNA

SEQ ID NO: 18012 - RNA, 9485 nt, synthetic construct; identical to SEQ ID NO: 16415
  modified_base 1..9485: mod_base = OTHER; note = Each t is m1f
  source 1..9485: mol_type = other RNA

SEQ ID NO: 18013 - RNA, 9485 nt, synthetic construct; identical to SEQ ID NO: 16416
  modified_base 1..9485: mod_base = OTHER; note = Each t is m1f
  source 1..9485: mol_type = other RNA

SEQ ID NO: 18014 - RNA, 9485 nt, synthetic construct; identical to SEQ ID NO: 16417
  modified_base 1..9485: mod_base = OTHER; note = Each t is m1f
  source 1..9485: mol_type = other RNA

SEQ ID NO: 18015 - RNA, 9485 nt, synthetic construct; identical to SEQ ID NO: 16418
  modified_base 1..9485: mod_base = OTHER; note = Each t is m1f
  source 1..9485: mol_type = other RNA

SEQ ID NO: 18016 - RNA, 9485 nt, synthetic construct; identical to SEQ ID NO: 16419
  modified_base 1..9485: mod_base = OTHER; note = Each t is m1f
  source 1..9485: mol_type = other RNA

SEQ ID NO: 18017 - RNA, 9485 nt, synthetic construct; identical to SEQ ID NO: 16420
  modified_base 1..9485: mod_base = OTHER; note = Each t is m1f
  source 1..9485: mol_type = other RNA

SEQ ID NO: 18018 - RNA, 9485 nt, synthetic construct; identical to SEQ ID NO: 16421
  modified_base 1..9485: mod_base = OTHER; note = Each t is m1f
  source 1..9485: mol_type = other RNA

SEQ ID NO: 18019 - RNA, 9485 nt, synthetic construct; identical to SEQ ID NO: 16422
  modified_base 1..9485: mod_base = OTHER; note = Each t is m1f
  source 1..9485: mol_type = other RNA

SEQ ID NO: 18020 - RNA, 9485 nt, synthetic construct; identical to SEQ ID NO: 16423
  modified_base 1..9485: mod_base = OTHER; note = Each t is m1f
  source 1..9485: mol_type = other RNA

SEQ ID NO: 18021 - RNA, 9485 nt, synthetic construct; identical to SEQ ID NO: 16424
  modified_base 1..9485: mod_base = OTHER; note = Each t is m1f
  source 1..9485: mol_type = other RNA

SEQ ID NO: 18022 - RNA, 9485 nt, synthetic construct; identical to SEQ ID NO: 16425
  modified_base 1..9485: mod_base = OTHER; note = Each t is m1f
  source 1..9485: mol_type = other RNA

SEQ ID NO: 18023 - RNA, 9485 nt, synthetic construct; identical to SEQ ID NO: 16426
  modified_base 1..9485: mod_base = OTHER; note = Each t is m1f
  source 1..9485: mol_type = other RNA

SEQ ID NO: 18024 - RNA, 9485 nt, synthetic construct; identical to SEQ ID NO: 16427
  modified_base 1..9485: mod_base = OTHER; note = Each t is m1f
  source 1..9485: mol_type = other RNA

SEQ ID NO: 18025 - RNA, 9485 nt, synthetic construct; identical to SEQ ID NO: 16428
  modified_base 1..9485: mod_base = OTHER; note = Each t is m1f
  source 1..9485: mol_type = other RNA

SEQ ID NO: 18026 - RNA, 9485 nt, synthetic construct; identical to SEQ ID NO: 16429
  modified_base 1..9485: mod_base = OTHER; note = Each t is m1f
  source 1..9485: mol_type = other RNA

SEQ ID NO: 18027 - RNA, 9485 nt, synthetic construct; identical to SEQ ID NO: 16430
  modified_base 1..9485: mod_base = OTHER; note = Each t is m1f
  source 1..9485: mol_type = other RNA

SEQ ID NO: 18028 - RNA, 9485 nt, synthetic construct; identical to SEQ ID NO: 16431
  modified_base 1..9485: mod_base = OTHER; note = Each t is m1f
  source 1..9485: mol_type = other RNA

SEQ ID NO: 18029 - RNA, 9485 nt, synthetic construct; identical to SEQ ID NO: 16432
  modified_base 1..9485: mod_base = OTHER; note = Each t is m1f
  source 1..9485: mol_type = other RNA

SEQ ID NO: 18030 - RNA, 9485 nt, synthetic construct; identical to SEQ ID NO: 16433
  modified_base 1..9485: mod_base = OTHER; note = Each t is m1f
  source 1..9485: mol_type = other RNA

SEQ ID NO: 18031 - RNA, 9485 nt, synthetic construct; identical to SEQ ID NO: 16434
  modified_base 1..9485: mod_base = OTHER; note = Each t is m1f
  source 1..9485: mol_type = other RNA

SEQ ID NO: 18032 - RNA, 9485 nt, synthetic construct; identical to SEQ ID NO: 16435
  modified_base 1..9485: mod_base = OTHER; note = Each t is m1f
  source 1..9485: mol_type = other RNA

SEQ ID NO: 18033 - RNA, 9485 nt, synthetic construct; identical to SEQ ID NO: 16436
  modified_base 1..9485: mod_base = OTHER; note = Each t is m1f
  source 1..9485: mol_type = other RNA

SEQ ID NO: 18034 - RNA, 9485 nt, synthetic construct; identical to SEQ ID NO: 16437
  modified_base 1..9485: mod_base = OTHER; note = Each t is m1f
  source 1..9485: mol_type = other RNA

SEQ ID NO: 18035 - RNA, 9485 nt, synthetic construct; identical to SEQ ID NO: 16438
  modified_base 1..9485: mod_base = OTHER; note = Each t is m1f
  source 1..9485: mol_type = other RNA

SEQ ID NO: 18036 - RNA, 9485 nt, synthetic construct; identical to SEQ ID NO: 16439
  modified_base 1..9485: mod_base = OTHER; note = Each t is m1f
  source 1..9485: mol_type = other RNA

SEQ ID NO: 18037 - RNA, 9485 nt, synthetic construct; identical to SEQ ID NO: 16440
  modified_base 1..9485: mod_base = OTHER; note = Each t is m1f
  source 1..9485: mol_type = other RNA

SEQ ID NO: 18038 - RNA, 9485 nt, synthetic construct; identical to SEQ ID NO: 16441
  modified_base 1..9485: mod_base = OTHER; note = Each t is m1f
  source 1..9485: mol_type = other RNA

SEQ ID NO: 18039 - RNA, 9485 nt, synthetic construct; identical to SEQ ID NO: 16442
  modified_base 1..9485: mod_base = OTHER; note = Each t is m1f
  source 1..9485: mol_type = other RNA

SEQ ID NO: 18040 - RNA, 9485 nt, synthetic construct; identical to SEQ ID NO: 16443
  modified_base 1..9485: mod_base = OTHER; note = Each t is m1f
  source 1..9485: mol_type = other RNA

SEQ ID NO: 18041 - RNA, 9485 nt, synthetic construct; identical to SEQ ID NO: 16444
  modified_base 1..9485: mod_base = OTHER; note = Each t is m1f
  source 1..9485: mol_type = other RNA

SEQ ID NO: 18042 - RNA, 9485 nt, synthetic construct; identical to SEQ ID NO: 16445
  modified_base 1..9485: mod_base = OTHER; note = Each t is m1f
  source 1..9485: mol_type = other RNA

SEQ ID NO: 18043 - RNA, 9485 nt, synthetic construct; identical to SEQ ID NO: 16446
  modified_base 1..9485: mod_base = OTHER; note = Each t is m1f
  source 1..9485: mol_type = other RNA

SEQ ID NO: 18044 - RNA, 9485 nt, synthetic construct; identical to SEQ ID NO: 16447
  modified_base 1..9485: mod_base = OTHER; note = Each t is m1f
  source 1..9485: mol_type = other RNA

SEQ ID NO: 18045 - RNA, 9485 nt, synthetic construct; identical to SEQ ID NO: 16448
  modified_base 1..9485: mod_base = OTHER; note = Each t is m1f
  source 1..9485: mol_type = other RNA

SEQ ID NO: 18046 - RNA, 9485 nt, synthetic construct; identical to SEQ ID NO: 16449
  modified_base 1..9485: mod_base = OTHER; note = Each t is m1f
  source 1..9485: mol_type = other RNA

SEQ ID NO: 18047 - RNA, 9485 nt, synthetic construct; identical to SEQ ID NO: 16450
  modified_base 1..9485: mod_base = OTHER; note = Each t is m1f
  source 1..9485: mol_type = other RNA

SEQ ID NO: 18048 - RNA, 9485 nt, synthetic construct; identical to SEQ ID NO: 16451
  modified_base 1..9485: mod_base = OTHER; note = Each t is m1f
  source 1..9485: mol_type = other RNA

SEQ ID NO: 18049 - RNA, 9485 nt, synthetic construct; identical to SEQ ID NO: 16452
  modified_base 1..9485: mod_base = OTHER; note = Each t is m1f
  source 1..9485: mol_type = other RNA

SEQ ID NO: 18050 - RNA, 9485 nt, synthetic construct; identical to SEQ ID NO: 16453
  modified_base 1..9485: mod_base = OTHER; note = Each t is m1f
  source 1..9485: mol_type = other RNA

SEQ ID NO: 18051 - RNA, 9551 nt, synthetic construct; identical to SEQ ID NO: 16454
  modified_base 1..9551: mod_base = OTHER; note = Each t is m1f
  source 1..9551: mol_type = other RNA

SEQ ID NO: 18052 - RNA, 9485 nt, synthetic construct; identical to SEQ ID NO: 16455
  modified_base 1..9485: mod_base = OTHER; note = Each t is m1f
  source 1..9485: mol_type = other RNA

SEQ ID NO: 18053 - RNA, 9479 nt, synthetic construct; identical to SEQ ID NO: 16456
  modified_base 1..9479: mod_base = OTHER; note = Each t is m1f
  source 1..9479: mol_type = other RNA

SEQ ID NO: 18054 - RNA, 9485 nt, synthetic construct; identical to SEQ ID NO: 16457
  modified_base 1..9485: mod_base = OTHER; note = Each t is m1f
  source 1..9485: mol_type = other RNA

SEQ ID NO: 18055 - RNA, 9485 nt, synthetic construct; identical to SEQ ID NO: 16458
  modified_base 1..9485: mod_base = OTHER; note = Each t is m1f
  source 1..9485: mol_type = other RNA

SEQ ID NO: 18056 - RNA, 9485 nt, synthetic construct; identical to SEQ ID NO: 16459
  modified_base 1..9485: mod_base = OTHER; note = Each t is m1f
  source 1..9485: mol_type = other RNA

SEQ ID NO: 18057 - RNA, 9485 nt, synthetic construct; identical to SEQ ID NO: 16460
  modified_base 1..9485: mod_base = OTHER; note = Each t is m1f
  source 1..9485: mol_type = other RNA

SEQ ID NO: 18058 - RNA, 9485 nt, synthetic construct; identical to SEQ ID NO: 16461
  modified_base 1..9485: mod_base = OTHER; note = Each t is m1f
  source 1..9485: mol_type = other RNA

SEQ ID NO: 18059 - RNA, 9485 nt, synthetic construct; identical to SEQ ID NO: 16462
  modified_base 1..9485: mod_base = OTHER; note = Each t is m1f
  source 1..9485: mol_type = other RNA

SEQ ID NO: 18060 - RNA, 9485 nt, synthetic construct; identical to SEQ ID NO: 16463
  modified_base 1..9485: mod_base = OTHER; note = Each t is m1f
  source 1..9485: mol_type = other RNA

SEQ ID NO: 18061 - RNA, 9485 nt, synthetic construct; identical to SEQ ID NO: 16464
  modified_base 1..9485: mod_base = OTHER; note = Each t is m1f
  source 1..9485: mol_type = other RNA

SEQ ID NO: 18062 - RNA, 9485 nt, synthetic construct; identical to SEQ ID NO: 16465
  modified_base 1..9485: mod_base = OTHER; note = Each t is m1f
  source 1..9485: mol_type = other RNA

SEQ ID NO: 18063 - RNA, 9485 nt, synthetic construct; identical to SEQ ID NO: 16466
  modified_base 1..9485: mod_base = OTHER; note = Each t is m1f
  source 1..9485: mol_type = other RNA

SEQ ID NO: 18064 - RNA, 9485 nt, synthetic construct; identical to SEQ ID NO: 16467
  modified_base 1..9485: mod_base = OTHER; note = Each t is m1f
  source 1..9485: mol_type = other RNA

SEQ ID NO: 18065 - RNA, 9485 nt, synthetic construct; identical to SEQ ID NO: 16468
  modified_base 1..9485: mod_base = OTHER; note = Each t is m1f
  source 1..9485: mol_type = other RNA

SEQ ID NO: 18066 - RNA, 9485 nt, synthetic construct; identical to SEQ ID NO: 16469
  modified_base 1..9485: mod_base = OTHER; note = Each t is m1f
  source 1..9485: mol_type = other RNA

SEQ ID NO: 18067 - RNA, 9485 nt, synthetic construct; identical to SEQ ID NO: 16470
  modified_base 1..9485: mod_base = OTHER; note = Each t is m1f
  source 1..9485: mol_type = other RNA

SEQ ID NO: 18068 - RNA, 9485 nt, synthetic construct; identical to SEQ ID NO: 16471
  modified_base 1..9485: mod_base = OTHER; note = Each t is m1f
  source 1..9485: mol_type = other RNA

SEQ ID NO: 18069 - RNA, 9491 nt, synthetic construct; identical to SEQ ID NO: 16472
  modified_base 1..9491: mod_base = OTHER; note = Each t is m1f
  source 1..9491: mol_type = other RNA

SEQ ID NO: 18070 - RNA, 9485 nt, synthetic construct; identical to SEQ ID NO: 16473
  modified_base 1..9485: mod_base = OTHER; note = Each t is m1f
  source 1..9485: mol_type = other RNA

SEQ ID NO: 18071 - RNA, 9485 nt, synthetic construct; identical to SEQ ID NO: 16474
  modified_base 1..9485: mod_base = OTHER; note = Each t is m1f
  source 1..9485: mol_type = other RNA

SEQ ID NO: 18072 - RNA, 9485 nt, synthetic construct; identical to SEQ ID NO: 16475
  modified_base 1..9485: mod_base = OTHER; note = Each t is m1f
  source 1..9485: mol_type = other RNA

SEQ ID NO: 18073 - RNA, 9485 nt, synthetic construct; identical to SEQ ID NO: 16476
  modified_base 1..9485: mod_base = OTHER; note = Each t is m1f
  source 1..9485: mol_type = other RNA

SEQ ID NO: 18074 - RNA, 9485 nt, synthetic construct; identical to SEQ ID NO: 16477
  modified_base 1..9485: mod_base = OTHER; note = Each t is m1f
  source 1..9485: mol_type = other RNA

SEQ ID NO: 18075 - RNA, 9485 nt, synthetic construct; identical to SEQ ID NO: 16478
  modified_base 1..9485: mod_base = OTHER; note = Each t is m1f
  source 1..9485: mol_type = other RNA

SEQ ID NO: 18076 - RNA, 9485 nt, synthetic construct; identical to SEQ ID NO: 16479
  modified_base 1..9485: mod_base = OTHER; note = Each t is m1f
  source 1..9485: mol_type = other RNA

SEQ ID NO: 18077 - RNA, 9485 nt, synthetic construct; identical to SEQ ID NO: 16480
  modified_base 1..9485: mod_base = OTHER; note = Each t is m1f
  source 1..9485: mol_type = other RNA

SEQ ID NO: 18078 - RNA, 9485 nt, synthetic construct; identical to SEQ ID NO: 16481
  modified_base 1..9485: mod_base = OTHER; note = Each t is m1f
  source 1..9485: mol_type = other RNA

SEQ ID NO: 18079 - RNA, 9485 nt, synthetic construct; identical to SEQ ID NO: 16482
  modified_base 1..9485: mod_base = OTHER; note = Each t is m1f
  source 1..9485: mol_type = other RNA

SEQ ID NO: 18080 - RNA, 9485 nt, synthetic construct; identical to SEQ ID NO: 16483
  modified_base 1..9485: mod_base = OTHER; note = Each t is m1f
  source 1..9485: mol_type = other RNA

SEQ ID NO: 18081 - RNA, 9485 nt, synthetic construct; identical to SEQ ID NO: 16484
  modified_base 1..9485: mod_base = OTHER; note = Each t is m1f
  source 1..9485: mol_type = other RNA

SEQ ID NO: 18082 - RNA, 9485 nt, synthetic construct; identical to SEQ ID NO: 16485
  modified_base 1..9485: mod_base = OTHER; note = Each t is m1f
  source 1..9485: mol_type = other RNA

SEQ ID NO: 18083 - RNA, 9485 nt, synthetic construct; identical to SEQ ID NO: 16486
  modified_base 1..9485: mod_base = OTHER; note = Each t is m1f
  source 1..9485: mol_type = other RNA

SEQ ID NO: 18084 - RNA, 9485 nt, synthetic construct; identical to SEQ ID NO: 16487
  modified_base 1..9485: mod_base = OTHER; note = Each t is m1f
  source 1..9485: mol_type = other RNA

SEQ ID NO: 18085 - RNA, 9485 nt, synthetic construct; identical to SEQ ID NO: 16488
  modified_base 1..9485: mod_base = OTHER; note = Each t is m1f
  source 1..9485: mol_type = other RNA

SEQ ID NO: 18086 - RNA, 9485 nt, synthetic construct; identical to SEQ ID NO: 16489
  modified_base 1..9485: mod_base = OTHER; note = Each t is m1f
  source 1..9485: mol_type = other RNA

SEQ ID NO: 18087 - RNA, 9485 nt, synthetic construct; identical to SEQ ID NO: 16490
  modified_base 1..9485: mod_base = OTHER; note = Each t is m1f
  source 1..9485: mol_type = other RNA

SEQ ID NO: 18088 - RNA, 9485 nt, synthetic construct; identical to SEQ ID NO: 16491
  modified_base 1..9485: mod_base = OTHER; note = Each t is m1f
  source 1..9485: mol_type = other RNA

SEQ ID NO: 18089 - RNA, 9485 nt, synthetic construct; identical to SEQ ID NO: 16492
  modified_base 1..9485: mod_base = OTHER; note = Each t is m1f
  source 1..9485: mol_type = other RNA

SEQ ID NO: 18090 - RNA, 9485 nt, synthetic construct; identical to SEQ ID NO: 16493
  modified_base 1..9485: mod_base = OTHER; note = Each t is m1f
  source 1..9485: mol_type = other RNA

SEQ ID NO: 18091 - RNA, 9485 nt, synthetic construct; identical to SEQ ID NO: 16494
  modified_base 1..9485: mod_base = OTHER; note = Each t is m1f
  source 1..9485: mol_type = other RNA

SEQ ID NO: 18092 - RNA, 9485 nt, synthetic construct; identical to SEQ ID NO: 16495
  modified_base 1..9485: mod_base = OTHER; note = Each t is m1f
  source 1..9485: mol_type = other RNA

SEQ ID NO: 18093 - RNA, 9485 nt, synthetic construct; identical to SEQ ID NO: 16496
  modified_base 1..9485: mod_base = OTHER; note = Each t is m1f
  source 1..9485: mol_type = other RNA

SEQ ID NO: 18094 - RNA, 9485 nt, synthetic construct; identical to SEQ ID NO: 16497
  modified_base 1..9485: mod_base = OTHER; note = Each t is m1f
  source 1..9485: mol_type = other RNA

SEQ ID NO: 18095 - RNA, 9485 nt, synthetic construct; identical to SEQ ID NO: 16498
  modified_base 1..9485: mod_base = OTHER; note = Each t is m1f
  source 1..9485: mol_type = other RNA

SEQ ID NO: 18096 - RNA, 9485 nt, synthetic construct; identical to SEQ ID NO: 16499
  modified_base 1..9485: mod_base = OTHER; note = Each t is m1f
  source 1..9485: mol_type = other RNA

SEQ ID NO: 18097 - RNA, 9485 nt, synthetic construct; identical to SEQ ID NO: 16500
  modified_base 1..9485: mod_base = OTHER; note = Each t is m1f
  source 1..9485: mol_type = other RNA

SEQ ID NO: 18098 - RNA, 9485 nt, synthetic construct; identical to SEQ ID NO: 16501
  modified_base 1..9485: mod_base = OTHER; note = Each t is m1f
  source 1..9485: mol_type = other RNA

SEQ ID NO: 18099 - RNA, 9485 nt, synthetic construct; identical to SEQ ID NO: 16502
  modified_base 1..9485: mod_base = OTHER; note = Each t is m1f
  source 1..9485: mol_type = other RNA

SEQ ID NO: 18100 - RNA, 9485 nt, synthetic construct; identical to SEQ ID NO: 16503
  modified_base 1..9485: mod_base = OTHER; note = Each t is m1f
  source 1..9485: mol_type = other RNA

SEQ ID NO: 18101 - RNA, 9485 nt, synthetic construct; identical to SEQ ID NO: 16504
  modified_base 1..9485: mod_base = OTHER; note = Each t is m1f
  source 1..9485: mol_type = other RNA

SEQ ID NO: 18102 - RNA, 9485 nt, synthetic construct; identical to SEQ ID NO: 16505
  modified_base 1..9485: mod_base = OTHER; note = Each t is m1f
  source 1..9485: mol_type = other RNA

SEQ ID NO: 18103 - RNA, 9485 nt, synthetic construct; identical to SEQ ID NO: 16506
  modified_base 1..9485: mod_base = OTHER; note = Each t is m1f
  source 1..9485: mol_type = other RNA

SEQ ID NO: 18104 - RNA, 9485 nt, synthetic construct; identical to SEQ ID NO: 16507
  modified_base 1..9485: mod_base = OTHER; note = Each t is m1f
  source 1..9485: mol_type = other RNA

SEQ ID NO: 18105 - RNA, 9485 nt, synthetic construct; identical to SEQ ID NO: 16508
  modified_base 1..9485: mod_base = OTHER; note = Each t is m1f
  source 1..9485: mol_type = other RNA

SEQ ID NO: 18106 - RNA, 9485 nt, synthetic construct; identical to SEQ ID NO: 16509
  modified_base 1..9485: mod_base = OTHER; note = Each t is m1f
  source 1..9485: mol_type = other RNA

SEQ ID NO: 18107 - RNA, 9485 nt, synthetic construct; identical to SEQ ID NO: 16510
  modified_base 1..9485: mod_base = OTHER; note = Each t is m1f
  source 1..9485: mol_type = other RNA

SEQ ID NO: 18108 - RNA, 9485 nt, synthetic construct; identical to SEQ ID NO: 16511
  modified_base 1..9485: mod_base = OTHER; note = Each t is m1f
  source 1..9485: mol_type = other RNA

SEQ ID NO: 18109 - RNA, 9485 nt, synthetic construct; identical to SEQ ID NO: 16512
  modified_base 1..9485: mod_base = OTHER; note = Each t is m1f
  source 1..9485: mol_type = other RNA

SEQ ID NO: 18110 - RNA, 9485 nt, synthetic construct; identical to SEQ ID NO: 16513
  modified_base 1..9485: mod_base = OTHER; note = Each t is m1f
  source 1..9485: mol_type = other RNA

SEQ ID NO: 18111 - RNA, 9485 nt, synthetic construct; identical to SEQ ID NO: 16514
  modified_base 1..9485: mod_base = OTHER; note = Each t is m1f
  source 1..9485: mol_type = other RNA

SEQ ID NO: 18112 - RNA, 9485 nt, synthetic construct; identical to SEQ ID NO: 16515
  modified_base 1..9485: mod_base = OTHER; note = Each t is m1f
  source 1..9485: mol_type = other RNA

SEQ ID NO: 18113 - RNA, 9485 nt, synthetic construct; identical to SEQ ID NO: 16516
  modified_base 1..9485: mod_base = OTHER; note = Each t is m1f
  source 1..9485: mol_type = other RNA

SEQ ID NO: 18114 - RNA, 9485 nt, synthetic construct; identical to SEQ ID NO: 16517
  modified_base 1..9485: mod_base = OTHER; note = Each t is m1f
  source 1..9485: mol_type = other RNA

SEQ ID NO: 18115 - RNA, 9485 nt, synthetic construct; identical to SEQ ID NO: 16518
  modified_base 1..9485: mod_base = OTHER; note = Each t is m1f
  source 1..9485: mol_type = other RNA

SEQ ID NO: 18116 - RNA, 9485 nt, synthetic construct; identical to SEQ ID NO: 16519
  modified_base 1..9485: mod_base = OTHER; note = Each t is m1f
  source 1..9485: mol_type = other RNA

SEQ ID NO: 18117 - RNA, 9485 nt, synthetic construct; identical to SEQ ID NO: 16520
  modified_base 1..9485: mod_base = OTHER; note = Each t is m1f
  source 1..9485: mol_type = other RNA

SEQ ID NO: 18118 - RNA, 9485 nt, synthetic construct; identical to SEQ ID NO: 16521
  modified_base 1..9485: mod_base = OTHER; note = Each t is m1f
  source 1..9485: mol_type = other RNA

SEQ ID NO: 18119 - RNA, 9485 nt, synthetic construct; identical to SEQ ID NO: 16522
  modified_base 1..9485: mod_base = OTHER; note = Each t is m1f
  source 1..9485: mol_type = other RNA

SEQ ID NO: 18120 - RNA, 9479 nt, synthetic construct; identical to SEQ ID NO: 16523
  modified_base 1..9479: mod_base = OTHER; note = Each t is m1f
  source 1..9479: mol_type = other RNA

SEQ ID NO: 18121 - RNA, 9485 nt, synthetic construct; identical to SEQ ID NO: 16524
  modified_base 1..9485: mod_base = OTHER; note = Each t is m1f
  source 1..9485: mol_type = other RNA

SEQ ID NO: 18122 - RNA, 9485 nt, synthetic construct; identical to SEQ ID NO: 16525
  modified_base 1..9485: mod_base = OTHER; note = Each t is m1f
  source 1..9485: mol_type = other RNA

SEQ ID NO: 18123 - RNA, 9485 nt, synthetic construct; identical to SEQ ID NO: 16526
  modified_base 1..9485: mod_base = OTHER; note = Each t is m1f
  source 1..9485: mol_type = other RNA

SEQ ID NO: 18124 - RNA, 9485 nt, synthetic construct; identical to SEQ ID NO: 16527
  modified_base 1..9485: mod_base = OTHER; note = Each t is m1f
  source 1..9485: mol_type = other RNA

SEQ ID NO: 18125 - RNA, 9485 nt, synthetic construct; identical to SEQ ID NO: 16528
  modified_base 1..9485: mod_base = OTHER; note = Each t is m1f
  source 1..9485: mol_type = other RNA

SEQ ID NO: 18126 - RNA, 9485 nt, synthetic construct; identical to SEQ ID NO: 16529
  modified_base 1..9485: mod_base = OTHER; note = Each t is m1f
  source 1..9485: mol_type = other RNA

SEQ ID NO: 18127 - RNA, 9485 nt, synthetic construct; identical to SEQ ID NO: 16530
  modified_base 1..9485: mod_base = OTHER; note = Each t is m1f
  source 1..9485: mol_type = other RNA

SEQ ID NO: 18128 - RNA, 9485 nt, synthetic construct; identical to SEQ ID NO: 16531
  modified_base 1..9485: mod_base = OTHER; note = Each t is m1f
  source 1..9485: mol_type = other RNA

SEQ ID NO: 18129 - RNA, 9485 nt, synthetic construct; identical to SEQ ID NO: 16532
  modified_base 1..9485: mod_base = OTHER; note = Each t is m1f
  source 1..9485: mol_type = other RNA

SEQ ID NO: 18130 - RNA, 9485 nt, synthetic construct; identical to SEQ ID NO: 16533
  modified_base 1..9485: mod_base = OTHER; note = Each t is m1f
  source 1..9485: mol_type = other RNA

SEQ ID NO: 18131 - RNA, 9485 nt, synthetic construct; identical to SEQ ID NO: 16534
  modified_base 1..9485: mod_base = OTHER; note = Each t is m1f
  source 1..9485: mol_type = other RNA

SEQ ID NO: 18132 - RNA, 9485 nt, synthetic construct; identical to SEQ ID NO: 16535
  modified_base 1..9485: mod_base = OTHER; note = Each t is m1f
  source 1..9485: mol_type = other RNA

SEQ ID NO: 18133 - RNA, 9485 nt, synthetic construct; identical to SEQ ID NO: 16536
  modified_base 1..9485: mod_base = OTHER; note = Each t is m1f
  source 1..9485: mol_type = other RNA

SEQ ID NO: 18134 - RNA, 9485 nt, synthetic construct; identical to SEQ ID NO: 16537
  modified_base 1..9485: mod_base = OTHER; note = Each t is m1f
  source 1..9485: mol_type = other RNA

SEQ ID NO: 18135 - RNA, 9485 nt, synthetic construct; identical to SEQ ID NO: 16538
  modified_base 1..9485: mod_base = OTHER; note = Each t is m1f
  source 1..9485: mol_type = other RNA

SEQ ID NO: 18136 - RNA, 9485 nt, synthetic construct; identical to SEQ ID NO: 16539
  modified_base 1..9485: mod_base = OTHER; note = Each t is m1f
  source 1..9485: mol_type = other RNA

SEQ ID NO: 18137 - RNA, 9485 nt, synthetic construct; identical to SEQ ID NO: 16540
  modified_base 1..9485: mod_base = OTHER; note = Each t is m1f
  source 1..9485: mol_type = other RNA

SEQ ID NO: 18138 - RNA, 9485 nt, synthetic construct; identical to SEQ ID NO: 16541
  modified_base 1..9485: mod_base = OTHER; note = Each t is m1f
  source 1..9485: mol_type = other RNA

SEQ ID NO: 18139 - RNA, 9485 nt, synthetic construct; identical to SEQ ID NO: 16542
  modified_base 1..9485: mod_base = OTHER; note = Each t is m1f
  source 1..9485: mol_type = other RNA

SEQ ID NO: 18140 - RNA, 9485 nt, synthetic construct; identical to SEQ ID NO: 16543
  modified_base 1..9485: mod_base = OTHER; note = Each t is m1f
  source 1..9485: mol_type = other RNA

SEQ ID NO: 18141 - RNA, 9485 nt, synthetic construct; identical to SEQ ID NO: 16544
  modified_base 1..9485: mod_base = OTHER; note = Each t is m1f
  source 1..9485: mol_type = other RNA

SEQ ID NO: 18142 - RNA, 9485 nt, synthetic construct; identical to SEQ ID NO: 16545
  modified_base 1..9485: mod_base = OTHER; note = Each t is m1f
  source 1..9485: mol_type = other RNA

SEQ ID NO: 18143 - RNA, 9485 nt, synthetic construct; identical to SEQ ID NO: 16546
  modified_base 1..9485: mod_base = OTHER; note = Each t is m1f
  source 1..9485: mol_type = other RNA

SEQ ID NO: 18144 - RNA, 9485 nt, synthetic construct; identical to SEQ ID NO: 16547
  modified_base 1..9485: mod_base = OTHER; note = Each t is m1f
  source 1..9485: mol_type = other RNA

SEQ ID NO: 18145 - RNA, 9485 nt, synthetic construct; identical to SEQ ID NO: 16548
  modified_base 1..9485: mod_base = OTHER; note = Each t is m1f
  source 1..9485: mol_type = other RNA

SEQ ID NO: 18146 - RNA, 9485 nt, synthetic construct; identical to SEQ ID NO: 16549
  modified_base 1..9485: mod_base = OTHER; note = Each t is m1f
  source 1..9485: mol_type = other RNA

SEQ ID NO: 18147 - RNA, 9485 nt, synthetic construct; identical to SEQ ID NO: 16550
  modified_base 1..9485: mod_base = OTHER; note = Each t is m1f
  source 1..9485: mol_type = other RNA

SEQ ID NO: 18148 - RNA, 9485 nt, synthetic construct; identical to SEQ ID NO: 16551
  modified_base 1..9485: mod_base = OTHER; note = Each t is m1f
  source 1..9485: mol_type = other RNA

SEQ ID NO: 18149 - RNA, 9485 nt, synthetic construct; identical to SEQ ID NO: 16552
  modified_base 1..9485: mod_base = OTHER; note = Each t is m1f
  source 1..9485: mol_type = other RNA

SEQ ID NO: 18150 - RNA, 9485 nt, synthetic construct; identical to SEQ ID NO: 16553
  modified_base 1..9485: mod_base = OTHER; note = Each t is m1f
  source 1..9485: mol_type = other RNA

SEQ ID NO: 18151 - RNA, 9485 nt, synthetic construct; identical to SEQ ID NO: 16554
  modified_base 1..9485: mod_base = OTHER; note = Each t is m1f
  source 1..9485: mol_type = other RNA

SEQ ID NO: 18152 - RNA, 9485 nt, synthetic construct; identical to SEQ ID NO: 16555
  modified_base 1..9485: mod_base = OTHER; note = Each t is m1f
  source 1..9485: mol_type = other RNA

SEQ ID NO: 18153 - RNA, 9485 nt, synthetic construct; identical to SEQ ID NO: 16556
  modified_base 1..9485: mod_base = OTHER; note = Each t is m1f
  source 1..9485: mol_type = other RNA

SEQ ID NO: 18154 - RNA, 9485 nt, synthetic construct; identical to SEQ ID NO: 16557
  modified_base 1..9485: mod_base = OTHER; note = Each t is m1f
  source 1..9485: mol_type = other RNA

SEQ ID NO: 18155 - RNA, 9485 nt, synthetic construct; identical to SEQ ID NO: 16558
  modified_base 1..9485: mod_base = OTHER; note = Each t is m1f
  source 1..9485: mol_type = other RNA

SEQ ID NO: 18156 - RNA, 9485 nt, synthetic construct; identical to SEQ ID NO: 16559
  modified_base 1..9485: mod_base = OTHER; note = Each t is m1f
  source 1..9485: mol_type = other RNA

SEQ ID NO: 18157 - RNA, 9485 nt, synthetic construct; identical to SEQ ID NO: 16560
  modified_base 1..9485: mod_base = OTHER; note = Each t is m1f
  source 1..9485: mol_type = other RNA

SEQ ID NO: 18158 - RNA, 9485 nt, synthetic construct; identical to SEQ ID NO: 16561
  modified_base 1..9485: mod_base = OTHER; note = Each t is m1f
  source 1..9485: mol_type = other RNA

SEQ ID NO: 18159 - RNA, 9485 nt, synthetic construct; identical to SEQ ID NO: 16562
  modified_base 1..9485: mod_base = OTHER; note = Each t is m1f
  source 1..9485: mol_type = other RNA

SEQ ID NO: 18160 - RNA, 9485 nt, synthetic construct; identical to SEQ ID NO: 16563
  modified_base 1..9485: mod_base = OTHER; note = Each t is m1f
  source 1..9485: mol_type = other RNA

SEQ ID NO: 18161 - RNA, 9485 nt, synthetic construct; identical to SEQ ID NO: 16564
  modified_base 1..9485: mod_base = OTHER; note = Each t is m1f
  source 1..9485: mol_type = other RNA

SEQ ID NO: 18162 - RNA, 9485 nt, synthetic construct; identical to SEQ ID NO: 16565
  modified_base 1..9485: mod_base = OTHER; note = Each t is m1f
  source 1..9485: mol_type = other RNA

SEQ ID NO: 18163 - RNA, 9485 nt, synthetic construct; identical to SEQ ID NO: 16566
  modified_base 1..9485: mod_base = OTHER; note = Each t is m1f
  source 1..9485: mol_type = other RNA

SEQ ID NO: 18164 - RNA, 9485 nt, synthetic construct; identical to SEQ ID NO: 16567
  modified_base 1..9485: mod_base = OTHER; note = Each t is m1f
  source 1..9485: mol_type = other RNA

SEQ ID NO: 18165 - RNA, 9485 nt, synthetic construct; identical to SEQ ID NO: 16568
  modified_base 1..9485: mod_base = OTHER; note = Each t is m1f
  source 1..9485: mol_type = other RNA

SEQ ID NO: 18166 - RNA, 9485 nt, synthetic construct; identical to SEQ ID NO: 16569
  modified_base 1..9485: mod_base = OTHER; note = Each t is m1f
  source 1..9485: mol_type = other RNA

SEQ ID NO: 18167 - RNA, 9485 nt, synthetic construct; identical to SEQ ID NO: 16570
  modified_base 1..9485: mod_base = OTHER; note = Each t is m1f
  source 1..9485: mol_type = other RNA

SEQ ID NO: 18168 - RNA, 9485 nt, synthetic construct; identical to SEQ ID NO: 16571
  modified_base 1..9485: mod_base = OTHER; note = Each t is m1f
  source 1..9485: mol_type = other RNA

SEQ ID NO: 18169 - RNA, 9485 nt, synthetic construct; identical to SEQ ID NO: 16572
  modified_base 1..9485: mod_base = OTHER; note = Each t is m1f
  source 1..9485: mol_type = other RNA

SEQ ID NO: 18170 - RNA, 9485 nt, synthetic construct; identical to SEQ ID NO: 16573
  modified_base 1..9485: mod_base = OTHER; note = Each t is m1f
  source 1..9485: mol_type = other RNA

SEQ ID NO: 18171 - RNA, 9485 nt, synthetic construct; identical to SEQ ID NO: 16574
  modified_base 1..9485: mod_base = OTHER; note = Each t is m1f
  source 1..9485: mol_type = other RNA

SEQ ID NO: 18172 - RNA, 9479 nt, synthetic construct; identical to SEQ ID NO: 16575
  modified_base 1..9479: mod_base = OTHER; note = Each t is m1f
  source 1..9479: mol_type = other RNA

SEQ ID NO: 18173 - RNA, 9485 nt, synthetic construct; identical to SEQ ID NO: 16576
  modified_base 1..9485: mod_base = OTHER; note = Each t is m1f
  source 1..9485: mol_type = other RNA

SEQ ID NO: 18174 - RNA, 9485 nt, synthetic construct; identical to SEQ ID NO: 16577
  modified_base 1..9485: mod_base = OTHER; note = Each t is m1f
  source 1..9485: mol_type = other RNA

SEQ ID NO: 18175 - RNA, 9485 nt, synthetic construct; identical to SEQ ID NO: 16578
  modified_base 1..9485: mod_base = OTHER; note = Each t is m1f
  source 1..9485: mol_type = other RNA

SEQ ID NO: 18176 - RNA, 9485 nt, synthetic construct; identical to SEQ ID NO: 16579
  modified_base 1..9485: mod_base = OTHER; note = Each t is m1f
  source 1..9485: mol_type = other RNA

SEQ ID NO: 18177 - RNA, 9485 nt, synthetic construct; identical to SEQ ID NO: 16580
  modified_base 1..9485: mod_base = OTHER; note = Each t is m1f
  source 1..9485: mol_type = other RNA

SEQ ID NO: 18178 - RNA, 9485 nt, synthetic construct; identical to SEQ ID NO: 16581
  modified_base 1..9485: mod_base = OTHER; note = Each t is m1f
  source 1..9485: mol_type = other RNA

SEQ ID NO: 18179 - RNA, 9485 nt, synthetic construct; identical to SEQ ID NO: 16582
  modified_base 1..9485: mod_base = OTHER; note = Each t is m1f
  source 1..9485: mol_type = other RNA

SEQ ID NO: 18180 - RNA, 9485 nt, synthetic construct; identical to SEQ ID NO: 16583
  modified_base 1..9485: mod_base = OTHER; note = Each t is m1f
  source 1..9485: mol_type = other RNA

SEQ ID NO: 18181 - RNA, 9485 nt, synthetic construct; identical to SEQ ID NO: 16584
  modified_base 1..9485: mod_base = OTHER; note = Each t is m1f
  source 1..9485: mol_type = other RNA

SEQ ID NO: 18182 - RNA, 9485 nt, synthetic construct; identical to SEQ ID NO: 16585
  modified_base 1..9485: mod_base = OTHER; note = Each t is m1f
  source 1..9485: mol_type = other RNA

SEQ ID NO: 18183 - RNA, 9485 nt, synthetic construct; identical to SEQ ID NO: 16586
  modified_base 1..9485: mod_base = OTHER; note = Each t is m1f
  source 1..9485: mol_type = other RNA

SEQ ID NO: 18184 - RNA, 9485 nt, synthetic construct; identical to SEQ ID NO: 16587
  modified_base 1..9485: mod_base = OTHER; note = Each t is m1f
  source 1..9485: mol_type = other RNA

SEQ ID NO: 18185 - RNA, 9485 nt, synthetic construct; identical to SEQ ID NO: 16588
  modified_base 1..9485: mod_base = OTHER; note = Each t is m1f
  source 1..9485: mol_type = other RNA

SEQ ID NO: 18186 - RNA, 9485 nt, synthetic construct; identical to SEQ ID NO: 16589
  modified_base 1..9485: mod_base = OTHER; note = Each t is m1f
  source 1..9485: mol_type = other RNA

SEQ ID NO: 18187 - RNA, 9485 nt, synthetic construct; identical to SEQ ID NO: 16590
  modified_base 1..9485: mod_base = OTHER; note = Each t is m1f
  source 1..9485: mol_type = other RNA

SEQ ID NO: 18188 - RNA, 9485 nt, synthetic construct; identical to SEQ ID NO: 16591
  modified_base 1..9485: mod_base = OTHER; note = Each t is m1f
  source 1..9485: mol_type = other RNA

SEQ ID NO: 18189 - RNA, 9485 nt, synthetic construct; identical to SEQ ID NO: 16592
  modified_base 1..9485: mod_base = OTHER; note = Each t is m1f
  source 1..9485: mol_type = other RNA

SEQ ID NO: 18190 - RNA, 9485 nt, synthetic construct; identical to SEQ ID NO: 16593
  modified_base 1..9485: mod_base = OTHER; note = Each t is m1f
  source 1..9485: mol_type = other RNA

SEQ ID NO: 18191 - RNA, 9485 nt, synthetic construct; identical to SEQ ID NO: 16594
  modified_base 1..9485: mod_base = OTHER; note = Each t is m1f
  source 1..9485: mol_type = other RNA

SEQ ID NO: 18192 - RNA, 9485 nt, synthetic construct; identical to SEQ ID NO: 16595
  modified_base 1..9485: mod_base = OTHER; note = Each t is m1f
  source 1..9485: mol_type = other RNA

SEQ ID NO: 18193 - RNA, 9485 nt, synthetic construct; identical to SEQ ID NO: 16596
  modified_base 1..9485: mod_base = OTHER; note = Each t is m1f
  source 1..9485: mol_type = other RNA

SEQ ID NO: 18194 - RNA, 9485 nt, synthetic construct; identical to SEQ ID NO: 16597
  modified_base 1..9485: mod_base = OTHER; note = Each t is m1f
  source 1..9485: mol_type = other RNA

SEQ ID NO: 18195 - RNA, 9485 nt, synthetic construct; identical to SEQ ID NO: 16598
  modified_base 1..9485: mod_base = OTHER; note = Each t is m1f
  source 1..9485: mol_type = other RNA

SEQ ID NO: 18196 - RNA, 9485 nt, synthetic construct; identical to SEQ ID NO: 16599
  modified_base 1..9485: mod_base = OTHER; note = Each t is m1f
  source 1..9485: mol_type = other RNA

SEQ ID NO: 18197 - RNA, 9485 nt, synthetic construct; identical to SEQ ID NO: 16600
  modified_base 1..9485: mod_base = OTHER; note = Each t is m1f
  source 1..9485: mol_type = other RNA

SEQ ID NO: 18198 - RNA, 9485 nt, synthetic construct; identical to SEQ ID NO: 16601
  modified_base 1..9485: mod_base = OTHER; note = Each t is m1f
  source 1..9485: mol_type = other RNA

SEQ ID NO: 18199 - RNA, 9485 nt, synthetic construct; identical to SEQ ID NO: 16602
  modified_base 1..9485: mod_base = OTHER; note = Each t is m1f
  source 1..9485: mol_type = other RNA

SEQ ID NO: 18200 - RNA, 9485 nt, synthetic construct; identical to SEQ ID NO: 16603
  modified_base 1..9485: mod_base = OTHER; note = Each t is m1f
  source 1..9485: mol_type = other RNA

SEQ ID NO: 18201 - RNA, 9485 nt, synthetic construct; identical to SEQ ID NO: 16604
  modified_base 1..9485: mod_base = OTHER; note = Each t is m1f
  source 1..9485: mol_type = other RNA

SEQ ID NO: 18202 - RNA, 9485 nt, synthetic construct; identical to SEQ ID NO: 16605
  modified_base 1..9485: mod_base = OTHER; note = Each t is m1f
  source 1..9485: mol_type = other RNA

SEQ ID NO: 18203 - RNA, 9485 nt, synthetic construct; identical to SEQ ID NO: 16606
  modified_base 1..9485: mod_base = OTHER; note = Each t is m1f
  source 1..9485: mol_type = other RNA

SEQ ID NO: 18204 - RNA, 9485 nt, synthetic construct; identical to SEQ ID NO: 16607
  modified_base 1..9485: mod_base = OTHER; note = Each t is m1f
  source 1..9485: mol_type = other RNA

SEQ ID NO: 18205 - RNA, 9485 nt, synthetic construct; identical to SEQ ID NO: 16608
  modified_base 1..9485: mod_base = OTHER; note = Each t is m1f
  source 1..9485: mol_type = other RNA

SEQ ID NO: 18206 - RNA, 9485 nt, synthetic construct; identical to SEQ ID NO: 16609
  modified_base 1..9485: mod_base = OTHER; note = Each t is m1f
  source 1..9485: mol_type = other RNA

SEQ ID NO: 18207 - RNA, 9485 nt, synthetic construct; identical to SEQ ID NO: 16610
  modified_base 1..9485: mod_base = OTHER; note = Each t is m1f
  source 1..9485: mol_type = other RNA

SEQ ID NO: 18208 - RNA, 9485 nt, synthetic construct; identical to SEQ ID NO: 16611
  modified_base 1..9485: mod_base = OTHER; note = Each t is m1f
  source 1..9485: mol_type = other RNA

SEQ ID NO: 18209 - RNA, 9485 nt, synthetic construct; identical to SEQ ID NO: 16612
  modified_base 1..9485: mod_base = OTHER; note = Each t is m1f
  source 1..9485: mol_type = other RNA

SEQ ID NO: 18210 - RNA, 9485 nt, synthetic construct; identical to SEQ ID NO: 16613
  modified_base 1..9485: mod_base = OTHER; note = Each t is m1f
  source 1..9485: mol_type = other RNA

SEQ ID NO: 18211 - RNA, 9497 nt, synthetic construct; identical to SEQ ID NO: 16614
  modified_base 1..9497: mod_base = OTHER; note = Each t is m1f
  source 1..9497: mol_type = other RNA

SEQ ID NO: 18212 - RNA, 9485 nt, synthetic construct; identical to SEQ ID NO: 16615
  modified_base 1..9485: mod_base = OTHER; note = Each t is m1f
  source 1..9485: mol_type = other RNA

SEQ ID NO: 18213 - RNA, 9485 nt, synthetic construct; identical to SEQ ID NO: 16616
  modified_base 1..9485: mod_base = OTHER; note = Each t is m1f
  source 1..9485: mol_type = other RNA

SEQ ID NO: 18214 - RNA, 9485 nt, synthetic construct; identical to SEQ ID NO: 16617
  modified_base 1..9485: mod_base = OTHER; note = Each t is m1f
  source 1..9485: mol_type = other RNA

SEQ ID NO: 18215 - RNA, 9485 nt, synthetic construct; identical to SEQ ID NO: 16618
  modified_base 1..9485: mod_base = OTHER; note = Each t is m1f
  source 1..9485: mol_type = other RNA

SEQ ID NO: 18216 - RNA, 9485 nt, synthetic construct; identical to SEQ ID NO: 16619
  modified_base 1..9485: mod_base = OTHER; note = Each t is m1f
  source 1..9485: mol_type = other RNA

SEQ ID NO: 18217 - RNA, 9485 nt, synthetic construct; identical to SEQ ID NO: 16620
  modified_base 1..9485: mod_base = OTHER; note = Each t is m1f
  source 1..9485: mol_type = other RNA

SEQ ID NO: 18218 - RNA, 9485 nt, synthetic construct; identical to SEQ ID NO: 16621
  modified_base 1..9485: mod_base = OTHER; note = Each t is m1f
  source 1..9485: mol_type = other RNA

SEQ ID NO: 18219 - RNA, 9485 nt, synthetic construct; identical to SEQ ID NO: 16622
  modified_base 1..9485: mod_base = OTHER; note = Each t is m1f
  source 1..9485: mol_type = other RNA

SEQ ID NO: 18220 - RNA, 9485 nt, synthetic construct; identical to SEQ ID NO: 16623
  modified_base 1..9485: mod_base = OTHER; note = Each t is m1f
  source 1..9485: mol_type = other RNA

SEQ ID NO: 18221 - RNA, 9485 nt, synthetic construct; identical to SEQ ID NO: 16624
  modified_base 1..9485: mod_base = OTHER; note = Each t is m1f
  source 1..9485: mol_type = other RNA

SEQ ID NO: 18222 - RNA, 9485 nt, synthetic construct; identical to SEQ ID NO: 16625
  modified_base 1..9485: mod_base = OTHER; note = Each t is m1f
  source 1..9485: mol_type = other RNA

SEQ ID NO: 18223 - RNA, 9485 nt, synthetic construct; identical to SEQ ID NO: 16626
  modified_base 1..9485: mod_base = OTHER; note = Each t is m1f
  source 1..9485: mol_type = other RNA

SEQ ID NO: 18224 - RNA, 9485 nt, synthetic construct; identical to SEQ ID NO: 16627
  modified_base 1..9485: mod_base = OTHER; note = Each t is m1f
  source 1..9485: mol_type = other RNA

SEQ ID NO: 18225 - RNA, 9485 nt, synthetic construct; identical to SEQ ID NO: 16628
  modified_base 1..9485: mod_base = OTHER; note = Each t is m1f
  source 1..9485: mol_type = other RNA

SEQ ID NO: 18226 - RNA, 9485 nt, synthetic construct; identical to SEQ ID NO: 16629
  modified_base 1..9485: mod_base = OTHER; note = Each t is m1f
  source 1..9485: mol_type = other RNA

SEQ ID NO: 18227 - RNA, 9479 nt, synthetic construct; identical to SEQ ID NO: 16630
  modified_base 1..9479: mod_base = OTHER; note = Each t is m1f
  source 1..9479: mol_type = other RNA

SEQ ID NO: 18228 - RNA, 9485 nt, synthetic construct; identical to SEQ ID NO: 16631
  modified_base 1..9485: mod_base = OTHER; note = Each t is m1f
  source 1..9485: mol_type = other RNA

SEQ ID NO: 18229 - RNA, 9485 nt, synthetic construct; identical to SEQ ID NO: 16632
  modified_base 1..9485: mod_base = OTHER; note = Each t is m1f
  source 1..9485: mol_type = other RNA

SEQ ID NO: 18230 - RNA, 9485 nt, synthetic construct; identical to SEQ ID NO: 16633
  modified_base 1..9485: mod_base = OTHER; note = Each t is m1f
  source 1..9485: mol_type = other RNA

SEQ ID NO: 18231 - RNA, 9485 nt, synthetic construct; identical to SEQ ID NO: 16634
  modified_base 1..9485: mod_base = OTHER; note = Each t is m1f
  source 1..9485: mol_type = other RNA

SEQ ID NO: 18232 - RNA, 9485 nt, synthetic construct; identical to SEQ ID NO: 16635
  modified_base 1..9485: mod_base = OTHER; note = Each t is m1f
  source 1..9485: mol_type = other RNA

SEQ ID NO: 18233 - RNA, 9485 nt, synthetic construct; identical to SEQ ID NO: 16636
  modified_base 1..9485: mod_base = OTHER; note = Each t is m1f
  source 1..9485: mol_type = other RNA

SEQ ID NO: 18234 - RNA, 9485 nt, synthetic construct; identical to SEQ ID NO: 16637
  modified_base 1..9485: mod_base = OTHER; note = Each t is m1f
  source 1..9485: mol_type = other RNA

SEQ ID NO: 18235 - RNA, 9485 nt, synthetic construct; identical to SEQ ID NO: 16638
  modified_base 1..9485: mod_base = OTHER; note = Each t is m1f
  source 1..9485: mol_type = other RNA

SEQ ID NO: 18236 - RNA, 9557 nt, synthetic construct; identical to SEQ ID NO: 16639
  modified_base 1..9557: mod_base = OTHER; note = Each t is m1f
  source 1..9557: mol_type = other RNA

SEQ ID NO: 18237 - RNA, 9485 nt, synthetic construct; identical to SEQ ID NO: 16640
  modified_base 1..9485: mod_base = OTHER; note = Each t is m1f
  source 1..9485: mol_type = other RNA

SEQ ID NO: 18238 - RNA, 9485 nt, synthetic construct; identical to SEQ ID NO: 16641
  modified_base 1..9485: mod_base = OTHER; note = Each t is m1f
  source 1..9485: mol_type = other RNA

SEQ ID NO: 18239 - RNA, 9485 nt, synthetic construct; identical to SEQ ID NO: 16642
  modified_base 1..9485: mod_base = OTHER; note = Each t is m1f
  source 1..9485: mol_type = other RNA

SEQ ID NO: 18240 - RNA, 9485 nt, synthetic construct; identical to SEQ ID NO: 16643
  modified_base 1..9485: mod_base = OTHER; note = Each t is m1f
  source 1..9485: mol_type = other RNA

SEQ ID NO: 18241 - RNA, 9485 nt, synthetic construct; identical to SEQ ID NO: 16644
  modified_base 1..9485: mod_base = OTHER; note = Each t is m1f
  source 1..9485: mol_type = other RNA

SEQ ID NO: 18242 - RNA, 9485 nt, synthetic construct; identical to SEQ ID NO: 16645
  modified_base 1..9485: mod_base = OTHER; note = Each t is m1f
  source 1..9485: mol_type = other RNA

SEQ ID NO: 18243 - RNA, 9485 nt, synthetic construct; identical to SEQ ID NO: 16646
  modified_base 1..9485: mod_base = OTHER; note = Each t is m1f
  source 1..9485: mol_type = other RNA

SEQ ID NO: 18244 - RNA, 9485 nt, synthetic construct; identical to SEQ ID NO: 16647
  modified_base 1..9485: mod_base = OTHER; note = Each t is m1f
  source 1..9485: mol_type = other RNA

SEQ ID NO: 18245 - RNA, 9485 nt, synthetic construct; identical to SEQ ID NO: 16648
  modified_base 1..9485: mod_base = OTHER; note = Each t is m1f
  source 1..9485: mol_type = other RNA

SEQ ID NO: 18246 - RNA, 9485 nt, synthetic construct; identical to SEQ ID NO: 16649
  modified_base 1..9485: mod_base = OTHER; note = Each t is m1f
  source 1..9485: mol_type = other RNA

SEQ ID NO: 18247 - RNA, 9683 nt, synthetic construct; identical to SEQ ID NO: 16650
  modified_base 1..9683: mod_base = OTHER; note = Each t is m1f
  source 1..9683: mol_type = other RNA

SEQ ID NO: 18248 - RNA, 9485 nt, synthetic construct; identical to SEQ ID NO: 16651
  modified_base 1..9485: mod_base = OTHER; note = Each t is m1f
  source 1..9485: mol_type = other RNA

SEQ ID NO: 18249 - RNA, 9485 nt, synthetic construct; identical to SEQ ID NO: 16652
  modified_base 1..9485: mod_base = OTHER; note = Each t is m1f
  source 1..9485: mol_type = other RNA

SEQ ID NO: 18250 - RNA, 9485 nt, synthetic construct; identical to SEQ ID NO: 16653
  modified_base 1..9485: mod_base = OTHER; note = Each t is m1f
  source 1..9485: mol_type = other RNA

SEQ ID NO: 18251 - RNA, 9485 nt, synthetic construct; identical to SEQ ID NO: 16654
  modified_base 1..9485: mod_base = OTHER; note = Each t is m1f
  source 1..9485: mol_type = other RNA

SEQ ID NO: 18252 - RNA, 9485 nt, synthetic construct; identical to SEQ ID NO: 16655
  modified_base 1..9485: mod_base = OTHER; note = Each t is m1f
  source 1..9485: mol_type = other RNA

SEQ ID NO: 18253 - RNA, 9485 nt, synthetic construct; identical to SEQ ID NO: 16656
  modified_base 1..9485: mod_base = OTHER; note = Each t is m1f
  source 1..9485: mol_type = other RNA

SEQ ID NO: 18254 - RNA, 9485 nt, synthetic construct; identical to SEQ ID NO: 16657
  modified_base 1..9485: mod_base = OTHER; note = Each t is m1f
  source 1..9485: mol_type = other RNA

SEQ ID NO: 18255 - RNA, 9485 nt, synthetic construct; identical to SEQ ID NO: 16658
  modified_base 1..9485: mod_base = OTHER; note = Each t is m1f
  source 1..9485: mol_type = other RNA

SEQ ID NO: 18256 - RNA, 9485 nt, synthetic construct; identical to SEQ ID NO: 16659
  modified_base 1..9485: mod_base = OTHER; note = Each t is m1f
  source 1..9485: mol_type = other RNA

SEQ ID NO: 18257 - RNA, 9485 nt, synthetic construct; identical to SEQ ID NO: 16660
  modified_base 1..9485: mod_base = OTHER; note = Each t is m1f
  source 1..9485: mol_type = other RNA

SEQ ID NO: 18258 - RNA, 9485 nt, synthetic construct; identical to SEQ ID NO: 16661
  modified_base 1..9485: mod_base = OTHER; note = Each t is m1f
  source 1..9485: mol_type = other RNA

SEQ ID NO: 18259 - RNA, 9485 nt, synthetic construct; identical to SEQ ID NO: 16662
  modified_base 1..9485: mod_base = OTHER; note = Each t is m1f
  source 1..9485: mol_type = other RNA

SEQ ID NO: 18260 - RNA, 9485 nt, synthetic construct; identical to SEQ ID NO: 16663
  modified_base 1..9485: mod_base = OTHER; note = Each t is m1f
  source 1..9485: mol_type = other RNA

SEQ ID NO: 18261 - RNA, 9485 nt, synthetic construct; identical to SEQ ID NO: 16664
  modified_base 1..9485: mod_base = OTHER; note = Each t is m1f
  source 1..9485: mol_type = other RNA

SEQ ID NO: 18262 - RNA, 9485 nt, synthetic construct; identical to SEQ ID NO: 16665
  modified_base 1..9485: mod_base = OTHER; note = Each t is m1f
  source 1..9485: mol_type = other RNA

SEQ ID NO: 18263 - RNA, 9485 nt, synthetic construct; identical to SEQ ID NO: 16666
  modified_base 1..9485: mod_base = OTHER; note = Each t is m1f
  source 1..9485: mol_type = other RNA

SEQ ID NO: 18264 - RNA, 9479 nt, synthetic construct; identical to SEQ ID NO: 16667
  modified_base 1..9479: mod_base = OTHER; note = Each t is m1f
  source 1..9479: mol_type = other RNA

SEQ ID NO: 18265 - RNA, 9485 nt, synthetic construct; identical to SEQ ID NO: 16668
  modified_base 1..9485: mod_base = OTHER; note = Each t is m1f
  source 1..9485: mol_type = other RNA

SEQ ID NO: 18266 - RNA, 9485 nt, synthetic construct; identical to SEQ ID NO: 16669
  modified_base 1..9485: mod_base = OTHER; note = Each t is m1f
  source 1..9485: mol_type = other RNA

SEQ ID NO: 18267 - RNA, 9485 nt, synthetic construct; identical to SEQ ID NO: 16670
  modified_base 1..9485: mod_base = OTHER; note = Each t is m1f
  source 1..9485: mol_type = other RNA

SEQ ID NO: 18268 - RNA, 9485 nt, synthetic construct; identical to SEQ ID NO: 16671
  modified_base 1..9485: mod_base = OTHER; note = Each t is m1f
  source 1..9485: mol_type = other RNA

SEQ ID NO: 18269 - RNA, 9485 nt, synthetic construct; identical to SEQ ID NO: 16672
  modified_base 1..9485: mod_base = OTHER; note = Each t is m1f
  source 1..9485: mol_type = other RNA

SEQ ID NO: 18270 - RNA, 9485 nt, synthetic construct; identical to SEQ ID NO: 16673
  modified_base 1..9485: mod_base = OTHER; note = Each t is m1f
  source 1..9485: mol_type = other RNA

SEQ ID NO: 18271 - RNA, 9485 nt, synthetic construct; identical to SEQ ID NO: 16674
  modified_base 1..9485: mod_base = OTHER; note = Each t is m1f
  source 1..9485: mol_type = other RNA

SEQ ID NO: 18272 - RNA, 9485 nt, synthetic construct; identical to SEQ ID NO: 16675
  modified_base 1..9485: mod_base = OTHER; note = Each t is m1f
  source 1..9485: mol_type = other RNA

SEQ ID NO: 18273 - RNA, 9485 nt, synthetic construct; identical to SEQ ID NO: 16676
  modified_base 1..9485: mod_base = OTHER; note = Each t is m1f
  source 1..9485: mol_type = other RNA

SEQ ID NO: 18274 - RNA, 9485 nt, synthetic construct; identical to SEQ ID NO: 16677
  modified_base 1..9485: mod_base = OTHER; note = Each t is m1f
  source 1..9485: mol_type = other RNA

SEQ ID NO: 18275 - RNA, 9485 nt, synthetic construct; identical to SEQ ID NO: 16678
  modified_base 1..9485: mod_base = OTHER; note = Each t is m1f
  source 1..9485: mol_type = other RNA

SEQ ID NO: 18276 - RNA, 9485 nt, synthetic construct; identical to SEQ ID NO: 16679
  modified_base 1..9485: mod_base = OTHER; note = Each t is m1f
  source 1..9485: mol_type = other RNA

SEQ ID NO: 18277 - RNA, 9485 nt, synthetic construct; identical to SEQ ID NO: 16680
  modified_base 1..9485: mod_base = OTHER; note = Each t is m1f
  source 1..9485: mol_type = other RNA

SEQ ID NO: 18278 - RNA, 9485 nt, synthetic construct; identical to SEQ ID NO: 16681
  modified_base 1..9485: mod_base = OTHER; note = Each t is m1f
  source 1..9485: mol_type = other RNA

SEQ ID NO: 18279 - RNA, 9485 nt, synthetic construct; identical to SEQ ID NO: 16682
  modified_base 1..9485: mod_base = OTHER; note = Each t is m1f
  source 1..9485: mol_type = other RNA

SEQ ID NO: 18280 - RNA, 9485 nt, synthetic construct; identical to SEQ ID NO: 16683
  modified_base 1..9485: mod_base = OTHER; note = Each t is m1f
  source 1..9485: mol_type = other RNA

SEQ ID NO: 18281 - RNA, 9485 nt, synthetic construct; identical to SEQ ID NO: 16684
  modified_base 1..9485: mod_base = OTHER; note = Each t is m1f
  source 1..9485: mol_type = other RNA

SEQ ID NO: 18282 - RNA, 9485 nt, synthetic construct; identical to SEQ ID NO: 16685
  modified_base 1..9485: mod_base = OTHER; note = Each t is m1f
  source 1..9485: mol_type = other RNA

SEQ ID NO: 18283 - RNA, 9485 nt, synthetic construct; identical to SEQ ID NO: 16686
  modified_base 1..9485: mod_base = OTHER; note = Each t is m1f
  source 1..9485: mol_type = other RNA

SEQ ID NO: 18284 - RNA, 9485 nt, synthetic construct; identical to SEQ ID NO: 16687
  modified_base 1..9485: mod_base = OTHER; note = Each t is m1f
  source 1..9485: mol_type = other RNA

SEQ ID NO: 18285 - RNA, 9485 nt, synthetic construct; identical to SEQ ID NO: 16688
  modified_base 1..9485: mod_base = OTHER; note = Each t is m1f
  source 1..9485: mol_type = other RNA

SEQ ID NO: 18286 - RNA, 9485 nt, synthetic construct; identical to SEQ ID NO: 16689
  modified_base 1..9485: mod_base = OTHER; note = Each t is m1f
  source 1..9485: mol_type = other RNA

SEQ ID NO: 18287 - RNA, 9485 nt, synthetic construct; identical to SEQ ID NO: 16690
  modified_base 1..9485: mod_base = OTHER; note = Each t is m1f
  source 1..9485: mol_type = other RNA

SEQ ID NO: 18288 - RNA, 9485 nt, synthetic construct; identical to SEQ ID NO: 16691
  modified_base 1..9485: mod_base = OTHER; note = Each t is m1f
  source 1..9485: mol_type = other RNA

SEQ ID NO: 18289 - RNA, 9485 nt, synthetic construct; identical to SEQ ID NO: 16692
  modified_base 1..9485: mod_base = OTHER; note = Each t is m1f
  source 1..9485: mol_type = other RNA

SEQ ID NO: 18290 - RNA, 9485 nt, synthetic construct; identical to SEQ ID NO: 16693
  modified_base 1..9485: mod_base = OTHER; note = Each t is m1f
  source 1..9485: mol_type = other RNA

SEQ ID NO: 18291 - RNA, 9485 nt, synthetic construct; identical to SEQ ID NO: 16694
  modified_base 1..9485: mod_base = OTHER; note = Each t is m1f
  source 1..9485: mol_type = other RNA

SEQ ID NO: 18292 - RNA, 9485 nt, synthetic construct; identical to SEQ ID NO: 16695
  modified_base 1..9485: mod_base = OTHER; note = Each t is m1f
  source 1..9485: mol_type = other RNA

SEQ ID NO: 18293 - RNA, 9485 nt, synthetic construct; identical to SEQ ID NO: 16696
  modified_base 1..9485: mod_base = OTHER; note = Each t is m1f
  source 1..9485: mol_type = other RNA

SEQ ID NO: 18294 - RNA, 9485 nt, synthetic construct; identical to SEQ ID NO: 16697
  modified_base 1..9485: mod_base = OTHER; note = Each t is m1f
  source 1..9485: mol_type = other RNA

SEQ ID NO: 18295 - RNA, 9485 nt, synthetic construct; identical to SEQ ID NO: 16698
  modified_base 1..9485: mod_base = OTHER; note = Each t is m1f
  source 1..9485: mol_type = other RNA

SEQ ID NO: 18296 - RNA, 9485 nt, synthetic construct; identical to SEQ ID NO: 16699
  modified_base 1..9485: mod_base = OTHER; note = Each t is m1f
  source 1..9485: mol_type = other RNA

SEQ ID NO: 18297 - RNA, 9485 nt, synthetic construct; identical to SEQ ID NO: 16700
  modified_base 1..9485: mod_base = OTHER; note = Each t is m1f
  source 1..9485: mol_type = other RNA

SEQ ID NO: 18298 - RNA, 9485 nt, synthetic construct; identical to SEQ ID NO: 16701
  modified_base 1..9485: mod_base = OTHER; note = Each t is m1f
  source 1..9485: mol_type = other RNA

SEQ ID NO: 18299 - RNA, 9485 nt, synthetic construct; identical to SEQ ID NO: 16702
  modified_base 1..9485: mod_base = OTHER; note = Each t is m1f
  source 1..9485: mol_type = other RNA

SEQ ID NO: 18300 - RNA, 9485 nt, synthetic construct; identical to SEQ ID NO: 16703
  modified_base 1..9485: mod_base = OTHER; note = Each t is m1f
  source 1..9485: mol_type = other RNA

SEQ ID NO: 18301 - RNA, 9485 nt, synthetic construct; identical to SEQ ID NO: 16704
  modified_base 1..9485: mod_base = OTHER; note = Each t is m1f
  source 1..9485: mol_type = other RNA

SEQ ID NO: 18302 - RNA, 9485 nt, synthetic construct; identical to SEQ ID NO: 16705
  modified_base 1..9485: mod_base = OTHER; note = Each t is m1f
  source 1..9485: mol_type = other RNA

SEQ ID NO: 18303 - RNA, 9521 nt, synthetic construct; identical to SEQ ID NO: 16706
  modified_base 1..9521: mod_base = OTHER; note = Each t is m1f
  source 1..9521: mol_type = other RNA

SEQ ID NO: 18304 - RNA, 9485 nt, synthetic construct; identical to SEQ ID NO: 16707
  modified_base 1..9485: mod_base = OTHER; note = Each t is m1f
  source 1..9485: mol_type = other RNA

SEQ ID NO: 18305 - RNA, 9485 nt, synthetic construct; identical to SEQ ID NO: 16708
  modified_base 1..9485: mod_base = OTHER; note = Each t is m1f
  source 1..9485: mol_type = other RNA

SEQ ID NO: 18306 - RNA, 9485 nt, synthetic construct; identical to SEQ ID NO: 16709
  modified_base 1..9485: mod_base = OTHER; note = Each t is m1f
  source 1..9485: mol_type = other RNA

SEQ ID NO: 18307 - RNA, 9485 nt, synthetic construct; identical to SEQ ID NO: 16710
  modified_base 1..9485: mod_base = OTHER; note = Each t is m1f
  source 1..9485: mol_type = other RNA

SEQ ID NO: 18308 - RNA, 9485 nt, synthetic construct; identical to SEQ ID NO: 16711
  modified_base 1..9485: mod_base = OTHER; note = Each t is m1f
  source 1..9485: mol_type = other RNA

SEQ ID NO: 18309 - RNA, 9485 nt, synthetic construct; identical to SEQ ID NO: 16712
  modified_base 1..9485: mod_base = OTHER; note = Each t is m1f
  source 1..9485: mol_type = other RNA

SEQ ID NO: 18310 - RNA, 9479 nt, synthetic construct; identical to SEQ ID NO: 16713
  modified_base 1..9479: mod_base = OTHER; note = Each t is m1f
  source 1..9479: mol_type = other RNA

SEQ ID NO: 18311 - RNA, 9485 nt, synthetic construct; identical to SEQ ID NO: 16714
  modified_base 1..9485: mod_base = OTHER; note = Each t is m1f
  source 1..9485: mol_type = other RNA

SEQ ID NO: 18312 - RNA, 9485 nt, synthetic construct; identical to SEQ ID NO: 16715
  modified_base 1..9485: mod_base = OTHER; note = Each t is m1f
  source 1..9485: mol_type = other RNA

SEQ ID NO: 18313 - RNA, 9485 nt, synthetic construct; identical to SEQ ID NO: 16716
  modified_base 1..9485: mod_base = OTHER; note = Each t is m1f
  source 1..9485: mol_type = other RNA

SEQ ID NO: 18314 - RNA, 9485 nt, synthetic construct; identical to SEQ ID NO: 16717
  modified_base 1..9485: mod_base = OTHER; note = Each t is m1f
  source 1..9485: mol_type = other RNA

SEQ ID NO: 18315 - RNA, 9485 nt, synthetic construct; identical to SEQ ID NO: 16718
  modified_base 1..9485: mod_base = OTHER; note = Each t is m1f
  source 1..9485: mol_type = other RNA

SEQ ID NO: 18316 - RNA, 9485 nt, synthetic construct; identical to SEQ ID NO: 16719
  modified_base 1..9485: mod_base = OTHER; note = Each t is m1f
  source 1..9485: mol_type = other RNA

SEQ ID NO: 18317 - RNA, 9485 nt, synthetic construct; identical to SEQ ID NO: 16720
  modified_base 1..9485: mod_base = OTHER; note = Each t is m1f
  source 1..9485: mol_type = other RNA

SEQ ID NO: 18318 - RNA, 9485 nt, synthetic construct; identical to SEQ ID NO: 16721
  modified_base 1..9485: mod_base = OTHER; note = Each t is m1f
  source 1..9485: mol_type = other RNA

SEQ ID NO: 18319 - RNA, 9479 nt, synthetic construct; identical to SEQ ID NO: 16722
  modified_base 1..9479: mod_base = OTHER; note = Each t is m1f
  source 1..9479: mol_type = other RNA

SEQ ID NO: 18320 - RNA, 9485 nt, synthetic construct; identical to SEQ ID NO: 16723
  modified_base 1..9485: mod_base = OTHER; note = Each t is m1f
  source 1..9485: mol_type = other RNA

SEQ ID NO: 18321 - RNA, 9485 nt, synthetic construct; identical to SEQ ID NO: 16724
  modified_base 1..9485: mod_base = OTHER; note = Each t is m1f
  source 1..9485: mol_type = other RNA

SEQ ID NO: 18322 - RNA, 9503 nt, synthetic construct; identical to SEQ ID NO: 16725
  modified_base 1..9503: mod_base = OTHER; note = Each t is m1f
  source 1..9503: mol_type = other RNA

SEQ ID NO: 18323 - RNA, 9485 nt, synthetic construct; identical to SEQ ID NO: 16726
  modified_base 1..9485: mod_base = OTHER; note = Each t is m1f
  source 1..9485: mol_type = other RNA

SEQ ID NO: 18324 - RNA, 9479 nt, synthetic construct; identical to SEQ ID NO: 16727
  modified_base 1..9479: mod_base = OTHER; note = Each t is m1f
  source 1..9479: mol_type = other RNA

SEQ ID NO: 18325 - RNA, 9485 nt, synthetic construct; identical to SEQ ID NO: 16728
  modified_base 1..9485: mod_base = OTHER; note = Each t is m1f
  source 1..9485: mol_type = other RNA

SEQ ID NO: 18326 - RNA, 9485 nt, synthetic construct; identical to SEQ ID NO: 16729
  modified_base 1..9485: mod_base = OTHER; note = Each t is m1f
  source 1..9485: mol_type = other RNA

SEQ ID NO: 18327 - RNA, 9485 nt, synthetic construct; identical to SEQ ID NO: 16730
  modified_base 1..9485: mod_base = OTHER; note = Each t is m1f
  source 1..9485: mol_type = other RNA

SEQ ID NO: 18328 - RNA, 9485 nt, synthetic construct; identical to SEQ ID NO: 16731
  modified_base 1..9485: mod_base = OTHER; note = Each t is m1f
  source 1..9485: mol_type = other RNA

SEQ ID NO: 18329 - RNA, 9485 nt, synthetic construct; identical to SEQ ID NO: 16732
  modified_base 1..9485: mod_base = OTHER; note = Each t is m1f
  source 1..9485: mol_type = other RNA

SEQ ID NO: 18330 - RNA, 9485 nt, synthetic construct; identical to SEQ ID NO: 16733
  modified_base 1..9485: mod_base = OTHER; note = Each t is m1f
  source 1..9485: mol_type = other RNA

SEQ ID NO: 18331 - RNA, 9485 nt, synthetic construct; identical to SEQ ID NO: 16734
  modified_base 1..9485: mod_base = OTHER; note = Each t is m1f
  source 1..9485: mol_type = other RNA

SEQ ID NO: 18332 - RNA, 9485 nt, synthetic construct; identical to SEQ ID NO: 16735
  modified_base 1..9485: mod_base = OTHER; note = Each t is m1f
  source 1..9485: mol_type = other RNA

SEQ ID NO: 18333 - RNA, 9485 nt, synthetic construct; identical to SEQ ID NO: 16736
  modified_base 1..9485: mod_base = OTHER; note = Each t is m1f
  source 1..9485: mol_type = other RNA

SEQ ID NO: 18334 - RNA, 9485 nt, synthetic construct; identical to SEQ ID NO: 16737
  modified_base 1..9485: mod_base = OTHER; note = Each t is m1f
  source 1..9485: mol_type = other RNA

SEQ ID NO: 18335 - RNA, 9485 nt, synthetic construct; identical to SEQ ID NO: 16738
  modified_base 1..9485: mod_base = OTHER; note = Each t is m1f
  source 1..9485: mol_type = other RNA

SEQ ID NO: 18336 - RNA, 9485 nt, synthetic construct; identical to SEQ ID NO: 16739
  modified_base 1..9485: mod_base = OTHER; note = Each t is m1f
  source 1..9485: mol_type = other RNA

SEQ ID NO: 18337 - RNA, 9485 nt, synthetic construct; identical to SEQ ID NO: 16740
  modified_base 1..9485: mod_base = OTHER; note = Each t is m1f
  source 1..9485: mol_type = other RNA

SEQ ID NO: 18338 - RNA, 9503 nt, synthetic construct; identical to SEQ ID NO: 16741
  modified_base 1..9503: mod_base = OTHER; note = Each t is m1f
  source 1..9503: mol_type = other RNA

SEQ ID NO: 18339 - RNA, 9485 nt, synthetic construct; identical to SEQ ID NO: 16742
  modified_base 1..9485: mod_base = OTHER; note = Each t is m1f
  source 1..9485: mol_type = other RNA

SEQ ID NO: 18340 - RNA, 9485 nt, synthetic construct; identical to SEQ ID NO: 16743
  modified_base 1..9485: mod_base = OTHER; note = Each t is m1f
  source 1..9485: mol_type = other RNA

SEQ ID NO: 18341 - RNA, 9485 nt, synthetic construct; identical to SEQ ID NO: 16744
  modified_base 1..9485: mod_base = OTHER; note = Each t is m1f
  source 1..9485: mol_type = other RNA

SEQ ID NO: 18342 - RNA, 9485 nt, synthetic construct; identical to SEQ ID NO: 16745
  modified_base 1..9485: mod_base = OTHER; note = Each t is m1f
  source 1..9485: mol_type = other RNA

SEQ ID NO: 18343 - RNA, 9485 nt, synthetic construct; identical to SEQ ID NO: 16746
  modified_base 1..9485: mod_base = OTHER; note = Each t is m1f
  source 1..9485: mol_type = other RNA

SEQ ID NO: 18344 - RNA, 9485 nt, synthetic construct; identical to SEQ ID NO: 16747
  modified_base 1..9485: mod_base = OTHER; note = Each t is m1f
  source 1..9485: mol_type = other RNA

SEQ ID NO: 18345 - RNA, 9485 nt, synthetic construct; identical to SEQ ID NO: 16748
  modified_base 1..9485: mod_base = OTHER; note = Each t is m1f
  source 1..9485: mol_type = other RNA

SEQ ID NO: 18346 - RNA, 9485 nt, synthetic construct; identical to SEQ ID NO: 16749
  modified_base 1..9485: mod_base = OTHER; note = Each t is m1f
  source 1..9485: mol_type = other RNA

SEQ ID NO: 18347 - RNA, 9485 nt, synthetic construct; identical to SEQ ID NO: 16750
  modified_base 1..9485: mod_base = OTHER; note = Each t is m1f
  source 1..9485: mol_type = other RNA

SEQ ID NO: 18348 - RNA, 9485 nt, synthetic construct; identical to SEQ ID NO: 16751
  modified_base 1..9485: mod_base = OTHER; note = Each t is m1f
  source 1..9485: mol_type = other RNA

SEQ ID NO: 18349 - RNA, 9485 nt, synthetic construct; identical to SEQ ID NO: 16752
  modified_base 1..9485: mod_base = OTHER; note = Each t is m1f
  source 1..9485: mol_type = other RNA

SEQ ID NO: 18350 - RNA, 9485 nt, synthetic construct; identical to SEQ ID NO: 16753
  modified_base 1..9485: mod_base = OTHER; note = Each t is m1f
  source 1..9485: mol_type = other RNA

SEQ ID NO: 18351 - RNA, 9485 nt, synthetic construct; identical to SEQ ID NO: 16754
  modified_base 1..9485: mod_base = OTHER; note = Each t is m1f
  source 1..9485: mol_type = other RNA

SEQ ID NO: 18352 - RNA, 9485 nt, synthetic construct; identical to SEQ ID NO: 16755
  modified_base 1..9485: mod_base = OTHER; note = Each t is m1f
  source 1..9485: mol_type = other RNA

SEQ ID NO: 18353 - RNA, 9485 nt, synthetic construct; identical to SEQ ID NO: 16756
  modified_base 1..9485: mod_base = OTHER; note = Each t is m1f
  source 1..9485: mol_type = other RNA

SEQ ID NO: 18354 - RNA, 9485 nt, synthetic construct; identical to SEQ ID NO: 16757
  modified_base 1..9485: mod_base = OTHER; note = Each t is m1f
  source 1..9485: mol_type = other RNA

SEQ ID NO: 18355 - RNA, 9485 nt, synthetic construct; identical to SEQ ID NO: 16758
  modified_base 1..9485: mod_base = OTHER; note = Each t is m1f
  source 1..9485: mol_type = other RNA

SEQ ID NO: 18356 - RNA, 9485 nt, synthetic construct; identical to SEQ ID NO: 16759
  modified_base 1..9485: mod_base = OTHER; note = Each t is m1f
  source 1..9485: mol_type = other RNA

SEQ ID NO: 18357 - RNA, 9485 nt, synthetic construct; identical to SEQ ID NO: 16760
  modified_base 1..9485: mod_base = OTHER; note = Each t is m1f
  source 1..9485: mol_type = other RNA

SEQ ID NO: 18358 - RNA, 9485 nt, synthetic construct; identical to SEQ ID NO: 16761
  modified_base 1..9485: mod_base = OTHER; note = Each t is m1f
  source 1..9485: mol_type = other RNA

SEQ ID NO: 18359 - RNA, 9485 nt, synthetic construct; identical to SEQ ID NO: 16762
  modified_base 1..9485: mod_base = OTHER; note = Each t is m1f
  source 1..9485: mol_type = other RNA

SEQ ID NO: 18360 - RNA, 9485 nt, synthetic construct; identical to SEQ ID NO: 16763
  modified_base 1..9485: mod_base = OTHER; note = Each t is m1f
  source 1..9485: mol_type = other RNA

SEQ ID NO: 18361 - RNA, 9485 nt, synthetic construct; identical to SEQ ID NO: 16764
  modified_base 1..9485: mod_base = OTHER; note = Each t is m1f
  source 1..9485: mol_type = other RNA

SEQ ID NO: 18362 - RNA, 9485 nt, synthetic construct; identical to SEQ ID NO: 16765
  modified_base 1..9485: mod_base = OTHER; note = Each t is m1f
  source 1..9485: mol_type = other RNA

SEQ ID NO: 18363 - RNA, 9485 nt, synthetic construct; identical to SEQ ID NO: 16766
  modified_base 1..9485: mod_base = OTHER; note = Each t is m1f
  source 1..9485: mol_type = other RNA

SEQ ID NO: 18364 - RNA, 9485 nt, synthetic construct; identical to SEQ ID NO: 16767
  modified_base 1..9485: mod_base = OTHER; note = Each t is m1f
  source 1..9485: mol_type = other RNA

SEQ ID NO: 18365 - RNA, 9485 nt, synthetic construct; identical to SEQ ID NO: 16768
  modified_base 1..9485: mod_base = OTHER; note = Each t is m1f
  source 1..9485: mol_type = other RNA

SEQ ID NO: 18366 - RNA, 9485 nt, synthetic construct; identical to SEQ ID NO: 16769
  modified_base 1..9485: mod_base = OTHER; note = Each t is m1f
  source 1..9485: mol_type = other RNA

SEQ ID NO: 18367 - RNA, 9485 nt, synthetic construct; identical to SEQ ID NO: 16770
  modified_base 1..9485: mod_base = OTHER; note = Each t is m1f
  source 1..9485: mol_type = other RNA

SEQ ID NO: 18368 - RNA, 9485 nt, synthetic construct; identical to SEQ ID NO: 16771
  modified_base 1..9485: mod_base = OTHER; note = Each t is m1f
  source 1..9485: mol_type = other RNA

SEQ ID NO: 18369 - RNA, 9485 nt, synthetic construct; identical to SEQ ID NO: 16772
  modified_base 1..9485: mod_base = OTHER; note = Each t is m1f
  source 1..9485: mol_type = other RNA

SEQ ID NO: 18370 - RNA, 9485 nt, synthetic construct; identical to SEQ ID NO: 16773
  modified_base 1..9485: mod_base = OTHER; note = Each t is m1f
  source 1..9485: mol_type = other RNA

SEQ ID NO: 18371 - RNA, 9485 nt, synthetic construct; identical to SEQ ID NO: 16774
  modified_base 1..9485: mod_base = OTHER; note = Each t is m1f
  source 1..9485: mol_type = other RNA

SEQ ID NO: 18372 - RNA, 9485 nt, synthetic construct; identical to SEQ ID NO: 16775
  modified_base 1..9485: mod_base = OTHER; note = Each t is m1f
  source 1..9485: mol_type = other RNA

SEQ ID NO: 18373 - RNA, 9485 nt, synthetic construct; identical to SEQ ID NO: 16776
  modified_base 1..9485: mod_base = OTHER; note = Each t is m1f
  source 1..9485: mol_type = other RNA

SEQ ID NO: 18374 - RNA, 9485 nt, synthetic construct; identical to SEQ ID NO: 16777
  modified_base 1..9485: mod_base = OTHER; note = Each t is m1f
  source 1..9485: mol_type = other RNA

SEQ ID NO: 18375 - RNA, 9485 nt, synthetic construct; identical to SEQ ID NO: 16778
  modified_base 1..9485: mod_base = OTHER; note = Each t is m1f
  source 1..9485: mol_type = other RNA

SEQ ID NO: 18376 - RNA, 9485 nt, synthetic construct; identical to SEQ ID NO: 16779
  modified_base 1..9485: mod_base = OTHER; note = Each t is m1f
  source 1..9485: mol_type = other RNA

SEQ ID NO: 18377 - RNA, 9485 nt, synthetic construct; identical to SEQ ID NO: 16780
  modified_base 1..9485: mod_base = OTHER; note = Each t is m1f
  source 1..9485: mol_type = other RNA

SEQ ID NO: 18378 - RNA, 9485 nt, synthetic construct; identical to SEQ ID NO: 16781
  modified_base 1..9485: mod_base = OTHER; note = Each t is m1f
  source 1..9485: mol_type = other RNA

SEQ ID NO: 18379 - RNA, 9485 nt, synthetic construct; identical to SEQ ID NO: 16782
  modified_base 1..9485: mod_base = OTHER; note = Each t is m1f
  source 1..9485: mol_type = other RNA

SEQ ID NO: 18380 - RNA, 9485 nt, synthetic construct; identical to SEQ ID NO: 16783
  modified_base 1..9485: mod_base = OTHER; note = Each t is m1f
  source 1..9485: mol_type = other RNA

SEQ ID NO: 18381 - RNA, 9485 nt, synthetic construct; identical to SEQ ID NO: 16784
  modified_base 1..9485: mod_base = OTHER; note = Each t is m1f
  source 1..9485: mol_type = other RNA

SEQ ID NO: 18382 - RNA, 9485 nt, synthetic construct; identical to SEQ ID NO: 16785
  modified_base 1..9485: mod_base = OTHER; note = Each t is m1f
  source 1..9485: mol_type = other RNA

SEQ ID NO: 18383 - RNA, 9485 nt, synthetic construct; identical to SEQ ID NO: 16786
  modified_base 1..9485: mod_base = OTHER; note = Each t is m1f
  source 1..9485: mol_type = other RNA

SEQ ID NO: 18384 - RNA, 9485 nt, synthetic construct; identical to SEQ ID NO: 16787
  modified_base 1..9485: mod_base = OTHER; note = Each t is m1f
  source 1..9485: mol_type = other RNA

SEQ ID NO: 18385 - RNA, 9485 nt, synthetic construct; identical to SEQ ID NO: 16788
  modified_base 1..9485: mod_base = OTHER; note = Each t is m1f
  source 1..9485: mol_type = other RNA

SEQ ID NO: 18386 - RNA, 9485 nt, synthetic construct; identical to SEQ ID NO: 16789
  modified_base 1..9485: mod_base = OTHER; note = Each t is m1f
  source 1..9485: mol_type = other RNA

SEQ ID NO: 18387 - RNA, 9485 nt, synthetic construct; identical to SEQ ID NO: 16790
  modified_base 1..9485: mod_base = OTHER; note = Each t is m1f
  source 1..9485: mol_type = other RNA

SEQ ID NO: 18388 - RNA, 9485 nt, synthetic construct; identical to SEQ ID NO: 16791
  modified_base 1..9485: mod_base = OTHER; note = Each t is m1f
  source 1..9485: mol_type = other RNA

SEQ ID NO: 18389 - RNA, 9485 nt, synthetic construct; identical to SEQ ID NO: 16792
  modified_base 1..9485: mod_base = OTHER; note = Each t is m1f
  source 1..9485: mol_type = other RNA

SEQ ID NO: 18390 - RNA, 9485 nt, synthetic construct; identical to SEQ ID NO: 16793
  modified_base 1..9485: mod_base = OTHER; note = Each t is m1f
  source 1..9485: mol_type = other RNA

SEQ ID NO: 18391 - RNA, 9485 nt, synthetic construct; identical to SEQ ID NO: 16794
  modified_base 1..9485: mod_base = OTHER; note = Each t is m1f
  source 1..9485: mol_type = other RNA

SEQ ID NO: 18392 - RNA, 9485 nt, synthetic construct; identical to SEQ ID NO: 16795
  modified_base 1..9485: mod_base = OTHER; note = Each t is m1f
  source 1..9485: mol_type = other RNA

SEQ ID NO: 18393 - RNA, 9485 nt, synthetic construct; identical to SEQ ID NO: 16796
  modified_base 1..9485: mod_base = OTHER; note = Each t is m1f
  source 1..9485: mol_type = other RNA

SEQ ID NO: 18394 - RNA, 9485 nt, synthetic construct; identical to SEQ ID NO: 16797
  modified_base 1..9485: mod_base = OTHER; note = Each t is m1f
  source 1..9485: mol_type = other RNA

SEQ ID NO: 18395 - RNA, 9485 nt, synthetic construct; identical to SEQ ID NO: 16798
  modified_base 1..9485: mod_base = OTHER; note = Each t is m1f
  source 1..9485: mol_type = other RNA

SEQ ID NO: 18396 - RNA, 9485 nt, synthetic construct; identical to SEQ ID NO: 16799
  modified_base 1..9485: mod_base = OTHER; note = Each t is m1f
  source 1..9485: mol_type = other RNA

SEQ ID NO: 18397 - RNA, 9485 nt, synthetic construct; identical to SEQ ID NO: 16800
  modified_base 1..9485: mod_base = OTHER; note = Each t is m1f
  source 1..9485: mol_type = other RNA

SEQ ID NO: 18398 - RNA, 9485 nt, synthetic construct; identical to SEQ ID NO: 16801
  modified_base 1..9485: mod_base = OTHER; note = Each t is m1f
  source 1..9485: mol_type = other RNA

SEQ ID NO: 18399 - RNA, 9485 nt, synthetic construct; identical to SEQ ID NO: 16802
  modified_base 1..9485: mod_base = OTHER; note = Each t is m1f
  source 1..9485: mol_type = other RNA

SEQ ID NO: 18400 - RNA, 9485 nt, synthetic construct; identical to SEQ ID NO: 16803
  modified_base 1..9485: mod_base = OTHER; note = Each t is m1f
  source 1..9485: mol_type = other RNA

SEQ ID NO: 18401 - RNA, 9485 nt, synthetic construct; identical to SEQ ID NO: 16804
  modified_base 1..9485: mod_base = OTHER; note = Each t is m1f
  source 1..9485: mol_type = other RNA

SEQ ID NO: 18402 - RNA, 9485 nt, synthetic construct; identical to SEQ ID NO: 16805
  modified_base 1..9485: mod_base = OTHER; note = Each t is m1f
  source 1..9485: mol_type = other RNA

SEQ ID NO: 18403 - RNA, 9485 nt, synthetic construct; identical to SEQ ID NO: 16806
  modified_base 1..9485: mod_base = OTHER; note = Each t is m1f
  source 1..9485: mol_type = other RNA

SEQ ID NO: 18404 - RNA, 9485 nt, synthetic construct; identical to SEQ ID NO: 16807
  modified_base 1..9485: mod_base = OTHER; note = Each t is m1f
  source 1..9485: mol_type = other RNA

SEQ ID NO: 18405 - RNA, 9485 nt, synthetic construct; identical to SEQ ID NO: 16808
  modified_base 1..9485: mod_base = OTHER; note = Each t is m1f
  source 1..9485: mol_type = other RNA

SEQ ID NO: 18406 - RNA, 9485 nt, synthetic construct; identical to SEQ ID NO: 16809
  modified_base 1..9485: mod_base = OTHER; note = Each t is m1f
  source 1..9485: mol_type = other RNA

SEQ ID NO: 18407 - RNA, 9485 nt, synthetic construct; identical to SEQ ID NO: 16810
  modified_base 1..9485: mod_base = OTHER; note = Each t is m1f
  source 1..9485: mol_type = other RNA

SEQ ID NO: 18408 - RNA, 9485 nt, synthetic construct; identical to SEQ ID NO: 16811
  modified_base 1..9485: mod_base = OTHER; note = Each t is m1f
  source 1..9485: mol_type = other RNA

SEQ ID NO: 18409 - RNA, 9485 nt, synthetic construct; identical to SEQ ID NO: 16812
  modified_base 1..9485: mod_base = OTHER; note = Each t is m1f
  source 1..9485: mol_type = other RNA

SEQ ID NO: 18410 - RNA, 9485 nt, synthetic construct; identical to SEQ ID NO: 16813
  modified_base 1..9485: mod_base = OTHER; note = Each t is m1f
  source 1..9485: mol_type = other RNA

SEQ ID NO: 18411 - RNA, 9485 nt, synthetic construct; identical to SEQ ID NO: 16814
  modified_base 1..9485: mod_base = OTHER; note = Each t is m1f
  source 1..9485: mol_type = other RNA

SEQ ID NO: 18412 - RNA, 9485 nt, synthetic construct; identical to SEQ ID NO: 16815
  modified_base 1..9485: mod_base = OTHER; note = Each t is m1f
  source 1..9485: mol_type = other RNA

SEQ ID NO: 18413 - RNA, 9485 nt, synthetic construct; identical to SEQ ID NO: 16816
  modified_base 1..9485: mod_base = OTHER; note = Each t is m1f
  source 1..9485: mol_type = other RNA

SEQ ID NO: 18414 - RNA, 9485 nt, synthetic construct; identical to SEQ ID NO: 16817
  modified_base 1..9485: mod_base = OTHER; note = Each t is m1f
  source 1..9485: mol_type = other RNA

SEQ ID NO: 18415 - RNA, 9485 nt, synthetic construct; identical to SEQ ID NO: 16818
  modified_base 1..9485: mod_base = OTHER; note = Each t is m1f
  source 1..9485: mol_type = other RNA

SEQ ID NO: 18416 - RNA, 9485 nt, synthetic construct; identical to SEQ ID NO: 16819
  modified_base 1..9485: mod_base = OTHER; note = Each t is m1f
  source 1..9485: mol_type = other RNA

SEQ ID NO: 18417 - RNA, 9485 nt, synthetic construct; identical to SEQ ID NO: 16820
  modified_base 1..9485: mod_base = OTHER; note = Each t is m1f
  source 1..9485: mol_type = other RNA

SEQ ID NO: 18418 - RNA, 9485 nt, synthetic construct; identical to SEQ ID NO: 16821
  modified_base 1..9485: mod_base = OTHER; note = Each t is m1f
  source 1..9485: mol_type = other RNA

SEQ ID NO: 18419 - RNA, 9485 nt, synthetic construct; identical to SEQ ID NO: 16822
  modified_base 1..9485: mod_base = OTHER; note = Each t is m1f
  source 1..9485: mol_type = other RNA

SEQ ID NO: 18420 - RNA, 9485 nt, synthetic construct; identical to SEQ ID NO: 16823
  modified_base 1..9485: mod_base = OTHER; note = Each t is m1f
  source 1..9485: mol_type = other RNA

SEQ ID NO: 18421 - RNA, 9485 nt, synthetic construct; identical to SEQ ID NO: 16824
  modified_base 1..9485: mod_base = OTHER; note = Each t is m1f
  source 1..9485: mol_type = other RNA

SEQ ID NO: 18422 - RNA, 9485 nt, synthetic construct; identical to SEQ ID NO: 16825
  modified_base 1..9485: mod_base = OTHER; note = Each t is m1f
  source 1..9485: mol_type = other RNA

SEQ ID NO: 18423 - RNA, 9485 nt, synthetic construct; identical to SEQ ID NO: 16826
  modified_base 1..9485: mod_base = OTHER; note = Each t is m1f
  source 1..9485: mol_type = other RNA

SEQ ID NO: 18424 - RNA, 9485 nt, synthetic construct; identical to SEQ ID NO: 16827
  modified_base 1..9485: mod_base = OTHER; note = Each t is m1f
  source 1..9485: mol_type = other RNA

SEQ ID NO: 18425 - RNA, 9485 nt, synthetic construct; identical to SEQ ID NO: 16828
  modified_base 1..9485: mod_base = OTHER; note = Each t is m1f
  source 1..9485: mol_type = other RNA

SEQ ID NO: 18426 - RNA, 9485 nt, synthetic construct; identical to SEQ ID NO: 16829
  modified_base 1..9485: mod_base = OTHER; note = Each t is m1f
  source 1..9485: mol_type = other RNA

SEQ ID NO: 18427 - RNA, 9485 nt, synthetic construct; identical to SEQ ID NO: 16830
  modified_base 1..9485: mod_base = OTHER; note = Each t is m1f
  source 1..9485: mol_type = other RNA

SEQ ID NO: 18428 - RNA, 9485 nt, synthetic construct; identical to SEQ ID NO: 16831
  modified_base 1..9485: mod_base = OTHER; note = Each t is m1f
  source 1..9485: mol_type = other RNA

SEQ ID NO: 18429 - RNA, 9485 nt, synthetic construct; identical to SEQ ID NO: 16832
  modified_base 1..9485: mod_base = OTHER; note = Each t is m1f
  source 1..9485: mol_type = other RNA

SEQ ID NO: 18430 - RNA, 9485 nt, synthetic construct; identical to SEQ ID NO: 16833
  modified_base 1..9485: mod_base = OTHER; note = Each t is m1f
  source 1..9485: mol_type = other RNA

SEQ ID NO: 18431 - RNA, 9485 nt, synthetic construct; identical to SEQ ID NO: 16834
  modified_base 1..9485: mod_base = OTHER; note = Each t is m1f
  source 1..9485: mol_type = other RNA

SEQ ID NO: 18432 - RNA, 9485 nt, synthetic construct; identical to SEQ ID NO: 16835
  modified_base 1..9485: mod_base = OTHER; note = Each t is m1f
  source 1..9485: mol_type = other RNA

SEQ ID NO: 18433 - RNA, 9485 nt, synthetic construct; identical to SEQ ID NO: 16836
  modified_base 1..9485: mod_base = OTHER; note = Each t is m1f
  source 1..9485: mol_type = other RNA

SEQ ID NO: 18434 - RNA, 9485 nt, synthetic construct; identical to SEQ ID NO: 16837
  modified_base 1..9485: mod_base = OTHER; note = Each t is m1f
  source 1..9485: mol_type = other RNA

SEQ ID NO: 18435 - RNA, 9485 nt, synthetic construct; identical to SEQ ID NO: 16838
  modified_base 1..9485: mod_base = OTHER; note = Each t is m1f
  source 1..9485: mol_type = other RNA

SEQ ID NO: 18436 - RNA, 9485 nt, synthetic construct; identical to SEQ ID NO: 16839
  modified_base 1..9485: mod_base = OTHER; note = Each t is m1f
  source 1..9485: mol_type = other RNA

SEQ ID NO: 18437 - RNA, 9485 nt, synthetic construct; identical to SEQ ID NO: 16840
  modified_base 1..9485: mod_base = OTHER; note = Each t is m1f
  source 1..9485: mol_type = other RNA

SEQ ID NO: 18438 - RNA, 9485 nt, synthetic construct; identical to SEQ ID NO: 16841
  modified_base 1..9485: mod_base = OTHER; note = Each t is m1f
  source 1..9485: mol_type = other RNA

SEQ ID NO: 18439 - RNA, 9485 nt, synthetic construct; identical to SEQ ID NO: 16842
  modified_base 1..9485: mod_base = OTHER; note = Each t is m1f
  source 1..9485: mol_type = other RNA

SEQ ID NO: 18440 - RNA, 9485 nt, synthetic construct; identical to SEQ ID NO: 16843
  modified_base 1..9485: mod_base = OTHER; note = Each t is m1f
  source 1..9485: mol_type = other RNA

SEQ ID NO: 18441 - RNA, 9485 nt, synthetic construct; identical to SEQ ID NO: 16844
  modified_base 1..9485: mod_base = OTHER; note = Each t is m1f
  source 1..9485: mol_type = other RNA

SEQ ID NO: 18442 - RNA, 9485 nt, synthetic construct; identical to SEQ ID NO: 16845
  modified_base 1..9485: mod_base = OTHER; note = Each t is m1f
  source 1..9485: mol_type = other RNA

SEQ ID NO: 18443 - RNA, 9485 nt, synthetic construct; identical to SEQ ID NO: 16846
  modified_base 1..9485: mod_base = OTHER; note = Each t is m1f
  source 1..9485: mol_type = other RNA

SEQ ID NO: 18444 - RNA, 9485 nt, synthetic construct; identical to SEQ ID NO: 16847
  modified_base 1..9485: mod_base = OTHER; note = Each t is m1f
  source 1..9485: mol_type = other RNA

SEQ ID NO: 18445 - RNA, 9485 nt, synthetic construct; identical to SEQ ID NO: 16848
  modified_base 1..9485: mod_base = OTHER; note = Each t is m1f
  source 1..9485: mol_type = other RNA

SEQ ID NO: 18446 - RNA, 9485 nt, synthetic construct; identical to SEQ ID NO: 16849
  modified_base 1..9485: mod_base = OTHER; note = Each t is m1f
  source 1..9485: mol_type = other RNA

SEQ ID NO: 18447 - RNA, 9485 nt, synthetic construct; identical to SEQ ID NO: 16850
  modified_base 1..9485: mod_base = OTHER; note = Each t is m1f
  source 1..9485: mol_type = other RNA

SEQ ID NO: 18448 - RNA, 9485 nt, synthetic construct; identical to SEQ ID NO: 16851
  modified_base 1..9485: mod_base = OTHER; note = Each t is m1f
  source 1..9485: mol_type = other RNA

SEQ ID NO: 18449 - RNA, 9485 nt, synthetic construct; identical to SEQ ID NO: 16852
  modified_base 1..9485: mod_base = OTHER; note = Each t is m1f
  source 1..9485: mol_type = other RNA

SEQ ID NO: 18450 - RNA, 9485 nt, synthetic construct; identical to SEQ ID NO: 16853
  modified_base 1..9485: mod_base = OTHER; note = Each t is m1f
  source 1..9485: mol_type = other RNA

SEQ ID NO: 18451 - RNA, 9485 nt, synthetic construct; identical to SEQ ID NO: 16854
  modified_base 1..9485: mod_base = OTHER; note = Each t is m1f
  source 1..9485: mol_type = other RNA

SEQ ID NO: 18452 - RNA, 9485 nt, synthetic construct; identical to SEQ ID NO: 16855
  modified_base 1..9485: mod_base = OTHER; note = Each t is m1f
  source 1..9485: mol_type = other RNA

SEQ ID NO: 18453 - RNA, 9485 nt, synthetic construct; identical to SEQ ID NO: 16856
  modified_base 1..9485: mod_base = OTHER; note = Each t is m1f
  source 1..9485: mol_type = other RNA

SEQ ID NO: 18454 - RNA, 9485 nt, synthetic construct; identical to SEQ ID NO: 16857
  modified_base 1..9485: mod_base = OTHER; note = Each t is m1f
  source 1..9485: mol_type = other RNA

SEQ ID NO: 18455 - RNA, 9485 nt, synthetic construct; identical to SEQ ID NO: 16858
  modified_base 1..9485: mod_base = OTHER; note = Each t is m1f
  source 1..9485: mol_type = other RNA

SEQ ID NO: 18456 - RNA, 9485 nt, synthetic construct; identical to SEQ ID NO: 16859
  modified_base 1..9485: mod_base = OTHER; note = Each t is m1f
  source 1..9485: mol_type = other RNA

SEQ ID NO: 18457 - RNA, 9485 nt, synthetic construct; identical to SEQ ID NO: 16860
  modified_base 1..9485: mod_base = OTHER; note = Each t is m1f
  source 1..9485: mol_type = other RNA

SEQ ID NO: 18458 - RNA, 9479 nt, synthetic construct; identical to SEQ ID NO: 16861
  modified_base 1..9479: mod_base = OTHER; note = Each t is m1f
  source 1..9479: mol_type = other RNA

SEQ ID NO: 18459 - RNA, 9485 nt, synthetic construct; identical to SEQ ID NO: 16862
  modified_base 1..9485: mod_base = OTHER; note = Each t is m1f
  source 1..9485: mol_type = other RNA

SEQ ID NO: 18460 - RNA, 9485 nt, synthetic construct; identical to SEQ ID NO: 16863
  modified_base 1..9485: mod_base = OTHER; note = Each t is m1f
  source 1..9485: mol_type = other RNA

SEQ ID NO: 18461 - RNA, 9485 nt, synthetic construct; identical to SEQ ID NO: 16864
  modified_base 1..9485: mod_base = OTHER; note = Each t is m1f
  source 1..9485: mol_type = other RNA

SEQ ID NO: 18462 - RNA, 9485 nt, synthetic construct; identical to SEQ ID NO: 16865
  modified_base 1..9485: mod_base = OTHER; note = Each t is m1f
  source 1..9485: mol_type = other RNA

SEQ ID NO: 18463 - RNA, 9485 nt, synthetic construct; identical to SEQ ID NO: 16866
  modified_base 1..9485: mod_base = OTHER; note = Each t is m1f
  source 1..9485: mol_type = other RNA

SEQ ID NO: 18464 - RNA, 9485 nt, synthetic construct; identical to SEQ ID NO: 16867
  modified_base 1..9485: mod_base = OTHER; note = Each t is m1f
  source 1..9485: mol_type = other RNA

SEQ ID NO: 18465 - RNA, 9485 nt, synthetic construct; identical to SEQ ID NO: 16868
  modified_base 1..9485: mod_base = OTHER; note = Each t is m1f
  source 1..9485: mol_type = other RNA

SEQ ID NO: 18466 - RNA, 9485 nt, synthetic construct; identical to SEQ ID NO: 16869
  modified_base 1..9485: mod_base = OTHER; note = Each t is m1f
  source 1..9485: mol_type = other RNA

SEQ ID NO: 18467 - RNA, 9485 nt, synthetic construct; identical to SEQ ID NO: 16870
  modified_base 1..9485: mod_base = OTHER; note = Each t is m1f
  source 1..9485: mol_type = other RNA

SEQ ID NO: 18468 - RNA, 9485 nt, synthetic construct; identical to SEQ ID NO: 16871
  modified_base 1..9485: mod_base = OTHER; note = Each t is m1f
  source 1..9485: mol_type = other RNA

SEQ ID NO: 18469 - RNA, 9485 nt, synthetic construct; identical to SEQ ID NO: 16872
  modified_base 1..9485: mod_base = OTHER; note = Each t is m1f
  source 1..9485: mol_type = other RNA

SEQ ID NO: 18470 - RNA, 9485 nt, synthetic construct; identical to SEQ ID NO: 16873
  modified_base 1..9485: mod_base = OTHER; note = Each t is m1f
  source 1..9485: mol_type = other RNA

SEQ ID NO: 18471 - RNA, 9485 nt, synthetic construct; identical to SEQ ID NO: 16874
  modified_base 1..9485: mod_base = OTHER; note = Each t is m1f
  source 1..9485: mol_type = other RNA

SEQ ID NO: 18472 - RNA, 9485 nt, synthetic construct; identical to SEQ ID NO: 16875
  modified_base 1..9485: mod_base = OTHER; note = Each t is m1f
  source 1..9485: mol_type = other RNA

SEQ ID NO: 18473 - RNA, 9485 nt, synthetic construct; identical to SEQ ID NO: 16876
  modified_base 1..9485: mod_base = OTHER; note = Each t is m1f
  source 1..9485: mol_type = other RNA

SEQ ID NO: 18474 - RNA, 9485 nt, synthetic construct; identical to SEQ ID NO: 16877
  modified_base 1..9485: mod_base = OTHER; note = Each t is m1f
  source 1..9485: mol_type = other RNA

SEQ ID NO: 18475 - RNA, 9485 nt, synthetic construct; identical to SEQ ID NO: 16878
  modified_base 1..9485: mod_base = OTHER; note = Each t is m1f
  source 1..9485: mol_type = other RNA

SEQ ID NO: 18476 - RNA, 9485 nt, synthetic construct; identical to SEQ ID NO: 16879
  modified_base 1..9485: mod_base = OTHER; note = Each t is m1f
  source 1..9485: mol_type = other RNA

SEQ ID NO: 18477 - RNA, 9485 nt, synthetic construct; identical to SEQ ID NO: 16880
  modified_base 1..9485: mod_base = OTHER; note = Each t is m1f
  source 1..9485: mol_type = other RNA

SEQ ID NO: 18478 - RNA, 9485 nt, synthetic construct; identical to SEQ ID NO: 16881
  modified_base 1..9485: mod_base = OTHER; note = Each t is m1f
  source 1..9485: mol_type = other RNA

SEQ ID NO: 18479 - RNA, 9485 nt, synthetic construct; identical to SEQ ID NO: 16882
  modified_base 1..9485: mod_base = OTHER; note = Each t is m1f
  source 1..9485: mol_type = other RNA

SEQ ID NO: 18480 - RNA, 9485 nt, synthetic construct; identical to SEQ ID NO: 16883
  modified_base 1..9485: mod_base = OTHER; note = Each t is m1f
  source 1..9485: mol_type = other RNA

SEQ ID NO: 18481 - RNA, 9485 nt, synthetic construct; identical to SEQ ID NO: 16884
  modified_base 1..9485: mod_base = OTHER; note = Each t is m1f
  source 1..9485: mol_type = other RNA

SEQ ID NO: 18482 - RNA, 9485 nt, synthetic construct; identical to SEQ ID NO: 16885
  modified_base 1..9485: mod_base = OTHER; note = Each t is m1f
  source 1..9485: mol_type = other RNA

SEQ ID NO: 18483 - RNA, 9485 nt, synthetic construct; identical to SEQ ID NO: 16886
  modified_base 1..9485: mod_base = OTHER; note = Each t is m1f
  source 1..9485: mol_type = other RNA

SEQ ID NO: 18484 - RNA, 9521 nt, synthetic construct; identical to SEQ ID NO: 16887
  modified_base 1..9521: mod_base = OTHER; note = Each t is m1f
  source 1..9521: mol_type = other RNA

SEQ ID NO: 18485 - RNA, 9503 nt, synthetic construct; identical to SEQ ID NO: 16888
  modified_base 1..9503: mod_base = OTHER; note = Each t is m1f
  source 1..9503: mol_type = other RNA

SEQ ID NO: 18486 - RNA, 9485 nt, synthetic construct; identical to SEQ ID NO: 16889
  modified_base 1..9485: mod_base = OTHER; note = Each t is m1f
  source 1..9485: mol_type = other RNA

SEQ ID NO: 18487 - RNA, 9485 nt, synthetic construct; identical to SEQ ID NO: 16890
  modified_base 1..9485: mod_base = OTHER; note = Each t is m1f
  source 1..9485: mol_type = other RNA

SEQ ID NO: 18488 - RNA, 9485 nt, synthetic construct; identical to SEQ ID NO: 16891
  modified_base 1..9485: mod_base = OTHER; note = Each t is m1f
  source 1..9485: mol_type = other RNA

SEQ ID NO: 18489 - RNA, 9545 nt, synthetic construct; identical to SEQ ID NO: 16892
  modified_base 1..9545: mod_base = OTHER; note = Each t is m1f
  source 1..9545: mol_type = other RNA

SEQ ID NO: 18490 - RNA, 9581 nt, synthetic construct; identical to SEQ ID NO: 16893
  modified_base 1..9581: mod_base = OTHER; note = Each t is m1f
  source 1..9581: mol_type = other RNA

SEQ ID NO: 18491 - RNA, 9485 nt, synthetic construct
  source 1..9485: mol_type = other RNA
aggaaataagagagaaaagaagagtaagaagaaatataagagccaccatggcccctaagaagaagcgtaaagtgagccggatggaacgcctcgtctacgaggtgcggcagaagtgcagaaacatcgaggacatctgcatctcctgcggatctctgaacgtgaccctggagcacccactgttcatcggcggcatgtgccagaactgtaaaaactgttttctggagtgtgcctatcaatacgacgatgacggctaccagagctactgcaccatctgttgcggcggaagagaggtgctgatgtgtggaaataacaactgctgccggtgcttctgcgtggaatgcgtggacctgctggtgggccccggcgccgcccaggccgctattaaggaagatccttggaactgctacatgtgcggccacaagggcacatacggcctgctgagacggagagaggactggcctagcagactgcagatgttcttcgccaataaccacgaccaggagttcgacccccctaaggtgtaccctcccgtccccgccgagaagagaaagcccatccgggtcctgagcctgttcgatggcatcgccaccggtctgctggtgctgaaggacctgggcatccaggtggataggtacattgcctccgaggtgtgcgaggactccatcaccgtgggaatggtgcgtcatcagggcaagatcatgtacgtgggcgacgtgcggagcgtgacacagaagcatatccaggagtggggccctttcgacctggtgatcggcggcagcccttgcaatgacctgagcatcgtgaacccagcccggaagggcctgtacgagggaaccggcagactgttcttcgagttttacagactgctgcacgacgcccggcctaaggaaggcgacgaccggcccttcttttggctgttcgagaatgtggtggccatgggagtcagcgacaagcgggatattagccggttcctggagagcaaccccgtgatgatcgatgccaaggaagtgagcgccgcccaccgggccagatacttctggggcaatctgcctggcatgaacagacccctggccagcaccgtgaacgacaagctggagctgcaggagtgcctggagcacggccggatcgccaagttcagcaaggtgagaaccatcaccacccgaagcaacagcatcaaacaaggcaaggaccagcactttcctgtgttcatgaacgagaaggaggacatcctgtggtgtaccgagatggagagagtgttcgggttcccagtccactacacagatgtcagcaacatgtctagactggccagacagagactgctgggaagaagctggtccgtccctgtgatcagacacctgttcgcccctctgaaggagtacttcgcctgcgtgagcagcggcaacagcaacgccaacagccggggccccagcttctctagcggcctggtgccactgtccctgagagggagccacatgggccccatggagatctacaaaaccgtgagcgcctggaagcggcagcctgtgcgcgtgctgagcctgtttcggaatatcgataaagtcctgaaaagcctgggattcctggagagcggctctggctccggcggtggcaccctgaagtacgtggaggatgtgacaaacgtggtcagacgggatgtggagaagtggggccccttcgatctggtgtacggcagcacccaacccctgggcagctcttgtgaccggtgccctggctggtacatgtttcagttccaccggatcctgcagtacgccctgccgagacaggagtcccagcggccattcttttggattttcatggacaacttgctgctgaccgaggatgaccaggaaactaccactcggttcctgcagaccgaagccgtgaccctgcaggacgtgagaggccgggactaccagaacgccatgcgggtgtggtccaacatccctggactgaaaagcaagcacgcacctctgacccctaaagaagaggagtacctgcaggcccaggtgcggagcagaagcaagctggacgcccctaaggtggatctgctggtgaagaattgcctcctgcccctgagagagtacttcaagtatttcagccagaatagtctgcccctgggaggcagcggcggcggcgccctggtgacatttgaggacgtcgccgtgcggttcacccaggaggaatgggctctgctggatccttctcagaaaatcctgtaccgggacgtgatgagagagacataccggaatctgacctccgtgggcatcaactgggaatgttgggaccttgaagcctgcttcagaagcctgggaagaaacctgagagtgcaggtggtgaagagaaagtgcgagctgaccaacagcggcccctgcgccgagggcggcccaagcagcggcgcccctcctcccagcggcggcagcccagccggctccccaacctctaccgaggagggcacctctgagtccgccacccccgagagcggccctggcacctccaccgagcccagcgagggcagcgcacccggcagccctgccggcagccccacctccacagaggagggaaccagcaccgagcccagcgaaggcagcgccccaggcaccagcaccgagcctagtgagcaggagattaaacggatcaacaagatcagaagaagacttgtgaaagacagcaacaccaagaaggccggcaagacaggccccatgaaaaccctgctggttagagtgatgacacccgatctgagagagcggctggaaaacctgagaaagaagcctgaaaatatcccccagcccatcagcaatacatctagagccaacctgaataagctgctgaccgattacaccgaaatgaagaaggcgatcctgcatgtgtactgggaagagttccagaaggaccctgtgggcctgatgagccgggtggcccagcctgccagcaagaagatcgatcagaacaagctgaaacctgagatggacgagaagggcaacctgaccaccgccggctttgcctgctctcagtgtggccagcccctgttcgtgtacaagctggagcaggtgtctgagaagggcaaggcttacaccaactacttcggacggtgcaatgtggccgagcacgaaaagctgatcctgctggcccagctgaagcccgagaaggatagcgacgaagccgtgacatatagcctgggaaagtttgggcagagggccctggatttctacagcattcatgtgaccaaggagtccacccaccccgtgaagcccctggcccagatcgccggaaacagatacgcctccggacctgtgggaaaggccctgagcgacgcatgtatgggcacaatcgcctccttcctgtctaagtaccaggacatcatcatcgaacaccagaaggtggtgaagggcaaccagaagagactggagagcctgcgggagctggccggcaaggaaaacctggaataccctagcgtgaccctgccacctcagcctcacaccaaggagggcgttgatgcctacaacgaagtgatcgcccgggtgcgaatgtgggtgaacctgaacctgtggcagaagctgaagctaagcagagatgatgccaagcctctgctgagactgaagggattcccttcctttcctctggtcgagagacaggccaacgaagtggactggtgggacatggtgtgtaacgtgaagaagctgatcaacgagaaaaaggaggatggcaaggtgttttggcagaatctggctggctacaagagacaggaagccctgagaccatacctgagcagcgaggaagatcggaagaagggaaagaaattcgctcggtaccagctgggcgacctgctgctgcacctggaaaagaagcacggcgaggactggggaaaggtgtacgacgaggcctgggagcggattgacaagaaagtggaaggcctgagcaagcacatcaagctggaagaggaacggagaagcgaggacgcccagagcaaggccgccctgaccgactggctgcgggctaaggccagcttcgtgatcgagggcctgaaggaggccgacaaggacgagttctgcagatgcgagctgaagctgcagaagtggtacggggacctgcggggaaagcccttcgccatcgaagccgagaacagcatcctggacatcagcggcttcagcaagcagtacaactgtgccttcatctggcagaaggacggcgtgaagaagctgaacctgtacctgatcatcaactacttcaagggcggcaagctgcggttcaagaagatcaaacctgaagccttcgaagccaacagattctacaccgtgatcaacaaaaagagcggcgagatcgtgcccatggaggtgaacttcaacttcgacgaccccaacctgatcatcctgcctctggcctttggcaagagacagggcagagaattcatctggaacgacctgctgtccctggaaaccggcagcctgaagctggccaacggaagagtgatcgagaagacactgtacaacagaagaacccggcaggatgagcctgccctgttcgtggccctgaccttcgagcggcgggaggtcctggactcctccaatatcaaaccaatgaacctgatcggcgtggcaagaggcgaaaacatccccgccgtgatcgccctgaccgaccccgagggctgcccactgagccggtttaaggatagcctgggaaacccaacccacatcctgagaatcggcgagagctataaggagaagcagcggaccatccaggccaagaaggaggtggagcagcggagagccggcggctacagccggaagtacgccagcaaagccaagaatctggcagacgatatggtgagaaacaccgctagagatctgctgtactacgccgtgacccaggatgccatgctgatcttcgccaacctgagccggggcttcggccggcagggcaagcggaccttcatggccgagagacagtacacacggatggaggactggctgaccgccaagctggcctacgagggcctgagcaagacctacctgtccaagacactggcccagtacacctccaagacatgcagcaactgtgggtttaccatcaccagcgccgactacgacagggtgctggagaagctgaagaagacagcaacaggctggatgaccacaattaacggcaaggagctgaaggtggagggccagattacctactacaacagatacaagagacagaacgtagtcaaggacctgtccgtcgagctggatagactgagcgaagaatctgtgaacaacgacatctcctcctggacaaagggcagaagcggagaagctctgagcctcctgaagaaaagattctcccatagacccgtgcaggagaagttcgtgtgcctgaactgcggcttcgagacacacgcagccgagcaagccgccctgaacatcgccagatcctggctgttcctgcggagccaggagtacaagaaataccagacaaacaagacaaccggcaacaccgataagagagccttcgtcgagacctggcagtccttttaccggaagaagcttaaggaggtgtggaaacctgccgtgcggtctggcggatctggcggaggctccgccctggtgacatttgaggacgtcgccgtgcggttcacccaggaggaatgggctctgctggatccttctcagaaaatcctgtaccgggacgtgatgagagagacataccggaatctgacctccgtgggcatcaactgggaatgttgggaccttgaagcctgcttcagaagcctgggaagaaacctgagagtgcaggtggtgaagagaaagtgcgagctgaccaacagcggcccctgcgccgagggcggcccaagcagcggcgcccctcctcccagcggcggcagcccagccggctccccaacctctaccgaggagggcacctctgagtccgccacccccgagagcggccctggcacctccaccgagcccagcgagggcagcgcacccggcagccctgccggcagccccacctccacagaggagggaaccagcaccgagcccagcgaaggcagcgccccaggcaccagcaccgagcctagtgagcaggagattaaacggatcaacaagatcagaagaagacttgtgaaagacagcaacaccaagaaggccggcaagacaggccccatgaaaaccctgctggttagagtgatgacacccgatctgagagagcggctggaaaacctgagaaagaagcctgaaaatatcccccagcccatcagcaatacatctagagccaacctgaataagctgctgaccgattacaccgaaatgaagaaggcgatcctgcatgtgtactgggaagagttccagaaggaccctgtgggcctgatgagccgggtggcccagcctgccagcaagaagatcgatcagaacaagctgaaacctgagatggacgagaagggcaacctgaccaccgccggctttgcctgctctcagtgtggccagcccctgttcgtgtacaagctggagcaggtgtctgagaagggcaaggcttacaccaactacttcggacggtgcaatgtggccgagcacgaaaagctgatcctgctggcccagctgaagcccgagaaggatagcgacgaagccgtgacatatagcctgggaaagtttgggcagagggccctggatttctacagcattcatgtgaccaaggagtccacccaccccgtgaagcccctggcccagatcgccggaaacagatacgcctccggacctgtgggaaaggccctgagcgacgcatgtatgggcacaatcgcctccttcctgtctaagtaccaggacatcatcatcgaacaccagaaggtggtgaagggcaaccagaagagactggagagcctgcgggagctggccggcaaggaaaacctggaataccctagcgtgaccctgccacctcagcctcacaccaaggagggcgttgatgcctacaacgaagtgatcgcccgggtgcgaatgtgggtgaacctgaacctgtggcagaagctgaagctaagcagagatgatgccaagcctctgctgagactgaagggattcccttcctttcctctggtcgagagacaggccaacgaagtggactggtgggacatggtgtgtaacgtgaagaagctgatcaacgagaaaaaggaggatggcaaggtgttttggcagaatctggctggctacaagagacaggaagccctgagaccatacctgagcagcgaggaagatcggaagaagggaaagaaattcgctcggtaccagctgggcgacctgctgctgcacctggaaaagaagcacggcgaggactggggaaaggtgtacgacgaggcctgggagcggattgacaagaaagtggaaggcctgagcaagcacatcaagctggaagaggaacggagaagcgaggacgcccagagcaaggccgccctgaccgactggctgcgggctaaggccagcttcgtgatcgagggcctgaaggaggccgacaaggacgagttctgcagatgcgagctgaagctgcagaagtggtacggggacctgcggggaaagcccttcgccatcgaagccgagaacagcatcctggacatcagcggcttcagcaagcagtacaactgtgccttcatctggcagaaggacggcgtgaagaagctgaacctgtacctgatcatcaactacttcaagggcggcaagctgcggttcaagaagatcaaacctgaagccttcgaagccaacagattctacaccgtgatcaacaaaaagagcggcgagatcgtgcccatggaggtgaacttcaacttcgacgaccccaacctgatcatcctgcctctggcctttggcaagagacagggcagagaattcatctggaacgacctgctgtccctggaaaccggcagcctgaagctggccaacggaagagtgatcgagaagacactgtacaacagaagaacccggcaggatgagcctgccctgttcgtggccctgaccttcgagcggcgggaggtcctggactcctccaatatcaaaccaatgaacctgatcggcgtggcaagaggcgaaaacatccccgccgtgatcgccctgaccgaccccgagggctgcccactgagccggtttaaggatagcctgggaaacccaacccacatcctgagaatcggcgagagctataaggagaagcagcggaccatccaggccaagaaggaggtggagcagcggagagccggcggctacagccggaagtacgccagcaaagccaagaatctggcagacgatatggtgagaaacaccgctagagatctgctgtactacgccgtgacccaggatgccatgctgatcttcgccaacctgagccggggcttcggccggcagggcaagcggaccttcatggccgagagacagtacacacggatggaggactggctgaccgccaagctggcctacgagggcctgagcaagacctacctgtccaagacactggcccagtacacctccaagacatgcagcaactgtgggtttaccatcaccagcgccgactacgacagggtgctggagaagctgaagaagacagcaacaggctggatgaccacaattaacggcaaggagctgaaggtggagggccagattacctactacaacagatacaagagacagaacgtagtcaaggacctgtccgtcgagctggatagactgagcgaagaatctgtgaacaacgacatctcctcctggacaaagggcagaagcggagaagctctgagcctcctgaagaaaagattctcccatagacccgtgcaggagaagttcgtgtgcctgaactgcggcttcgagacacacgcagccgagcaagccgccctgaacatcgccagatcctggctgttcctgcggagccaggagtacaagaaataccagacaaacaagacaaccggcaacaccgataagagagccttcgtcgagacctggcagtccttttaccggaagaagcttaaggaggtgtggaaacctgccgtgcggtctggcggatctggcggaggctccttctacacctgtgaccttcgaggatgtggtggtctacttcaccgccgctgagtgggtgcacctgacaaactggcaaagagatttttatcaggccgtgatgatggaaacctacgagctggtggccagcgtggctggcgacggcgttccaatggccgaggacgaggaaggcggagtggaaagacccgtgtggcagtacatccccagaggcaagcggcggagaaagacccctcagcctcgcgccgacggatctggctccggcagcggccccaagaaaaagagaaaagtctaagctgccttctgcggggcttgccttctggccatgcccttcttctctcccttgcacctgtacctcttggtctttgaataaagcctgagtaggaaggctagcaaaaaaaaaaaaaaaaaaaaaaaaaaaaaaaaaaaaaaaaaaaaaaaaaaaaaaaaaaaaaaaaaaaaaaaaaaaaaaaa

SEQ ID NO: 18492 - RNA, 9485 nt, synthetic construct
  source 1..9485: mol_type = other RNA
aggaaataagagagaaaagaagagtaagaagaaatataagagccaccatggcccctaagaagaagcgtaaagtgagccggatggaacgcctcgtctacgaggtgcggcagaagtgcagaaacatcgaggacatctgcatctcctgcggatctctgaacgtgaccctggagcacccactgttcatcggcggcatgtgccagaactgtaaaaactgttttctggagtgtgcctatcaatacgacgatgacggctaccagagctactgcaccatctgttgcggcggaagagaggtgctgatgtgtggaaataacaactgctgccggtgcttctgcgtggaatgcgtggacctgctggtgggccccggcgccgcccaggccgctattaaggaagatccttggaactgctacatgtgcggccacaagggcacatacggcctgctgagacggagagaggactggcctagcagactgcagatgttcttcgccaataaccacgaccaggagttcgacccccctaaggtgtaccctcccgtccccgccgagaagagaaagcccatccgggtcctgagcctgttcgatggcatcgccaccggtctgctggtgctgaaggacctgggcatccaggtggataggtacattgcctccgaggtgtgcgaggactccatcaccgtgggaatggtgcgtcatcagggcaagatcatgtacgtgggcgacgtgcggagcgtgacacagaagcatatccaggagtggggccctttcgacctggtgatcggcggcagcccttgcaatgacctgagcatcgtgaacccagcccggaagggcctgtacgagggaaccggcagactgttcttcgagttttacagactgctgcacgacgcccggcctaaggaaggcgacgaccggcccttcttttggctgttcgagaatgtggtggccatgggagtcagcgacaagcgggatattagccggttcctggagagcaaccccgtgatgatcgatgccaaggaagtgagcgccgcccaccgggccagatacttctggggcaatctgcctggcatgaacagacccctggccagcaccgtgaacgacaagctggagctgcaggagtgcctggagcacggccggatcgccaagttcagcaaggtgagaaccatcaccacccgaagcaacagcatcaaacaaggcaaggaccagcactttcctgtgttcatgaacgagaaggaggacatcctgtggtgtaccgagatggagagagtgttcgggttcccagtccactacacagatgtcagcaacatgtctagactggccagacagagactgctgggaagaagctggtccgtccctgtgatcagacacctgttcgcccctctgaaggagtacttcgcctgcgtgagcagcggcaacagcaacgccaacagccggggccccagcttctctagcggcctggtgccactgtccctgagagggagccacatgggccccatggagatctacaaaaccgtgagcgcctggaagcggcagcctgtgcgcgtgctgagcctgtttcggaatatcgataaagtcctgaaaagcctgggattcctggagagcggctctggctccggcggtggcaccctgaagtacgtggaggatgtgacaaacgtggtcagacgggatgtggagaagtggggccccttcgatctggtgtacggcagcacccaacccctgggcagctcttgtgaccggtgccctggctggtacatgtttcagttccaccggatcctgcagtacgccctgccgagacaggagtcccagcggccattcttttggattttcatggacaacttgctgctgaccgaggatgaccaggaaactaccactcggttcctgcagaccgaagccgtgaccctgcaggacgtgagaggccgggactaccagaacgccatgcgggtgtggtccaacatccctggactgaaaagcaagcacgcacctctgacccctaaagaagaggagtacctgcaggcccaggtgcggagcagaagcaagctggacgcccctaaggtggatctgctggtgaagaattgcctcctgcccctgagagagtacttcaagtatttcagccagaatagtctgcccctgggaggcagcggcggcggcgccctggtgacatttgaggacgtcgccgtgcggttcacccaggaggaatgggctctgctggatccttctcagaaaatcctgtaccgggacgtgatgagagagacataccggaatctgacctccgtgggcatcaactgggaatgttgggaccttgaagcctgcttcagaagcctgggaagaaacctgagagtgcaggtggtgaagagaaagtgcgagctgaccaacagcggcccctgcgccgagggcggcccaagcagcggcgcccctcctcccagcggcggcagcccagccggctccccaacctctaccgaggagggcacctctgagtccgccacccccgagagcggccctggcacctccaccgagcccagcgagggcagcgcacccggcagccctgccggcagccccacctccacagaggagggaaccagcaccgagcccagcgaaggcagcgccccaggcaccagcaccgagcctagtgagcaggagattaaacggatcaacaagatcagaagaagacttgtgaaagacagcaacaccaagaaggccggcaagacaggccccatgaaaaccctgctggttagagtgatgacacccgatctgagagagcggctggaaaacctgagaaagaagcctgaaaatatcccccagcccatcagcaatacatctagagccaacctgaataagctgctgaccgattacaccgaaatgaagaaggcgatcctgcatgtgtactgggaagagttccagaaggaccctgtgggcctgatgagccgggtggcccagcctgccagcaagaagatcgatcagaacaagctgaaacctgagatggacgagaagggcaacctgaccaccgccggctttgcctgctctcagtgtggccagcccctgttcgtgtacaagctggagcaggtgtctgagaagggcaaggcttacaccaactacttcggacggtgcaatgtggccgagcacgaaaagctgatcctgctggcccagctgaagcccgagaaggatagcgacgaagccgtgacatatagcctgggaaagtttgggcagagggccctggatttctacagcattcatgtgaccaaggagtccacccaccccgtgaagcccctggcccagatcgccggaaacagatacgcctccggacctgtgggaaaggccctgagcgacgcatgtatgggcacaatcgcctccttcctgtctaagtaccaggacatcatcatcgaacaccagaaggtggtgaagggcaaccagaagagactggagagcctgcgggagctggccggcaaggaaaacctggaataccctagcgtgaccctgccacctcagcctcacaccaaggagggcgttgatgcctacaacgaagtgatcgcccgggtgcgaatgtgggtgaacctgaacctgtggcagaagctgaagctaagcagagatgatgccaagcctctgctgagactgaagggattcccttcctttcctctggtcgagagacaggccaacgaagtggactggtgggacatggtgtgtaacgtgaagaagctgatcaacgagaaaaaggaggatggcaaggtgttttggcagaatctggctggctacaagagacaggaagccctgagaccatacctgagcagcgaggaagatcggaagaagggaaagaaattcgctcggtaccagctgggcgacctgctgctgcacctggaaaagaagcacggcgaggactggggaaaggtgtacgacgaggcctgggagcggattgacaagaaagtggaaggcctgagcaagcacatcaagctggaagaggaacggagaagcgaggacgcccagagcaaggccgccctgaccgactggctgcgggctaaggccagcttcgtgatcgagggcctgaaggaggccgacaaggacgagttctgcagatgcgagctgaagctgcagaagtggtacggggacctgcggggaaagcccttcgccatcgaagccgagaacagcatcctggacatcagcggcttcagcaagcagtacaactgtgccttcatctggcagaaggacggcgtgaagaagctgaacctgtacctgatcatcaactacttcaagggcggcaagctgcggttcaagaagatcaaacctgaagccttcgaagccaacagattctacaccgtgatcaacaaaaagagcggcgagatcgtgcccatggaggtgaacttcaacttcgacgaccccaacctgatcatcctgcctctggcctttggcaagagacagggcagagaattcatctggaacgacctgctgtccctggaaaccggcagcctgaagctggccaacggaagagtgatcgagaagacactgtacaacagaagaacccggcaggatgagcctgccctgttcgtggccctgaccttcgagcggcgggaggtcctggactcctccaatatcaaaccaatgaacctgatcggcgtggcaagaggcgaaaacatccccgccgtgatcgccctgaccgaccccgagggctgcccactgagccggtttaaggatagcctgggaaacccaacccacatcctgagaatcggcgagagctataaggagaagcagcggaccatccaggccaagaaggaggtggagcagcggagagccggcggctacagccggaagtacgccagcaaagccaagaatctggcagacgatatggtgagaaacaccgctagagatctgctgtactacgccgtgacccaggatgccatgctgatcttcgccaacctgagccggggcttcggccggcagggcaagcggaccttcatggccgagagacagtacacacggatggaggactggctgaccgccaagctggcctacgagggcctgagcaagacctacctgtccaagacactggcccagtacacctccaagacatgcagcaactgtgggtttaccatcaccagcgccgactacgacagggtgctggagaagctgaagaagacagcaacaggctggatgaccacaattaacggcaaggagctgaaggtggagggccagattacctactacaacagatacaagagacagaacgtagtcaaggacctgtccgtcgagctggatagactgagcgaagaatctgtgaacaacgacatctcctcctggacaaagggcagaagcggagaagctctgagcctcctgaagaaaagattctcccatagacccgtgcaggagaagttcgtgtgcctgaactgcggcttcgagacacacgcagccgagcaagccgccctgaacatcgccagatcctggctgttcctgcggagccaggagtacaagaaataccagacaaacaagacaaccggcaacaccgataagagagccttcgtcgagacctggcagtccttttaccggaagaagcttaaggaggtgtggaaacctgccgtgcggtctggcggatctggcggaggctccgccctggtgacatttgaggacgtcgccgtgcggttcacccaggaggaatgggctctgctggatccttctcagaaaatcctgtaccgggacgtgatgagagagacataccggaatctgacctccgtgggcatcaactgggaatgttgggaccttgaagcctgcttcagaagcctgggaagaaacctgagagtgcaggtggtgaagagaaagtgcgagctgaccaacagcggcccctgcgccgagggcggcccaagcagcggcgcccctcctcccagcggcggcagcccagccggctccccaacctctaccgaggagggcacctctgagtccgccacccccgagagcggccctggcacctccaccgagcccagcgagggcagcgcacccggcagccctgccggcagccccacctccacagaggagggaaccagcaccgagcccagcgaaggcagcgccccaggcaccagcaccgagcctagtgagcaggagattaaacggatcaacaagatcagaagaagacttgtgaaagacagcaacaccaagaaggccggcaagacaggccccatgaaaaccctgctggttagagtgatgacacccgatctgagagagcggctggaaaacctgagaaagaagcctgaaaatatcccccagcccatcagcaatacatctagagccaacctgaataagctgctgaccgattacaccgaaatgaagaaggcgatcctgcatgtgtactgggaagagttccagaaggaccctgtgggcctgatgagccgggtggcccagcctgccagcaagaagatcgatcagaacaagctgaaacctgagatggacgagaagggcaacctgaccaccgccggctttgcctgctctcagtgtggccagcccctgttcgtgtacaagctggagcaggtgtctgagaagggcaaggcttacaccaactacttcggacggtgcaatgtggccgagcacgaaaagctgatcctgctggcccagctgaagcccgagaaggatagcgacgaagccgtgacatatagcctgggaaagtttgggcagagggccctggatttctacagcattcatgtgaccaaggagtccacccaccccgtgaagcccctggcccagatcgccggaaacagatacgcctccggacctgtgggaaaggccctgagcgacgcatgtatgggcacaatcgcctccttcctgtctaagtaccaggacatcatcatcgaacaccagaaggtggtgaagggcaaccagaagagactggagagcctgcgggagctggccggcaaggaaaacctggaataccctagcgtgaccctgccacctcagcctcacaccaaggagggcgttgatgcctacaacgaagtgatcgcccgggtgcgaatgtgggtgaacctgaacctgtggcagaagctgaagctaagcagagatgatgccaagcctctgctgagactgaagggattcccttcctttcctctggtcgagagacaggccaacgaagtggactggtgggacatggtgtgtaacgtgaagaagctgatcaacgagaaaaaggaggatggcaaggtgttttggcagaatctggctggctacaagagacaggaagccctgagaccatacctgagcagcgaggaagatcggaagaagggaaagaaattcgctcggtaccagctgggcgacctgctgctgcacctggaaaagaagcacggcgaggactggggaaaggtgtacgacgaggcctgggagcggattgacaagaaagtggaaggcctgagcaagcacatcaagctggaagaggaacggagaagcgaggacgcccagagcaaggccgccctgaccgactggctgcgggctaaggccagcttcgtgatcgagggcctgaaggaggccgacaaggacgagttctgcagatgcgagctgaagctgcagaagtggtacggggacctgcggggaaagcccttcgccatcgaagccgagaacagcatcctggacatcagcggcttcagcaagcagtacaactgtgccttcatctggcagaaggacggcgtgaagaagctgaacctgtacctgatcatcaactacttcaagggcggcaagctgcggttcaagaagatcaaacctgaagccttcgaagccaacagattctacaccgtgatcaacaaaaagagcggcgagatcgtgcccatggaggtgaacttcaacttcgacgaccccaacctgatcatcctgcctctggcctttggcaagagacagggcagagaattcatctggaacgacctgctgtccctggaaaccggcagcctgaagctggccaacggaagagtgatcgagaagacactgtacaacagaagaacccggcaggatgagcctgccctgttcgtggccctgaccttcgagcggcgggaggtcctggactcctccaatatcaaaccaatgaacctgatcggcgtggcaagaggcgaaaacatccccgccgtgatcgccctgaccgaccccgagggctgcccactgagccggtttaaggatagcctgggaaacccaacccacatcctgagaatcggcgagagctataaggagaagcagcggaccatccaggccaagaaggaggtggagcagcggagagccggcggctacagccggaagtacgccagcaaagccaagaatctggcagacgatatggtgagaaacaccgctagagatctgctgtactacgccgtgacccaggatgccatgctgatcttcgccaacctgagccggggcttcggccggcagggcaagcggaccttcatggccgagagacagtacacacggatggaggactggctgaccgccaagctggcctacgagggcctgagcaagacctacctgtccaagacactggcccagtacacctccaagacatgcagcaactgtgggtttaccatcaccagcgccgactacgacagggtgctggagaagctgaagaagacagcaacaggctggatgaccacaattaacggcaaggagctgaaggtggagggccagattacctactacaacagatacaagagacagaacgtagtcaaggacctgtccgtcgagctggatagactgagcgaagaatctgtgaacaacgacatctcctcctggacaaagggcagaagcggagaagctctgagcctcctgaagaaaagattctcccatagacccgtgcaggagaagttcgtgtgcctgaactgcggcttcgagacacacgcagccgagcaagccgccctgaacatcgccagatcctggctgttcctgcggagccaggagtacaagaaataccagacaaacaagacaaccggcaacaccgataagagagccttcgtcgagacctggcagtccttttaccggaagaagcttaaggaggtgtggaaacctgccgtgcggtctggcggatctggcggaggctcctcaggacgtggtgacattcaaggacgtcgccatctacttcagccctgaggaatgggtgcggctgagcgccggacagagagaactgtaccaggaggtgatgctggacaactacgagctggtgaccagcctggatagagagagcaaactgctgtataagatggaccccgaggaagaaagctgcgagggcgtgccatacagctctgccgacagcggcgcccctgatagctcctccacctctgcttgtggatctggctccggcagcggccccaagaaaaagagaaaagtctaagctgccttctgcggggcttgccttctggccatgcccttcttctctcccttgcacctgtacctcttggtctttgaataaagcctgagtaggaaggctagcaaaaaaaaaaaaaaaaaaaaaaaaaaaaaaaaaaaaaaaaaaaaaaaaaaaaaaaaaaaaaaaaaaaaaaaaaaaaaaaa

SEQ ID NO: 18493 - RNA, 9512 nt, synthetic construct
  source 1..9512: mol_type = other RNA
aggaaataagagagaaaagaagagtaagaagaaatataagagccaccatggcccctaagaagaagcgtaaagtgagccggatggaacgcctcgtctacgaggtgcggcagaagtgcagaaacatcgaggacatctgcatctcctgcggatctctgaacgtgaccctggagcacccactgttcatcggcggcatgtgccagaactgtaaaaactgttttctggagtgtgcctatcaatacgacgatgacggctaccagagctactgcaccatctgttgcggcggaagagaggtgctgatgtgtggaaataacaactgctgccggtgcttctgcgtggaatgcgtggacctgctggtgggccccggcgccgcccaggccgctattaaggaagatccttggaactgctacatgtgcggccacaagggcacatacggcctgctgagacggagagaggactggcctagcagactgcagatgttcttcgccaataaccacgaccaggagttcgacccccctaaggtgtaccctcccgtccccgccgagaagagaaagcccatccgggtcctgagcctgttcgatggcatcgccaccggtctgctggtgctgaaggacctgggcatccaggtggataggtacattgcctccgaggtgtgcgaggactccatcaccgtgggaatggtgcgtcatcagggcaagatcatgtacgtgggcgacgtgcggagcgtgacacagaagcatatccaggagtggggccctttcgacctggtgatcggcggcagcccttgcaatgacctgagcatcgtgaacccagcccggaagggcctgtacgagggaaccggcagactgttcttcgagttttacagactgctgcacgacgcccggcctaaggaaggcgacgaccggcccttcttttggctgttcgagaatgtggtggccatgggagtcagcgacaagcgggatattagccggttcctggagagcaaccccgtgatgatcgatgccaaggaagtgagcgccgcccaccgggccagatacttctggggcaatctgcctggcatgaacagacccctggccagcaccgtgaacgacaagctggagctgcaggagtgcctggagcacggccggatcgccaagttcagcaaggtgagaaccatcaccacccgaagcaacagcatcaaacaaggcaaggaccagcactttcctgtgttcatgaacgagaaggaggacatcctgtggtgtaccgagatggagagagtgttcgggttcccagtccactacacagatgtcagcaacatgtctagactggccagacagagactgctgggaagaagctggtccgtccctgtgatcagacacctgttcgcccctctgaaggagtacttcgcctgcgtgagcagcggcaacagcaacgccaacagccggggccccagcttctctagcggcctggtgccactgtccctgagagggagccacatgggccccatggagatctacaaaaccgtgagcgcctggaagcggcagcctgtgcgcgtgctgagcctgtttcggaatatcgataaagtcctgaaaagcctgggattcctggagagcggctctggctccggcggtggcaccctgaagtacgtggaggatgtgacaaacgtggtcagacgggatgtggagaagtggggccccttcgatctggtgtacggcagcacccaacccctgggcagctcttgtgaccggtgccctggctggtacatgtttcagttccaccggatcctgcagtacgccctgccgagacaggagtcccagcggccattcttttggattttcatggacaacttgctgctgaccgaggatgaccaggaaactaccactcggttcctgcagaccgaagccgtgaccctgcaggacgtgagaggccgggactaccagaacgccatgcgggtgtggtccaacatccctggactgaaaagcaagcacgcacctctgacccctaaagaagaggagtacctgcaggcccaggtgcggagcagaagcaagctggacgcccctaaggtggatctgctggtgaagaattgcctcctgcccctgagagagtacttcaagtatttcagccagaatagtctgcccctgggaggcagcggcggcggcgccctggtgacatttgaggacgtcgccgtgcggttcacccaggaggaatgggctctgctggatccttctcagaaaatcctgtaccgggacgtgatgagagagacataccggaatctgacctccgtgggcatcaactgggaatgttgggaccttgaagcctgcttcagaagcctgggaagaaacctgagagtgcaggtggtgaagagaaagtgcgagctgaccaacagcggcccctgcgccgagggcggcccaagcagcggcgcccctcctcccagcggcggcagcccagccggctccccaacctctaccgaggagggcacctctgagtccgccacccccgagagcggccctggcacctccaccgagcccagcgagggcagcgcacccggcagccctgccggcagccccacctccacagaggagggaaccagcaccgagcccagcgaaggcagcgccccaggcaccagcaccgagcctagtgagcaggagattaaacggatcaacaagatcagaagaagacttgtgaaagacagcaacaccaagaaggccggcaagacaggccccatgaaaaccctgctggttagagtgatgacacccgatctgagagagcggctggaaaacctgagaaagaagcctgaaaatatcccccagcccatcagcaatacatctagagccaacctgaataagctgctgaccgattacaccgaaatgaagaaggcgatcctgcatgtgtactgggaagagttccagaaggaccctgtgggcctgatgagccgggtggcccagcctgccagcaagaagatcgatcagaacaagctgaaacctgagatggacgagaagggcaacctgaccaccgccggctttgcctgctctcagtgtggccagcccctgttcgtgtacaagctggagcaggtgtctgagaagggcaaggcttacaccaactacttcggacggtgcaatgtggccgagcacgaaaagctgatcctgctggcccagctgaagcccgagaaggatagcgacgaagccgtgacatatagcctgggaaagtttgggcagagggccctggatttctacagcattcatgtgaccaaggagtccacccaccccgtgaagcccctggcccagatcgccggaaacagatacgcctccggacctgtgggaaaggccctgagcgacgcatgtatgggcacaatcgcctccttcctgtctaagtaccaggacatcatcatcgaacaccagaaggtggtgaagggcaaccagaagagactggagagcctgcgggagctggccggcaaggaaaacctggaataccctagcgtgaccctgccacctcagcctcacaccaaggagggcgttgatgcctacaacgaagtgatcgcccgggtgcgaatgtgggtgaacctgaacctgtggcagaagctgaagctaagcagagatgatgccaagcctctgctgagactgaagggattcccttcctttcctctggtcgagagacaggccaacgaagtggactggtgggacatggtgtgtaacgtgaagaagctgatcaacgagaaaaaggaggatggcaaggtgttttggcagaatctggctggctacaagagacaggaagccctgagaccatacctgagcagcgaggaagatcggaagaagggaaagaaattcgctcggtaccagctgggcgacctgctgctgcacctggaaaagaagcacggcgaggactggggaaaggtgtacgacgaggcctgggagcggattgacaagaaagtggaaggcctgagcaagcacatcaagctggaagaggaacggagaagcgaggacgcccagagcaaggccgccctgaccgactggctgcgggctaaggccagcttcgtgatcgagggcctgaaggaggccgacaaggacgagttctgcagatgcgagctgaagctgcagaagtggtacggggacctgcggggaaagcccttcgccatcgaagccgagaacagcatcctggacatcagcggcttcagcaagcagtacaactgtgccttcatctggcagaaggacggcgtgaagaagctgaacctgtacctgatcatcaactacttcaagggcggcaagctgcggttcaagaagatcaaacctgaagccttcgaagccaacagattctacaccgtgatcaacaaaaagagcggcgagatcgtgcccatggaggtgaacttcaacttcgacgaccccaacctgatcatcctgcctctggcctttggcaagagacagggcagagaattcatctggaacgacctgctgtccctggaaaccggcagcctgaagctggccaacggaagagtgatcgagaagacactgtacaacagaagaacccggcaggatgagcctgccctgttcgtggccctgaccttcgagcggcgggaggtcctggactcctccaatatcaaaccaatgaacctgatcggcgtggcaagaggcgaaaacatccccgccgtgatcgccctgaccgaccccgagggctgcccactgagccggtttaaggatagcctgggaaacccaacccacatcctgagaatcggcgagagctataaggagaagcagcggaccatccaggccaagaaggaggtggagcagcggagagccggcggctacagccggaagtacgccagcaaagccaagaatctggcagacgatatggtgagaaacaccgctagagatctgctgtactacgccgtgacccaggatgccatgctgatcttcgccaacctgagccggggcttcggccggcagggcaagcggaccttcatggccgagagacagtacacacggatggaggactggctgaccgccaagctggcctacgagggcctgagcaagacctacctgtccaagacactggcccagtacacctccaagacatgcagcaactgtgggtttaccatcaccagcgccgactacgacagggtgctggagaagctgaagaagacagcaacaggctggatgaccacaattaacggcaaggagctgaaggtggagggccagattacctactacaacagatacaagagacagaacgtagtcaaggacctgtccgtcgagctggatagactgagcgaagaatctgtgaacaacgacatctcctcctggacaaagggcagaagcggagaagctctgagcctcctgaagaaaagattctcccatagacccgtgcaggagaagttcgtgtgcctgaactgcggcttcgagacacacgcagccgagcaagccgccctgaacatcgccagatcctggctgttcctgcggagccaggagtacaagaaataccagacaaacaagacaaccggcaacaccgataagagagccttcgtcgagacctggcagtccttttaccggaagaagcttaaggaggtgtggaaacctgccgtgcggtctggcggatctggcggaggctccgccctggtgacatttgaggacgtcgccgtgcggttcacccaggaggaatgggctctgctggatccttctcagaaaatcctgtaccgggacgtgatgagagagacataccggaatctgacctccgtgggcatcaactgggaatgttgggaccttgaagcctgcttcagaagcctgggaagaaacctgagagtgcaggtggtgaagagaaagtgcgagctgaccaacagcggcccctgcgccgagggcggcccaagcagcggcgcccctcctcccagcggcggcagcccagccggctccccaacctctaccgaggagggcacctctgagtccgccacccccgagagcggccctggcacctccaccgagcccagcgagggcagcgcacccggcagccctgccggcagccccacctccacagaggagggaaccagcaccgagcccagcgaaggcagcgccccaggcaccagcaccgagcctagtgagcaggagattaaacggatcaacaagatcagaagaagacttgtgaaagacagcaacaccaagaaggccggcaagacaggccccatgaaaaccctgctggttagagtgatgacacccgatctgagagagcggctggaaaacctgagaaagaagcctgaaaatatcccccagcccatcagcaatacatctagagccaacctgaataagctgctgaccgattacaccgaaatgaagaaggcgatcctgcatgtgtactgggaagagttccagaaggaccctgtgggcctgatgagccgggtggcccagcctgccagcaagaagatcgatcagaacaagctgaaacctgagatggacgagaagggcaacctgaccaccgccggctttgcctgctctcagtgtggccagcccctgttcgtgtacaagctggagcaggtgtctgagaagggcaaggcttacaccaactacttcggacggtgcaatgtggccgagcacgaaaagctgatcctgctggcccagctgaagcccgagaaggatagcgacgaagccgtgacatatagcctgggaaagtttgggcagagggccctggatttctacagcattcatgtgaccaaggagtccacccaccccgtgaagcccctggcccagatcgccggaaacagatacgcctccggacctgtgggaaaggccctgagcgacgcatgtatgggcacaatcgcctccttcctgtctaagtaccaggacatcatcatcgaacaccagaaggtggtgaagggcaaccagaagagactggagagcctgcgggagctggccggcaaggaaaacctggaataccctagcgtgaccctgccacctcagcctcacaccaaggagggcgttgatgcctacaacgaagtgatcgcccgggtgcgaatgtgggtgaacctgaacctgtggcagaagctgaagctaagcagagatgatgccaagcctctgctgagactgaagggattcccttcctttcctctggtcgagagacaggccaacgaagtggactggtgggacatggtgtgtaacgtgaagaagctgatcaacgagaaaaaggaggatggcaaggtgttttggcagaatctggctggctacaagagacaggaagccctgagaccatacctgagcagcgaggaagatcggaagaagggaaagaaattcgctcggtaccagctgggcgacctgctgctgcacctggaaaagaagcacggcgaggactggggaaaggtgtacgacgaggcctgggagcggattgacaagaaagtggaaggcctgagcaagcacatcaagctggaagaggaacggagaagcgaggacgcccagagcaaggccgccctgaccgactggctgcgggctaaggccagcttcgtgatcgagggcctgaaggaggccgacaaggacgagttctgcagatgcgagctgaagctgcagaagtggtacggggacctgcggggaaagcccttcgccatcgaagccgagaacagcatcctggacatcagcggcttcagcaagcagtacaactgtgccttcatctggcagaaggacggcgtgaagaagctgaacctgtacctgatcatcaactacttcaagggcggcaagctgcggttcaagaagatcaaacctgaagccttcgaagccaacagattctacaccgtgatcaacaaaaagagcggcgagatcgtgcccatggaggtgaacttcaacttcgacgaccccaacctgatcatcctgcctctggcctttggcaagagacagggcagagaattcatctggaacgacctgctgtccctggaaaccggcagcctgaagctggccaacggaagagtgatcgagaagacactgtacaacagaagaacccggcaggatgagcctgccctgttcgtggccctgaccttcgagcggcgggaggtcctggactcctccaatatcaaaccaatgaacctgatcggcgtggcaagaggcgaaaacatccccgccgtgatcgccctgaccgaccccgagggctgcccactgagccggtttaaggatagcctgggaaacccaacccacatcctgagaatcggcgagagctataaggagaagcagcggaccatccaggccaagaaggaggtggagcagcggagagccggcggctacagccggaagtacgccagcaaagccaagaatctggcagacgatatggtgagaaacaccgctagagatctgctgtactacgccgtgacccaggatgccatgctgatcttcgccaacctgagccggggcttcggccggcagggcaagcggaccttcatggccgagagacagtacacacggatggaggactggctgaccgccaagctggcctacgagggcctgagcaagacctacctgtccaagacactggcccagtacacctccaagacatgcagcaactgtgggtttaccatcaccagcgccgactacgacagggtgctggagaagctgaagaagacagcaacaggctggatgaccacaattaacggcaaggagctgaaggtggagggccagattacctactacaacagatacaagagacagaacgtagtcaaggacctgtccgtcgagctggatagactgagcgaagaatctgtgaacaacgacatctcctcctggacaaagggcagaagcggagaagctctgagcctcctgaagaaaagattctcccatagacccgtgcaggagaagttcgtgtgcctgaactgcggcttcgagacacacgcagccgagcaagccgccctgaacatcgccagatcctggctgttcctgcggagccaggagtacaagaaataccagacaaacaagacaaccggcaacaccgataagagagccttcgtcgagacctggcagtccttttaccggaagaagcttaaggaggtgtggaaacctgccgtgcggtctggcggatctggcggaggctcctgtcgccttccgggacgtgatcgtggacttcacccaggaggaatggcagcagctgaagcctgctcaaaaggacctgtacagagatgtgatgatggaaatctactggaatctggtgtctctggacctggaaaccgagggagatatgaacgagcctgaccccgagaaagacagctgggaggatagaacaagcatcgtggttgtggaaggcctgatgcggaacggcgcccagggctacgcctgcgagaaggccggcatccagggctgtagagtgggatctggctccggcagcggccccaagaaaaagagaaaagtctaagctgccttctgcggggcttgccttctggccatgcccttcttctctcccttgcacctgtacctcttggtctttgaataaagcctgagtaggaaggctagcaaaaaaaaaaaaaaaaaaaaaaaaaaaaaaaaaaaaaaaaaaaaaaaaaaaaaaaaaaaaaaaaaaaaaaaaaaaaaaaa

SEQ ID NO: 18494 - RNA, 9494 nt, synthetic construct
  source 1..9494: mol_type = other RNA
aggaaataagagagaaaagaagagtaagaagaaatataagagccaccatggcccctaagaagaagcgtaaagtgagccggatggaacgcctcgtctacgaggtgcggcagaagtgcagaaacatcgaggacatctgcatctcctgcggatctctgaacgtgaccctggagcacccactgttcatcggcggcatgtgccagaactgtaaaaactgttttctggagtgtgcctatcaatacgacgatgacggctaccagagctactgcaccatctgttgcggcggaagagaggtgctgatgtgtggaaataacaactgctgccggtgcttctgcgtggaatgcgtggacctgctggtgggccccggcgccgcccaggccgctattaaggaagatccttggaactgctacatgtgcggccacaagggcacatacggcctgctgagacggagagaggactggcctagcagactgcagatgttcttcgccaataaccacgaccaggagttcgacccccctaaggtgtaccctcccgtccccgccgagaagagaaagcccatccgggtcctgagcctgttcgatggcatcgccaccggtctgctggtgctgaaggacctgggcatccaggtggataggtacattgcctccgaggtgtgcgaggactccatcaccgtgggaatggtgcgtcatcagggcaagatcatgtacgtgggcgacgtgcggagcgtgacacagaagcatatccaggagtggggccctttcgacctggtgatcggcggcagcccttgcaatgacctgagcatcgtgaacccagcccggaagggcctgtacgagggaaccggcagactgttcttcgagttttacagactgctgcacgacgcccggcctaaggaaggcgacgaccggcccttcttttggctgttcgagaatgtggtggccatgggagtcagcgacaagcgggatattagccggttcctggagagcaaccccgtgatgatcgatgccaaggaagtgagcgccgcccaccgggccagatacttctggggcaatctgcctggcatgaacagacccctggccagcaccgtgaacgacaagctggagctgcaggagtgcctggagcacggccggatcgccaagttcagcaaggtgagaaccatcaccacccgaagcaacagcatcaaacaaggcaaggaccagcactttcctgtgttcatgaacgagaaggaggacatcctgtggtgtaccgagatggagagagtgttcgggttcccagtccactacacagatgtcagcaacatgtctagactggccagacagagactgctgggaagaagctggtccgtccctgtgatcagacacctgttcgcccctctgaaggagtacttcgcctgcgtgagcagcggcaacagcaacgccaacagccggggccccagcttctctagcggcctggtgccactgtccctgagagggagccacatgggccccatggagatctacaaaaccgtgagcgcctggaagcggcagcctgtgcgcgtgctgagcctgtttcggaatatcgataaagtcctgaaaagcctgggattcctggagagcggctctggctccggcggtggcaccctgaagtacgtggaggatgtgacaaacgtggtcagacgggatgtggagaagtggggccccttcgatctggtgtacggcagcacccaacccctgggcagctcttgtgaccggtgccctggctggtacatgtttcagttccaccggatcctgcagtacgccctgccgagacaggagtcccagcggccattcttttggattttcatggacaacttgctgctgaccgaggatgaccaggaaactaccactcggttcctgcagaccgaagccgtgaccctgcaggacgtgagaggccgggactaccagaacgccatgcgggtgtggtccaacatccctggactgaaaagcaagcacgcacctctgacccctaaagaagaggagtacctgcaggcccaggtgcggagcagaagcaagctggacgcccctaaggtggatctgctggtgaagaattgcctcctgcccctgagagagtacttcaagtatttcagccagaatagtctgcccctgggaggcagcggcggcggcgccctggtgacatttgaggacgtcgccgtgcggttcacccaggaggaatgggctctgctggatccttctcagaaaatcctgtaccgggacgtgatgagagagacataccggaatctgacctccgtgggcatcaactgggaatgttgggaccttgaagcctgcttcagaagcctgggaagaaacctgagagtgcaggtggtgaagagaaagtgcgagctgaccaacagcggcccctgcgccgagggcggcccaagcagcggcgcccctcctcccagcggcggcagcccagccggctccccaacctctaccgaggagggcacctctgagtccgccacccccgagagcggccctggcacctccaccgagcccagcgagggcagcgcacccggcagccctgccggcagccccacctccacagaggagggaaccagcaccgagcccagcgaaggcagcgccccaggcaccagcaccgagcctagtgagcaggagattaaacggatcaacaagatcagaagaagacttgtgaaagacagcaacaccaagaaggccggcaagacaggccccatgaaaaccctgctggttagagtgatgacacccgatctgagagagcggctggaaaacctgagaaagaagcctgaaaatatcccccagcccatcagcaatacatctagagccaacctgaataagctgctgaccgattacaccgaaatgaagaaggcgatcctgcatgtgtactgggaagagttccagaaggaccctgtgggcctgatgagccgggtggcccagcctgccagcaagaagatcgatcagaacaagctgaaacctgagatggacgagaagggcaacctgaccaccgccggctttgcctgctctcagtgtggccagcccctgttcgtgtacaagctggagcaggtgtctgagaagggcaaggcttacaccaactacttcggacggtgcaatgtggccgagcacgaaaagctgatcctgctggcccagctgaagcccgagaaggatagcgacgaagccgtgacatatagcctgggaaagtttgggcagagggccctggatttctacagcattcatgtgaccaaggagtccacccaccccgtgaagcccctggcccagatcgccggaaacagatacgcctccggacctgtgggaaaggccctgagcgacgcatgtatgggcacaatcgcctccttcctgtctaagtaccaggacatcatcatcgaacaccagaaggtggtgaagggcaaccagaagagactggagagcctgcgggagctggccggcaaggaaaacctggaataccctagcgtgaccctgccacctcagcctcacaccaaggagggcgttgatgcctacaacgaagtgatcgcccgggtgcgaatgtgggtgaacctgaacctgtggcagaagctgaagctaagcagagatgatgccaagcctctgctgagactgaagggattcccttcctttcctctggtcgagagacaggccaacgaagtggactggtgggacatggtgtgtaacgtgaagaagctgatcaacgagaaaaaggaggatggcaaggtgttttggcagaatctggctggctacaagagacaggaagccctgagaccatacctgagcagcgaggaagatcggaagaagggaaagaaattcgctcggtaccagctgggcgacctgctgctgcacctggaaaagaagcacggcgaggactggggaaaggtgtacgacgaggcctgggagcggattgacaagaaagtggaaggcctgagcaagcacatcaagctggaagaggaacggagaagcgaggacgcccagagcaaggccgccctgaccgactggctgcgggctaaggccagcttcgtgatcgagggcctgaaggaggccgacaaggacgagttctgcagatgcgagctgaagctgcagaagtggtacggggacctgcggggaaagcccttcgccatcgaagccgagaacagcatcctggacatcagcggcttcagcaagcagtacaactgtgccttcatctggcagaaggacggcgtgaagaagctgaacctgtacctgatcatcaactacttcaagggcggcaagctgcggttcaagaagatcaaacctgaagccttcgaagccaacagattctacaccgtgatcaacaaaaagagcggcgagatcgtgcccatggaggtgaacttcaacttcgacgaccccaacctgatcatcctgcctctggcctttggcaagagacagggcagagaattcatctggaacgacctgctgtccctggaaaccggcagcctgaagctggccaacggaagagtgatcgagaagacactgtacaacagaagaacccggcaggatgagcctgccctgttcgtggccctgaccttcgagcggcgggaggtcctggactcctccaatatcaaaccaatgaacctgatcggcgtggcaagaggcgaaaacatccccgccgtgatcgccctgaccgaccccgagggctgcccactgagccggtttaaggatagcctgggaaacccaacccacatcctgagaatcggcgagagctataaggagaagcagcggaccatccaggccaagaaggaggtggagcagcggagagccggcggctacagccggaagtacgccagcaaagccaagaatctggcagacgatatggtgagaaacaccgctagagatctgctgtactacgccgtgacccaggatgccatgctgatcttcgccaacctgagccggggcttcggccggcagggcaagcggaccttcatggccgagagacagtacacacggatggaggactggctgaccgccaagctggcctacgagggcctgagcaagacctacctgtccaagacactggcccagtacacctccaagacatgcagcaactgtgggtttaccatcaccagcgccgactacgacagggtgctggagaagctgaagaagacagcaacaggctggatgaccacaattaacggcaaggagctgaaggtggagggccagattacctactacaacagatacaagagacagaacgtagtcaaggacctgtccgtcgagctggatagactgagcgaagaatctgtgaacaacgacatctcctcctggacaaagggcagaagcggagaagctctgagcctcctgaagaaaagattctcccatagacccgtgcaggagaagttcgtgtgcctgaactgcggcttcgagacacacgcagccgagcaagccgccctgaacatcgccagatcctggctgttcctgcggagccaggagtacaagaaataccagacaaacaagacaaccggcaacaccgataagagagccttcgtcgagacctggcagtccttttaccggaagaagcttaaggaggtgtggaaacctgccgtgcggtctggcggatctggcggaggctccgccctggtgacatttgaggacgtcgccgtgcggttcacccaggaggaatgggctctgctggatccttctcagaaaatcctgtaccgggacgtgatgagagagacataccggaatctgacctccgtgggcatcaactgggaatgttgggaccttgaagcctgcttcagaagcctgggaagaaacctgagagtgcaggtggtgaagagaaagtgcgagctgaccaacagcggcccctgcgccgagggcggcccaagcagcggcgcccctcctcccagcggcggcagcccagccggctccccaacctctaccgaggagggcacctctgagtccgccacccccgagagcggccctggcacctccaccgagcccagcgagggcagcgcacccggcagccctgccggcagccccacctccacagaggagggaaccagcaccgagcccagcgaaggcagcgccccaggcaccagcaccgagcctagtgagcaggagattaaacggatcaacaagatcagaagaagacttgtgaaagacagcaacaccaagaaggccggcaagacaggccccatgaaaaccctgctggttagagtgatgacacccgatctgagagagcggctggaaaacctgagaaagaagcctgaaaatatcccccagcccatcagcaatacatctagagccaacctgaataagctgctgaccgattacaccgaaatgaagaaggcgatcctgcatgtgtactgggaagagttccagaaggaccctgtgggcctgatgagccgggtggcccagcctgccagcaagaagatcgatcagaacaagctgaaacctgagatggacgagaagggcaacctgaccaccgccggctttgcctgctctcagtgtggccagcccctgttcgtgtacaagctggagcaggtgtctgagaagggcaaggcttacaccaactacttcggacggtgcaatgtggccgagcacgaaaagctgatcctgctggcccagctgaagcccgagaaggatagcgacgaagccgtgacatatagcctgggaaagtttgggcagagggccctggatttctacagcattcatgtgaccaaggagtccacccaccccgtgaagcccctggcccagatcgccggaaacagatacgcctccggacctgtgggaaaggccctgagcgacgcatgtatgggcacaatcgcctccttcctgtctaagtaccaggacatcatcatcgaacaccagaaggtggtgaagggcaaccagaagagactggagagcctgcgggagctggccggcaaggaaaacctggaataccctagcgtgaccctgccacctcagcctcacaccaaggagggcgttgatgcctacaacgaagtgatcgcccgggtgcgaatgtgggtgaacctgaacctgtggcagaagctgaagctaagcagagatgatgccaagcctctgctgagactgaagggattcccttcctttcctctggtcgagagacaggccaacgaagtggactggtgggacatggtgtgtaacgtgaagaagctgatcaacgagaaaaaggaggatggcaaggtgttttggcagaatctggctggctacaagagacaggaagccctgagaccatacctgagcagcgaggaagatcggaagaagggaaagaaattcgctcggtaccagctgggcgacctgctgctgcacctggaaaagaagcacggcgaggactggggaaaggtgtacgacgaggcctgggagcggattgacaagaaagtggaaggcctgagcaagcacatcaagctggaagaggaacggagaagcgaggacgcccagagcaaggccgccctgaccgactggctgcgggctaaggccagcttcgtgatcgagggcctgaaggaggccgacaaggacgagttctgcagatgcgagctgaagctgcagaagtggtacggggacctgcggggaaagcccttcgccatcgaagccgagaacagcatcctggacatcagcggcttcagcaagcagtacaactgtgccttcatctggcagaaggacggcgtgaagaagctgaacctgtacctgatcatcaactacttcaagggcggcaagctgcggttcaagaagatcaaacctgaagccttcgaagccaacagattctacaccgtgatcaacaaaaagagcggcgagatcgtgcccatggaggtgaacttcaacttcgacgaccccaacctgatcatcctgcctctggcctttggcaagagacagggcagagaattcatctggaacgacctgctgtccctggaaaccggcagcctgaagctggccaacggaagagtgatcgagaagacactgtacaacagaagaacccggcaggatgagcctgccctgttcgtggccctgaccttcgagcggcgggaggtcctggactcctccaatatcaaaccaatgaacctgatcggcgtggcaagaggcgaaaacatccccgccgtgatcgccctgaccgaccccgagggctgcccactgagccggtttaaggatagcctgggaaacccaacccacatcctgagaatcggcgagagctataaggagaagcagcggaccatccaggccaagaaggaggtggagcagcggagagccggcggctacagccggaagtacgccagcaaagccaagaatctggcagacgatatggtgagaaacaccgctagagatctgctgtactacgccgtgacccaggatgccatgctgatcttcgccaacctgagccggggcttcggccggcagggcaagcggaccttcatggccgagagacagtacacacggatggaggactggctgaccgccaagctggcctacgagggcctgagcaagacctacctgtccaagacactggcccagtacacctccaagacatgcagcaactgtgggtttaccatcaccagcgccgactacgacagggtgctggagaagctgaagaagacagcaacaggctggatgaccacaattaacggcaaggagctgaaggtggagggccagattacctactacaacagatacaagagacagaacgtagtcaaggacctgtccgtcgagctggatagactgagcgaagaatctgtgaacaacgacatctcctcctggacaaagggcagaagcggagaagctctgagcctcctgaagaaaagattctcccatagacccgtgcaggagaagttcgtgtgcctgaactgcggcttcgagacacacgcagccgagcaagccgccctgaacatcgccagatcctggctgttcctgcggagccaggagtacaagaaataccagacaaacaagacaaccggcaacaccgataagagagccttcgtcgagacctggcagtccttttaccggaagaagcttaaggaggtgtggaaacctgccgtgcggtctggcggatctggcggaggctcctgtgacctacaacgacgtgcacgtggacatcacccaggaggaatgggctctgatggaccccagccagcggaacctgtacaaggatgtgatggtcgagacatacatgaacctgaccgccatcggatataattgggagaacctggaagtggaagaaccatgtcagaaccccctgaagcacggcagacacgagagacctcatacaggcgagaaaccttacgagtacaatcagtgcggcaaggccttcgcccaacctggatctggctccggcagcggccccaagaaaaagagaaaagtctaagctgccttctgcggggcttgccttctggccatgcccttcttctctcccttgcacctgtacctcttggtctttgaataaagcctgagtaggaaggctagcaaaaaaaaaaaaaaaaaaaaaaaaaaaaaaaaaaaaaaaaaaaaaaaaaaaaaaaaaaaaaaaaaaaaaaaaaaaaaaaa

SEQ ID NO: 18495 - RNA, 9485 nt, synthetic construct
  source 1..9485: mol_type = other RNA
aggaaataagagagaaaagaagagtaagaagaaatataagagccaccatggcccctaagaagaagcgtaaagtgagccggatggaacgcctcgtctacgaggtgcggcagaagtgcagaaacatcgaggacatctgcatctcctgcggatctctgaacgtgaccctggagcacccactgttcatcggcggcatgtgccagaactgtaaaaactgttttctggagtgtgcctatcaatacgacgatgacggctaccagagctactgcaccatctgttgcggcggaagagaggtgctgatgtgtggaaataacaactgctgccggtgcttctgcgtggaatgcgtggacctgctggtgggccccggcgccgcccaggccgctattaaggaagatccttggaactgctacatgtgcggccacaagggcacatacggcctgctgagacggagagaggactggcctagcagactgcagatgttcttcgccaataaccacgaccaggagttcgacccccctaaggtgtaccctcccgtccccgccgagaagagaaagcccatccgggtcctgagcctgttcgatggcatcgccaccggtctgctggtgctgaaggacctgggcatccaggtggataggtacattgcctccgaggtgtgcgaggactccatcaccgtgggaatggtgcgtcatcagggcaagatcatgtacgtgggcgacgtgcggagcgtgacacagaagcatatccaggagtggggccctttcgacctggtgatcggcggcagcccttgcaatgacctgagcatcgtgaacccagcccggaagggcctgtacgagggaaccggcagactgttcttcgagttttacagactgctgcacgacgcccggcctaaggaaggcgacgaccggcccttcttttggctgttcgagaatgtggtggccatgggagtcagcgacaagcgggatattagccggttcctggagagcaaccccgtgatgatcgatgccaaggaagtgagcgccgcccaccgggccagatacttctggggcaatctgcctggcatgaacagacccctggccagcaccgtgaacgacaagctggagctgcaggagtgcctggagcacggccggatcgccaagttcagcaaggtgagaaccatcaccacccgaagcaacagcatcaaacaaggcaaggaccagcactttcctgtgttcatgaacgagaaggaggacatcctgtggtgtaccgagatggagagagtgttcgggttcccagtccactacacagatgtcagcaacatgtctagactggccagacagagactgctgggaagaagctggtccgtccctgtgatcagacacctgttcgcccctctgaaggagtacttcgcctgcgtgagcagcggcaacagcaacgccaacagccggggccccagcttctctagcggcctggtgccactgtccctgagagggagccacatgggccccatggagatctacaaaaccgtgagcgcctggaagcggcagcctgtgcgcgtgctgagcctgtttcggaatatcgataaagtcctgaaaagcctgggattcctggagagcggctctggctccggcggtggcaccctgaagtacgtggaggatgtgacaaacgtggtcagacgggatgtggagaagtggggccccttcgatctggtgtacggcagcacccaacccctgggcagctcttgtgaccggtgccctggctggtacatgtttcagttccaccggatcctgcagtacgccctgccgagacaggagtcccagcggccattcttttggattttcatggacaacttgctgctgaccgaggatgaccaggaaactaccactcggttcctgcagaccgaagccgtgaccctgcaggacgtgagaggccgggactaccagaacgccatgcgggtgtggtccaacatccctggactgaaaagcaagcacgcacctctgacccctaaagaagaggagtacctgcaggcccaggtgcggagcagaagcaagctggacgcccctaaggtggatctgctggtgaagaattgcctcctgcccctgagagagtacttcaagtatttcagccagaatagtctgcccctgggaggcagcggcggcggcgccctggtgacatttgaggacgtcgccgtgcggttcacccaggaggaatgggctctgctggatccttctcagaaaatcctgtaccgggacgtgatgagagagacataccggaatctgacctccgtgggcatcaactgggaatgttgggaccttgaagcctgcttcagaagcctgggaagaaacctgagagtgcaggtggtgaagagaaagtgcgagctgaccaacagcggcccctgcgccgagggcggcccaagcagcggcgcccctcctcccagcggcggcagcccagccggctccccaacctctaccgaggagggcacctctgagtccgccacccccgagagcggccctggcacctccaccgagcccagcgagggcagcgcacccggcagccctgccggcagccccacctccacagaggagggaaccagcaccgagcccagcgaaggcagcgccccaggcaccagcaccgagcctagtgagcaggagattaaacggatcaacaagatcagaagaagacttgtgaaagacagcaacaccaagaaggccggcaagacaggccccatgaaaaccctgctggttagagtgatgacacccgatctgagagagcggctggaaaacctgagaaagaagcctgaaaatatcccccagcccatcagcaatacatctagagccaacctgaataagctgctgaccgattacaccgaaatgaagaaggcgatcctgcatgtgtactgggaagagttccagaaggaccctgtgggcctgatgagccgggtggcccagcctgccagcaagaagatcgatcagaacaagctgaaacctgagatggacgagaagggcaacctgaccaccgccggctttgcctgctctcagtgtggccagcccctgttcgtgtacaagctggagcaggtgtctgagaagggcaaggcttacaccaactacttcggacggtgcaatgtggccgagcacgaaaagctgatcctgctggcccagctgaagcccgagaaggatagcgacgaagccgtgacatatagcctgggaaagtttgggcagagggccctggatttctacagcattcatgtgaccaaggagtccacccaccccgtgaagcccctggcccagatcgccggaaacagatacgcctccggacctgtgggaaaggccctgagcgacgcatgtatgggcacaatcgcctccttcctgtctaagtaccaggacatcatcatcgaacaccagaaggtggtgaagggcaaccagaagagactggagagcctgcgggagctggccggcaaggaaaacctggaataccctagcgtgaccctgccacctcagcctcacaccaaggagggcgttgatgcctacaacgaagtgatcgcccgggtgcgaatgtgggtgaacctgaacctgtggcagaagctgaagctaagcagagatgatgccaagcctctgctgagactgaagggattcccttcctttcctctggtcgagagacaggccaacgaagtggactggtgggacatggtgtgtaacgtgaagaagctgatcaacgagaaaaaggaggatggcaaggtgttttggcagaatctggctggctacaagagacaggaagccctgagaccatacctgagcagcgaggaagatcggaagaagggaaagaaattcgctcggtaccagctgggcgacctgctgctgcacctggaaaagaagcacggcgaggactggggaaaggtgtacgacgaggcctgggagcggattgacaagaaagtggaaggcctgagcaagcacatcaagctggaagaggaacggagaagcgaggacgcccagagcaaggccgccctgaccgactggctgcgggctaaggccagcttcgtgatcgagggcctgaaggaggccgacaaggacgagttctgcagatgcgagctgaagctgcagaagtggtacggggacctgcggggaaagcccttcgccatcgaagccgagaacagcatcctggacatcagcggcttcagcaagcagtacaactgtgccttcatctggcagaaggacggcgtgaagaagctgaacctgtacctgatcatcaactacttcaagggcggcaagctgcggttcaagaagatcaaacctgaagccttcgaagccaacagattctacaccgtgatcaacaaaaagagcggcgagatcgtgcccatggaggtgaacttcaacttcgacgaccccaacctgatcatcctgcctctggcctttggcaagagacagggcagagaattcatctggaacgacctgctgtccctggaaaccggcagcctgaagctggccaacggaagagtgatcgagaagacactgtacaacagaagaacccggcaggatgagcctgccctgttcgtggccctgaccttcgagcggcgggaggtcctggactcctccaatatcaaaccaatgaacctgatcggcgtggcaagaggcgaaaacatccccgccgtgatcgccctgaccgaccccgagggctgcccactgagccggtttaaggatagcctgggaaacccaacccacatcctgagaatcggcgagagctataaggagaagcagcggaccatccaggccaagaaggaggtggagcagcggagagccggcggctacagccggaagtacgccagcaaagccaagaatctggcagacgatatggtgagaaacaccgctagagatctgctgtactacgccgtgacccaggatgccatgctgatcttcgccaacctgagccggggcttcggccggcagggcaagcggaccttcatggccgagagacagtacacacggatggaggactggctgaccgccaagctggcctacgagggcctgagcaagacctacctgtccaagacactggcccagtacacctccaagacatgcagcaactgtgggtttaccatcaccagcgccgactacgacagggtgctggagaagctgaagaagacagcaacaggctggatgaccacaattaacggcaaggagctgaaggtggagggccagattacctactacaacagatacaagagacagaacgtagtcaaggacctgtccgtcgagctggatagactgagcgaagaatctgtgaacaacgacatctcctcctggacaaagggcagaagcggagaagctctgagcctcctgaagaaaagattctcccatagacccgtgcaggagaagttcgtgtgcctgaactgcggcttcgagacacacgcagccgagcaagccgccctgaacatcgccagatcctggctgttcctgcggagccaggagtacaagaaataccagacaaacaagacaaccggcaacaccgataagagagccttcgtcgagacctggcagtccttttaccggaagaagcttaaggaggtgtggaaacctgccgtgcggtctggcggatctggcggaggctccgccctggtgacatttgaggacgtcgccgtgcggttcacccaggaggaatgggctctgctggatccttctcagaaaatcctgtaccgggacgtgatgagagagacataccggaatctgacctccgtgggcatcaactgggaatgttgggaccttgaagcctgcttcagaagcctgggaagaaacctgagagtgcaggtggtgaagagaaagtgcgagctgaccaacagcggcccctgcgccgagggcggcccaagcagcggcgcccctcctcccagcggcggcagcccagccggctccccaacctctaccgaggagggcacctctgagtccgccacccccgagagcggccctggcacctccaccgagcccagcgagggcagcgcacccggcagccctgccggcagccccacctccacagaggagggaaccagcaccgagcccagcgaaggcagcgccccaggcaccagcaccgagcctagtgagcaggagattaaacggatcaacaagatcagaagaagacttgtgaaagacagcaacaccaagaaggccggcaagacaggccccatgaaaaccctgctggttagagtgatgacacccgatctgagagagcggctggaaaacctgagaaagaagcctgaaaatatcccccagcccatcagcaatacatctagagccaacctgaataagctgctgaccgattacaccgaaatgaagaaggcgatcctgcatgtgtactgggaagagttccagaaggaccctgtgggcctgatgagccgggtggcccagcctgccagcaagaagatcgatcagaacaagctgaaacctgagatggacgagaagggcaacctgaccaccgccggctttgcctgctctcagtgtggccagcccctgttcgtgtacaagctggagcaggtgtctgagaagggcaaggcttacaccaactacttcggacggtgcaatgtggccgagcacgaaaagctgatcctgctggcccagctgaagcccgagaaggatagcgacgaagccgtgacatatagcctgggaaagtttgggcagagggccctggatttctacagcattcatgtgaccaaggagtccacccaccccgtgaagcccctggcccagatcgccggaaacagatacgcctccggacctgtgggaaaggccctgagcgacgcatgtatgggcacaatcgcctccttcctgtctaagtaccaggacatcatcatcgaacaccagaaggtggtgaagggcaaccagaagagactggagagcctgcgggagctggccggcaaggaaaacctggaataccctagcgtgaccctgccacctcagcctcacaccaaggagggcgttgatgcctacaacgaagtgatcgcccgggtgcgaatgtgggtgaacctgaacctgtggcagaagctgaagctaagcagagatgatgccaagcctctgctgagactgaagggattcccttcctttcctctggtcgagagacaggccaacgaagtggactggtgggacatggtgtgtaacgtgaagaagctgatcaacgagaaaaaggaggatggcaaggtgttttggcagaatctggctggctacaagagacaggaagccctgagaccatacctgagcagcgaggaagatcggaagaagggaaagaaattcgctcggtaccagctgggcgacctgctgctgcacctggaaaagaagcacggcgaggactggggaaaggtgtacgacgaggcctgggagcggattgacaagaaagtggaaggcctgagcaagcacatcaagctggaagaggaacggagaagcgaggacgcccagagcaaggccgccctgaccgactggctgcgggctaaggccagcttcgtgatcgagggcctgaaggaggccgacaaggacgagttctgcagatgcgagctgaagctgcagaagtggtacggggacctgcggggaaagcccttcgccatcgaagccgagaacagcatcctggacatcagcggcttcagcaagcagtacaactgtgccttcatctggcagaaggacggcgtgaagaagctgaacctgtacctgatcatcaactacttcaagggcggcaagctgcggttcaagaagatcaaacctgaagccttcgaagccaacagattctacaccgtgatcaacaaaaagagcggcgagatcgtgcccatggaggtgaacttcaacttcgacgaccccaacctgatcatcctgcctctggcctttggcaagagacagggcagagaattcatctggaacgacctgctgtccctggaaaccggcagcctgaagctggccaacggaagagtgatcgagaagacactgtacaacagaagaacccggcaggatgagcctgccctgttcgtggccctgaccttcgagcggcgggaggtcctggactcctccaatatcaaaccaatgaacctgatcggcgtggcaagaggcgaaaacatccccgccgtgatcgccctgaccgaccccgagggctgcccactgagccggtttaaggatagcctgggaaacccaacccacatcctgagaatcggcgagagctataaggagaagcagcggaccatccaggccaagaaggaggtggagcagcggagagccggcggctacagccggaagtacgccagcaaagccaagaatctggcagacgatatggtgagaaacaccgctagagatctgctgtactacgccgtgacccaggatgccatgctgatcttcgccaacctgagccggggcttcggccggcagggcaagcggaccttcatggccgagagacagtacacacggatggaggactggctgaccgccaagctggcctacgagggcctgagcaagacctacctgtccaagacactggcccagtacacctccaagacatgcagcaactgtgggtttaccatcaccagcgccgactacgacagggtgctggagaagctgaagaagacagcaacaggctggatgaccacaattaacggcaaggagctgaaggtggagggccagattacctactacaacagatacaagagacagaacgtagtcaaggacctgtccgtcgagctggatagactgagcgaagaatctgtgaacaacgacatctcctcctggacaaagggcagaagcggagaagctctgagcctcctgaagaaaagattctcccatagacccgtgcaggagaagttcgtgtgcctgaactgcggcttcgagacacacgcagccgagcaagccgccctgaacatcgccagatcctggctgttcctgcggagccaggagtacaagaaataccagacaaacaagacaaccggcaacaccgataagagagccttcgtcgagacctggcagtccttttaccggaagaagcttaaggaggtgtggaaacctgccgtgcggtctggcggatctggcggaggctccttctcaggagagcgtggccttcgaggacgtggccgtctacttcaccaccaaagagtgggccatcatggtgcccgccgagagagccctgtacagagatgtgatgctggaaaactacgaggccgtggcttttgtggccgtgcctcctacaagcaagcccgctctggtgtcccacctggaacagggcaaggaaagctgcttcatccggcctccaggcgtgctgagcagaagcgactggcgggccggaggatctggctccggcagcggccccaagaaaaagagaaaagtctaagctgccttctgcggggcttgccttctggccatgcccttcttctctcccttgcacctgtacctcttggtctttgaataaagcctgagtaggaaggctagcaaaaaaaaaaaaaaaaaaaaaaaaaaaaaaaaaaaaaaaaaaaaaaaaaaaaaaaaaaaaaaaaaaaaaaaaaaaaaaaa
